United States Patent Application Publication US 2024/0409597 A1 - sequence listing, part 4

SEQ ID NO: 7012 - DNA, 777 bp, synthetic construct
  misc_feature 1..777: note = source = /note="Description of Artificial Sequence: Synthetic coding sequence"
  source 1..777: mol_type = other DNA
atgctggtgctgtatggccacagcacccaggacctgcctgagaccaatgcccgggtggtgggcggcacagaagctggaagaaattcctggcccagccagatcagcctgcagtaccgcagcggcggcagccgctaccacacctgtggcggcaccctcatccggcagaactgggtgatgacagctgcccactgtgtggactaccagaagaccttccgggtggtggccggggaccacaacctgagccagaatgatggaacagagcagtatgtgtctgtgcagaagatcgtggtgcacccctactggaacagcgacaacgtggccgccggctatgacatcgccctgctgcggctggcccagagcgtgaccctgaacagctatgtgcagctgggcgtgctgccccaggagggcgccatcctggccaacaacagcccctgctacatcaccggctggggcaagaccaagaccaacggccagctggcccagaccctgcagcaggcctacctgcccagcgtggactatgccatctgcagcagcagcagctactggggcagcacagtgaagaacaccatggtgtgtgctggaggagatggagtgcgcagcggctgccagggcgacagcggcggccccctgcactgcctggtgaatggcaagtacagcgtgcatggagtgaccagctttgtgagcagccggggctgcaatgtgtccaggaagcccaccgtcttcacccaggtgtctgcctacatctcctggatcaacaacgtgattgccagcaactag

SEQ ID NO: 7013 - DNA, 993 bp, synthetic construct
  misc_feature 1..993: note = source = /note="Description of Artificial Sequence: Synthetic coding sequence"
  source 1..993: mol_type = other DNA
atggccgcccggcgcagccagaggagaagaggccggcggggggagcccggcacagccctgctggtgcccctggccctgggcctgggcctggccctggcctgcctgggcctgctgctggccgtggtgtccctgggcagccgggccagcctgagcgcccaggagcccgcccaggaggagctggtggccgaggaggaccaggaccccagcgagctgaacccccagacagaggagagccaggaccctgcccccttcctgaaccggctggtgcggccccggcgcagcgcccccaagggcaggaagacccgggcccggcgggccatcgccgcccactatgaggtgcaccccaggcctggccaggatggagcccaggccggcgtggatggcaccgtgtctggctgggaggaggcccgcatcaacagcagcagccccctgcgctacaaccggcagatcggggagttcatcgtgacccgggccggcctgtactacctgtactgccagagcagtgatgccctggaggcctgggagaatggagagaggagcaggaagagaagagctgtgctgacccagaagcagaagaagcagcacagcgtgctgcacctggtgcccatcaatgccaccagcaaggatgacagtgatgtgacagaggtgatgtggcagcctgccctgcggcggggccggggcctgcaggcccagggctatggagtgcgcatccaggatgctggggtgtacctgctgtacagccaggtgctcttccaggatgtgaccttcaccatgggccaggtggtgtcccgggagggccagggccggcaggagaccctcttccgctgcatccgctccatgcccagccacccagaccgggcctacaacagctgctacagcgctggggtcttccacctgcaccagggcgacatcctgagcgtcatcatcccccgggcccgggccaagctgaacctgagcccccacggcaccttcctgggctttgtgaagctgtag

SEQ ID NO: 7014 - DNA, 2253 bp, synthetic construct
  misc_feature 1..2253: note = source = /note="Description of Artificial Sequence: Synthetic coding sequence"
  source 1..2253: mol_type = other DNA
atggccaagccccggctgctggtgctgtactttgccctgattgtggtgcctgcctgggtgagcagcatcgtgctgaccggcaccagcgagcccccagatgcccagacagtggccccagcagaagatgagaccctgcagaatgaagctgacaaccaggagaatgtgctgagccagctgctgggggactatgacaaggtgaaggccatgtctgagggcagtgactgccagtgcaagtgtgtggtgcggcccctgggcagagatgcctgccagaggatcaatgctggggccagcaggaaggaggacttctacacagtggagaccatcaccagcggcagcagctgcaagtgtgcctgtgtggcccctccttctgccctgaacccctgtgagggggacttccggctgcagaagctgcgggaggccgacagccaggacctgaagctgagcaccatcatcgacatgctggagggcgccttctacggcctggacctgctgaagctgcacagcgtgaccaccaagctggtgggccgggtggacaagctggaggaggaggtgtccaagaacctgaccaaggaaaatgagcagatcaaggaggacatggaggagatcagaacagagatgaacaagaggggcaaggagaactgcagcgagaacatcctggacagcatgccagacatccgcagcgccctgcagagagatgctgctgctgcctatgcccacccagaatatgaggagcgcttcctgcaggaggagaccgtgtcccagcagatcaacagcattgagctgctgcagacccggcccctggccctgcctgaggtggtgaagagccagaggcccctgcagaggcaggtgcacctgcggggccgcccagccagccagcccaccgtcatccggggcatcacctactacaaggccaaggtgtctgaggaggagaatgacatcgaggagcagcaggatgagttcttcagcggggacaatggagtggacctgctgattgaggaccagctgctgcggcacaacggcctgatgacctctgtgaccaggaggcctgctgccacccggcagggccacagcacagctgtgaccagtgacctgaatgccaggacagccccctggagcagcgccctgccccagcccagcaccagtgaccccagcatcgccaaccacgcctctgtgggccccaccctgcagaccacctctgtgtccccagaccccacccgggagagcgtgctgcagcccagcccccaggtgcctgccaccaccgtggcccacacagccacccagcagcctgctgccccagcccccccagctgtgagcccccgggaggccctgatggaggccatgcacacagtgcctgtgccccccaccaccgtgaggacagacagcctgggcaaggatgccccagctggctggggcaccaccccagccagccccaccctgagccctgaggaggaggatgacatcagaaatgtgattggccgctgcaaggacaccctgagcaccatcaccggccccaccacccagaacacctacggcagaaatgaaggagcctggatgaaggaccccctggccaaggatgagcgcatctacgtgaccaactactactacggcaacaccctggtggagttcaggaacctggagaacttcaagcagggccgctggagcaacagctacaagctgccctacagctggattggcaccggccacgtggtgtacaacggggccttctactacaacagagccttcaccaggaacatcatcaagtatgacctgaagcagcgctacgtggccgcctgggccatgctgcatgatgtggcctatgaggaggccaccccctggcgctggcagggccacagtgatgtggactttgctgtggatgaaaatggcctgtggctgatctacccagccctggatgatgagggcttcagccaggaggtgattgtgctgagcaagctgaatgctgctgacctgagcacccagaaggagaccacctggaggacaggcctgcggaggaacttctacggcaactgctttgtgatctgtggggtgctgtatgctgtggacagctacaaccagagaaatgccaacatctcctatgcctttgacacccacaccaacacccagatcgtgccccggctgctgtttgaaaatgagtacagctacaccacccagattgactacaaccccaaggaccggctgctgtatgcctgggacaatggccaccaggtgacctaccacgtgatctttgcctactag

SEQ ID NO: 7015 - DNA, 678 bp, synthetic construct
  misc_feature 1..678: note = source = /note="Description of Artificial Sequence: Synthetic coding sequence"
  source 1..678: mol_type = other DNA
atgaagctgggctgtgtgctgatggcctgggccctgtacctgagcctgggcgtgctgtgggtggcccagatgctgctggccgccggctgccacgccgagctgtttcctgcccccatcctgcgggctgtgcccagcgctgagccccaggccggcagccccatgaccctgagctgccagaccaagctgcccctgcagaggtctgctgcccggctgctcttctccttctacaaggatggaagaattgtgcagagccggggcctgagcagcgagttccagatccccacagccagcgaggaccacagcggcagctactggtgtgaggccgccacagaggacaaccaggtgtggaagcagagcccccagctggagatccgggtgcagggcgccagcagcagcgctgccccacccaccctgaacccagccccccagaagtctgctgcccctggaacagcccctgaggaggcccctggccccctgcccccaccacccacccccagcagcgaggaccccggcttcagcagccccctgggcatgccagacccccacctgtaccaccagatgggcctgctgctgaagcacatgcaggatgtgcgggtgctgctgggccacctgctgatggagctgcgggagctgagcggccacaggaagccaggcaccaccaaggccacagctgagtag

SEQ ID NO: 7016 - DNA, 891 bp, synthetic construct
  misc_feature 1..891: note = source = /note="Description of Artificial Sequence: Synthetic coding sequence"
  source 1..891: mol_type = other DNA
atgagccggcaggagcccaagatgtttgtgctgctgtatgtgaccagctttgccatctgtgccagcggccagccccggggcaaccagctgaagggggagaactacagcccccgctacatctgcagcatccctggcctgcccggccccccaggccccccaggggccaacggcagccctggcccccacggcagaattggcctgcccggcagagatggaagagatggcaggaaaggagagaagggggagaagggcacagctggcctgcggggcaagacaggccccctgggcctggccggggagaagggggaccagggcgagaccgggaagaagggccccatcggccctgagggggagaagggggaggtgggccccatcggccccccaggccccaagggggacagaggagagcagggcgaccccggcctgcccggggtgtgccgctgtggcagcatcgtgctgaagagcgccttctctgtgggcatcaccaccagctacccagaggagcggctgcccatcatcttcaacaaggtgctcttcaatgaaggagagcactacaacccagccaccgggaagttcatctgtgccttccctggcatctactacttctcctatgacatcaccctggccaacaagcacctggccatcggcctggtgcacaacggccagtaccgcatcaagacctttgatgccaacacaggcaaccatgatgtggccagcggcagcaccgtcatctacctgcagccagaagatgaggtgtggctggagatcttcttcacagaccagaatggcctcttcagtgaccccggctgggccgacagcctcttcagcggcttcctgctgtatgtggacacagactacctggacagcatcagtgaagatgatgagctgtag

SEQ ID NO: 7017 - DNA, 1275 bp, synthetic construct
  misc_feature 1..1275: note = source = /note="Description of Artificial Sequence: Synthetic coding sequence"
  source 1..1275: mol_type = other DNA
atgggcagcctggtgctgaccctgtgtgccctcttctgcctggccgcctacctggtgtctggcagccccatcatgaacctggagcagagccccctggaggaggacatgagcctgtttggagatgtgttcagcgagcaggatggagtggacttcaacaccctgctgcagagcatgaaggatgagttcctgaagaccctgaacctgagtgacatccccacccaggacagcgccaaggtggaccccccagagtacatgctggagctgtacaacaagtttgccacagacaggacctccatgcccagcgccaacatcatccgctccttcaagaatgaagatctcttcagccagcctgtgtccttcaacggcctgaggaagtaccccctgctcttcaacgtgtccatcccccaccacgaggaggtgatcatggccgagctgcggctgtacaccctggtgcagagggacaggatgatctatgatggagtggacaggaagatcaccatctttgaggtgctggagagcaagggggacaatgaaggagagaggaacatgctggtgctggtgtctggagagatctacggcaccaacagcgagtgggagacctttgatgtgacagatgccatccgccgctggcagaagagcggcagcagcacccaccagctggaggtgcacatcgagagcaagcatgatgaagcagaagatgccagcagcggccgcctggagattgacaccagcgcccagaacaagcacaaccccctgctgattgtgttcagtgatgaccagagcagtgacaaggagaggaaggaggagctgaatgagatgatcagccatgagcagctgcctgagctggacaacctgggcctggacagcttcagcagcggccctggagaggaggccctgctgcagatgaggagcaacatcatctatgacagcacagcccgcatcagaagaaatgccaagggcaactactgcaagaggacccccctgtacatcgacttcaaggagatcggctgggacagctggatcatcgcccctcctggctatgaggcctatgaatgtcggggcgtgtgcaactaccccctggccgagcacctgacccccaccaagcacgccatcatccaggccctggtgcacctgaagaacagccagaaggccagcaaggcctgctgcgtgcccaccaagctggagcccatcagcatcctgtacctggacaagggcgtggtgacctacaagttcaagtatgagggcatggctgtgtctgaatgtggctgcaggtag

SEQ ID NO: 7018 - DNA, 381 bp, synthetic construct
  misc_feature 1..381: note = source = /note="Description of Artificial Sequence: Synthetic coding sequence"
  source 1..381: mol_type = other DNA
atgcacctgagccagctgctggcctgtgccctgctgctgaccctgctgagcctgcggcccagcgaggccaagccaggggccccacccaaggtgcccaggaccccacctgctgaggagctggccgagccccaggccgccggcggcggccagaagaagggggacaaggcccctgggggcggcggggccaacctgaagggggacaggagccggctgctgcgggacctgcgggtggacaccaagagcagagctgcctgggcccggctgctgcaggagcaccccaatgccaggaagtacaagggggccaacaagaagggcctgagcaagggctgcttcggcctgaagctggaccgcatcggctccatgagcggcctgggctgctag

SEQ ID NO: 7019 - DNA, 423 bp, synthetic construct
  misc_feature 1..423: note = source = /note="Description of Artificial Sequence: Synthetic coding sequence"
  source 1..423: mol_type = other DNA
atgaggagccccaggatgagggtgtgtgccaagtctgtgctgctgagccactggctgttcctggcctacgtgctgatggtgtgctgcaagctgatgtctgccagcagccagcacctgcggggccatgctggccaccaccagatcaagcagggcacctgtgaggtggtggccgtgcaccgctgctgcaacaagaacagaattgaggagaggagccagacagtgaagtgcagctgcttccctggccaggtggccggcaccacccgggcccagcccagctgtgtggaggccagcatcgtcatccagaagtggtggtgccacatgaacccctgcctggagggggaggactgcaaggtgctgcctgactacagcggctggagctgcagcagcggcaacaaggtgaagaccaccaaggtgaccaggtag

SEQ ID NO: 7020 - DNA, 1332 bp, synthetic construct
  misc_feature 1..1332: note = source = /note="Description of Artificial Sequence: Synthetic coding sequence"
  source 1..1332: mol_type = other DNA
atgctgatgctgtttgtgtttggagtgctgctgcacgaggtgtccctgagcggccagaatgaggccccacccaacacccacagcatccctggagagcccctgtacaactatgccagcatccggctgcctgaggagcacatccccttcttcctgcacaacaacagacacatcgccaccgtgtgcaggaaggacagcctgtgcccctacaagaagcacctggagaagctgaagtactgctggggctatgagaagagctgcaagccagagttccgcttcggctaccctgtgtgcagctatgtggacatgggctggacagacaccctggagagcgctgaggacatcttctggaagcaggccgactttggctacgcccgggagcggctggaggagatgcacgtgctgtgccagcccaaggagaccagtgacagcagcctggtgtgcagccgctacctgcagtactgccgggccaccaacctgtacctggacctgaggaacatcaagaggaaccacgaccgcttcaaggaggacttcttccagagcggggagattggaggccactgcaagctggacatccgcaccctgaccagcgagggccagaggaagagccccctgcagagctggtttgctgagctgcagagctacacccagctgaacttccggcccattgaagatgccaagtgtgacatcgtgattgagaagcccacctacttcatgaagctggatgctggggtgaacatgtaccaccacttctgtgacttcatcaacctgtacatcacccagcacgtgaacaacagcttcagcacagatgtgtacatcgtgatgtgggacacagatggcaagatccgggtgaccatcctggcccggagcacagagtacaggaagatcctgaaccagaatgagctggtgaatgccctgaagacagtgtccacctttgaggtgcagatcgtggactacaagtaccgggagctgggcttcctggaccagctgcgcatcacccacaacacagacatcttcatcggcatgcacggggccggcctgacccacctgctcttcctgcctgactgggccgctgtgtttgagctgtacaactgtgaagatgagcgctgctacctggacctggcccggctgcggggcgtgcactacatcacctggaggcggcagaacaaggtgttcccccaggacaagggccaccaccccaccctgggggagcaccccaagttcaccaactacagctttgatgtggaggagttcatgtacctggtgctgcaggccgctgaccacgtgctgcagcaccccaagtggcccttcaagaagaagcatgatgagctgtag

SEQ ID NO: 7021 - DNA, 336 bp, synthetic construct
  misc_feature 1..336: note = source = /note="Description of Artificial Sequence: Synthetic coding sequence"
  source 1..336: mol_type = other DNA
atgggccccagcagctgcctgctgctgatcctgatccccctgctgcagctgatcaaccctggcagcacccagtgcagcctggacagcgtgatggacaagaagatcaaggatgtgctgaacagcctggagtacagccccagccccatcagcaagaagctgagctgtgcctctgtgaagagccagggccggcccagcagctgcccagctggcatggctgtgacaggctgtgcctgtggctacggctgcggctcctgggatgtgcagctggagaccacctgccactgccagtgcagcgtggtggactggaccacagcccgctgctgccacctgacctag

SEQ ID NO: 7022 - DNA, 1965 bp, synthetic construct
  misc_feature 1..1965: note = source = /note="Description of Artificial Sequence: Synthetic coding sequence"
  source 1..1965: mol_type = other DNA
atggcccccaagaagctgagctgcctgcggagcctgctgctgcccctgagcctgaccctgctgctgccccaggccgacaccaggagctttgtggtggaccggggccatgaccgcttcctgctggatggagcccccttccgctacgtgtctggcagcctgcactacttccgggtgccccgggtgctgtgggccgaccggctgctgaagatgcgctggagcggcctgaatgccatccagttctacgtgccctggaactaccacgagccccagcccggggtgtacaacttcaacggcagccgggacctgattgccttcctgaatgaagctgccctggccaacctgctggtgatcctgcggcccggcccctacatctgtgccgagtgggagatgggcggcctgcccagctggctgctgaggaagccagagatccacctgcggaccagtgaccctgacttcctggccgctgtggacagctggttcaaggtgctgctgcccaagatctacccctggctgtaccacaacggcggcaacatcatcagcatccaggtggagaatgaatatggcagctaccgggcctgtgacttctcctacatgaggcacctggccggcctcttccgggccctgctgggggagaagatcctgctcttcaccacagatggccctgagggcctgaagtgtggcagcctgcggggcctgtacaccaccgtggactttggacctgctgacaacatgaccaagatcttcaccctgctgaggaaatatgagccccacggccccctggtgaacagcgagtactacacaggctggctggactactggggccagaaccacagcaccaggtctgtgtctgctgtgaccaagggcctggagaacatgctgaagctgggcgcctctgtgaacatgtacatgtttcatggaggcaccaactttggctactggaatggagctgacaagaagggccgcttcctgcccatcaccaccagctatgactatgatgcccccatcagcgaggccggggaccccacccccaagctgtttgccctgagagatgtgatcagcaagttccaggaggtgcccctgggccccctgcccccacccagccccaagatgatgctgggccctgtgaccctgcacctggtgggccacctgctggccttcctggacctgctgtgcccccggggccccatccacagcatcctgcccatgacctttgaggccgtgaagcaggaccacggcttcatgctgtaccgcacctacatgacccacaccatctttgagcccacccccttctgggtgcccaacaatggagtgcatgaccgggcctacgtgatggtggatggagtcttccagggcgtggtggagaggaacatgagggacaagctgttcctgaccgggaagctgggcagcaagctggacatcctggtggagaacatgggccgcctgagctttggcagcaacagcagtgacttcaagggcctgctgaagccacccatcctgggccagaccatcctgacccagtggatgatgttccccctgaagattgacaacctggtgaagtggtggttccccctgcagctgcccaagtggccctacccccaggcccccagcggccccaccttctacagcaagaccttccccatcctgggctctgtgggggacaccttcctgtacctgcccggctggaccaagggccaggtgtggatcaatggcttcaacctgggccgctactggaccaagcagggcccccagcagaccctgtatgtgccccgcttcctgctcttccccaggggggccctgaacaagatcaccctgctggagctggaggatgtgcccctgcagccccaggtgcagttcctggacaagcccatcctgaacagcaccagcaccctgcacaggacccacatcaacagcctgtctgctgacaccctgagcgccagcgagcccatggagctgagcggccactag

SEQ ID NO: 7023 - DNA, 2502 bp, synthetic construct
  misc_feature 1..2502: note = source = /note="Description of Artificial Sequence: Synthetic coding sequence"
  source 1..2502: mol_type = other DNA
atgaacatggagatcggccacccccatgagggcaaggatgacctgggggacaagagggtcatcatgggcaccaagttccccatggagctgggcatccgggtgggcctgggcaaggaggacagccgctgtggggagagccctgtggtgagcaacaagtgtgagggccgcatggcccctcctgagaccaagttccccctgagcaagggcctggagatgggcctggagcggcagaacatcagcaggacagtgatgcagaggggcagcctgggcgtggacagcgtgtctgccagccagggcaccaagcccagcctgctgcccggccgcatgggcctggagaatgaaagcctgctggccggctacacccatgagcgcatcatccagccccccctgggccgggtgtgtggcagcagccaggccgccggcagcagaagagcccccctggccagcggccctgagggcgtggaggagctggtgggcaagccagcctttgtgatggagccccggcaggagatggagaaggagagcacctgtgtgctgatgaagcccaacacagagatcaagctgcctgtggaggtggacatcggcctgacccaggccgagggcccagatgagaccaagaacacagagccccagatgggcctggtgattgagcccccccagtgccagtttgcccagcagcacgagcagaggaaggaggccggcaacatcgagagcggcgtggagcccccagaccgcatccggcccatctacagcggcaagttctttgacaggaccccctgctggcccagcgctgggaaggtgattcctgtgggctacagagtggccacctgcctgacagagaagctgcccaggctcatcaccccacctgaggccaagaagtacttcaacttccgctaccccccagctggggtggagagggtcttctacggccgggccaatgacccccagatcgccccctacctgacccacggcatccgcagcaagatctctgtgctggccaacaccctcatcaacccccagcccatcaccaccttccagcagaagatcaaggacaagaaggagagcatctacctgagcaacagaagagcccccctgggcaagagccatgaccaggcccctggcctgcccaagggcatggacaccaccaacaccaccttcggcacagctgtgatcaaggagtacagcgccaaggatgtggtgaacccccccaagagctatgaggaggtgttcaaggagggcaatgaaggacatgacctgtatgtggtgagccacaatgactactatgctggggaggccaagaacaggaagtacaaccccagcagcttccaccgctgcagcgtgtatggagtgcccaccccccacttcaatgatggccgggccatggccaagagcctgtactggctgcacgagctgcagatgaagagaggagccaagtttgtgtccaagagagcagatgacttcaaggagaagttccagcacaagctgggccgggtgctggaccccatcgccgagaccatgaatgtgcccccagactgcaccttcggggcctgcctgcggcctgaggagtatggagtgggggacctgatccacaaccggctgcctgatgagtacctgcggggcaaggaccggcagagggccctgattgctgctgtgcgccaccacctgaagaaggtgaactaccagaagtttgacaccctgctggccgccttccgccactatgacaagaagggagatggcatgattgacaaggatgagctgcaggaggcctgtgaccaggccaacctgagcctggatgacaagctgctggaccagctgtttgactactgtgatgtggacaatgatggcttcatcaactacctggagtttgccaacttcctgaactggaaggacaagatgctgctgaaggagtatgaggagagggtcatcatcaagggcaggaagccagactgtgtgaaccccacagaggccaacgtggaggagcctgagcagaccctgctgatcaagccagaggacatcgtgctgaaggaggccggcagcacagagaagaccctgcggaccctgctgcggcccagcgacaaggtgagcaactactacaagaccaccagcagcgagatcaatgccatcgtgggcgccatccccagcacctgctaccccatctgtggggtgcccaccatccgcagtgacatcccagccccccgcatccgccgcatcagtgacaggaccaactatggagaggagggcagcgcctacagcctgctgtaccccaccatctttgccaggaaaggagtgtttgagcgggacttcttcaagaccaggagcaaggaggagattgctgagatcctgtgcaacatcggcgtgaagctgagtgatgaggagtttgaaaatgtgtggaacctggccagcaagaagcaccacagaggagaggtgtgtgtggagaacatcagaaatgtgctggatgagctgcggcatgctgaccgcatcaagtgcaagaccctgatgtag

SEQ ID NO: 7024 - DNA, 2004 bp, synthetic construct
  misc_feature 1..2004: note = source = /note="Description of Artificial Sequence: Synthetic coding sequence"
  source 1..2004: mol_type = other DNA
atgggcagcagccggctggccgccctgctgctgcccctgctgctgattgtcatcgacctgagtgacagcgctggcatcggcttccgccacctgccccactggaacacccgctgccccctggccagccacacagatgacagcttcaccggcagcagcgcctacatcccctgcaggacctggtgggccctcttcagcaccaagccctggtgtgtgcgggtgtggcactgcagccgctgcctgtgccagcacctgctgagcggcggcagcggcctgcagaggggcctcttccacctgctggtgcagaagagcaagaagagcagcaccttcaagttctacagaagacacaagatgcctgccccagcccagaggaagctgctgccccggcggcacctgtctgagaagagccaccacatcagcatccccagcccagacatcagccacaagggcctgcggagcaagaggacccagcccagcgaccctgagacctgggagagcctgccccggctggacagccagagacatggaggccctgagttctcctttgacctgctgcctgaggcccgggccatccgggtgaccatcagcagcggccctgaggtgtctgtgcggctgtgccaccagtgggccctggagtgtgaggagctgagcagcccctatgatgtgcagaagatcgtgtctgggggccacacagtggagctgccctatgagttcctgctgccctgcctgtgcatcgaggccagctacctgcaggaggacacagtgcggaggaagaagtgccccttccagagctggccagaggcctacggcagtgacttctggaagtctgtgcacttcacagactacagccagcacacccagatggtgatggccctgaccctgcgctgccccctgaagctggaggccgccctgtgccagagacatgactggcacaccctgtgcaaggacctgcccaatgccacagcccgggagagtgatggctggtacgtgctggagaaggtggacctgcacccccagctgtgcttcaagttctcctttggaaacagcagccacgtggagtgcccccaccagacaggcagcctgacctcctggaatgtgtccatggacacccaggcccagcagctgatcctgcacttcagcagcaggatgcacgccaccttctctgctgcctggagcctgcccggcctgggccaggacaccctggtgccccctgtgtacacagtgtcccaggcccggggcagcagccctgtgtccctggacctgatcatccccttcctgcggcccggctgctgcgtgctggtgtggaggagtgatgtgcagtttgcctggaagcacctgctgtgcccagatgtgtcctaccgccacctgggcctgctgatcctggccctgctggccctgctgaccctgctgggcgtggtgctggccctgacctgccggcggccccagagcggccctggccctgcccggcctgtgctgctgctgcatgctgctgacagcgaggcccagaggcggctggtgggcgccctggccgagctgctgcgggccgccctgggcggcggcagagatgtgattgtggacctgtgggagggcagacatgtggcccgggtgggccccctgccctggctgtgggccgcccggaccagggtggcccgggagcagggcaccgtgctgctgctgtggagcggggctgacctgcggcctgtgtctggccctgacccccgggccgcccccctgctggccctgctgcatgctgccccccggcccctgctgctgctggcctacttcagccggctgtgtgccaagggggacatccccccacccctgcgggccctgccccgctaccgcctgctgcgggacctgccccggctgctgcgggccctggatgcccggccctttgctgaggccacctcctggggccgcctgggcgcccggcagaggcggcagagccggctggagctgtgcagccggctggagcgggaggccgcccggctggccgacctgggctag

SEQ ID NO: 7025 - DNA, 609 bp, synthetic construct
  misc_feature 1..609: note = source = /note="Description of Artificial Sequence: Synthetic coding sequence"
  source 1..609: mol_type = other DNA
atggagctgtggggcgcctacctgctgctgtgcctcttcagcctgctgacccaggtgaccacagagccccccacccagaagcccaagaagatcgtgaatgccaagaaggatgtggtgaacaccaagatgtttgaggagctgaagagccggctggacaccctggcccaggaggtggccctgctgaaggagcagcaggccctgcagacagtgtgcctgaagggcaccaaggtgcacatgaagtgcttcctggccttcacccagaccaagaccttccacgaggccagcgaggactgcatcagccggggcggcaccctgggcaccccccagacaggctctgaaaatgatgccctgtatgagtacctgcggcagagcgtgggcaatgaagctgagatctggctgggcctgaatgacatggctgctgagggcacctgggtggacatgaccggggcccgcatcgcctacaagaactgggagacagagatcacagcccagccagatggcggcaagacagagaactgtgctgtgctgtctggagctgccaacgggaagtggtttgacaagcgctgccgggaccagctgccctacatctgccagtttggaattgtgtag

SEQ ID NO: 7026 - DNA, 1839 bp, synthetic construct
  misc_feature 1..1839: note = source = /note="Description of Artificial Sequence: Synthetic coding sequence"
  source 1..1839: mol_type = other DNA
atgctggagggcctgggcagccctgccagccccagggctgctgccagcgcctctgtggccggcagcagcggccctgctgcctgcagcccccccagcagcagcgcccccaggagccctgagagccctgcccccaggagaggaggagtgcgggcctctgtgccccagaagctggccgagatgctgagcagccagtatggcctcatcgtgtttgtggccggcctgctgctgctgctggcctgggccgtgcacgccgccggcgtgtccaagagtgacctgctgtgcttcctgacagccctgatgctgctgcagctgctgtggatgctgtggtacgtgggccgcagcagcgcccaccggcggctcttccggctgaaggacacccacgccggggccggctggctgcggggcagcatcaccctgtttgctgtgatcaccgtcatcctgggctgcctgaagattggctacttcatcggcttcagcgagtgcctgagcgccacagaaggagtcttccctgtgacccacagcgtgcacaccctgctgcaggtgtacttcctgtggggccacgccaaggacatcatccagagcttcaagaccctggagagatttggagtcatccacagcgtcttcaccaacctgctgctgtgggccaacggggtgctgaatgaaagcaagcaccagctgaatgagcacaaggagcggctcatcaccctgggcttcggcaacatcaccaccgtgctggatgaccacaccccccagtgcaactgcaccccacccaccctgtgcacagccatcagccacggcatctactacctgtaccccttcaacatcgagtaccagatcctggccagcaccatgctgtatgtgctgtggaagaacatcggcaggaaggtggacagccaccagcaccagaagatgcagttcaagagtgatggagtgatggtgggcgctgtgctgggcctgactgtgctggccgccaccatcgctgtggtggtggtgtacctgatccacatcggccgcagcaagaccaagtctgagagcgccctgatcatgttctacctgtatgccatcaccctgctgatgctgatgggcgccgccggcctggccggcatccgcatctacagaattgatgagaagagcctggatgagagcaagaacccagccaggaagctggacagcgacctgctggtgggcacagccagcggctcctggctgatctcctggggcagcatcctggccatcctgtgtgccgagggccacccccgctacacctggtacaacctgccctacagcatcctggccatcgtggagaagtacatccagaacctcttcatctttgagagcatccaccgggagcctgagaagctgtctgaggacatccagaccctgcgggtggtgacagtgtgcaatggaaacaccatgcccctggccagcagctgccccaagtctggaggagtggccagagatgtggccccccagggcaaggacatgcccccagctgccaatggaaatgtgtgcatgagggagagccatgacaaggaggaggagaagcaggaggagagctcctggggcggcagccccagccctgtgcggctgccccgcttcctgcagggcaatgccaagaggaaggtgctgaggaacattgctgccttcctgttcctgtgcaacatcagcctgtggatccccccagccttcggctgcaggccagaatatgacaatggcctggaggagatcgtgtttggatttgagccctggatcatcgtggtgaacctggccatgcccttcagcatcttctacaggatgcatgctgctgccagcctgtttgaggtgtactgcaagatctag

SEQ ID NO: 7027 - DNA, 786 bp, synthetic construct
  misc_feature 1..786: note = source = /note="Description of Artificial Sequence: Synthetic coding sequence"
  source 1..786: mol_type = other DNA
atggagctgctgcaggtgaccatcctcttcctgctgcccagcatctgcagcagcaacagcactggagtgctggaggccgccaacaacagcctggtggtgaccaccaccaagcccagcatcaccacccccaacacagagagcctgcagaagaatgtggtgacccccaccaccggcaccacccccaagggcaccatcaccaatgagctgctgaagatgagcctgatgagcacagccaccttcctgaccagcaaggatgagggcctgaaggccaccaccacagatgtgaggaagaatgacagcatcatcagcaatgtgacagtgacctctgtgaccctgcccaatgctgtgtccaccctgcagagcagcaagcccaagacagagacccagagcagcatcaagaccacagagatccctggctctgtgctgcagccagatgccagccccagcaagacaggcaccctgaccagcatccctgtgaccatccctgagaacaccagccagagccaggtgattggaacagaaggaggcaagaatgccagcaccagcgccaccagccgcagctacagcagcatcatcctgcctgtggtgattgccctgattgtcatcaccctgtctgtgtttgtgctggtgggcctgtacaggatgtgctggaaggctgaccccggcaccccagaaaatggaaatgaccagccccagagcgacaaggagagcgtgaagctgctgactgtgaagaccatcagccatgagagcggggagcacagcgcccagggcaagaccaagaactag

SEQ ID NO: 7028 - DNA, 6408 bp, synthetic construct
  misc_feature 1..6408: note = source = /note="Description of Artificial Sequence: Synthetic coding sequence"
  source 1..6408: mol_type = other DNA
atgcctgccctgggccctgccctgctgcaggccctgtgggccggctgggtgctgaccctgcagcccctgcccccaacagccttcaccccaaatggcacctacctgcagcacctggcccgggaccccaccagcggcaccctgtacctgggcgccaccaacttcctgttccagctgagccctggcctgcagctggaggccaccgtgtccacaggccctgtgctggacagccgggactgcctgccccctgtgatgccagatgaatgtccccaggcccagcccaccaacaaccccaaccagctgctgctggtgtcccctggggccctggtggtgtgtggctctgtgcaccagggcgtgtgtgagcagaggcggctgggccagctggagcagctgctgctgcggcctgagaggcctggggacacccagtatgtggccgccaatgaccctgctgtgtccacagtgggcctggtggcccagggcctggccggggagcccctgctgtttgtgggccggggctacaccagccggggcgtgggcggcggcatcccccccatcaccacccgggccctgtggcccccagacccccaggccgccttctcctatgaggagacagccaagctggccgtgggccgcctgtctgagtacagccaccactttgtgtctgcctttgcccggggggccagcgcctacttcctgttcctgcggcgggacctgcaggcccagagccgggccttccgggcctacgtgtcccgggtgtgcctgcgggaccagcactactacagctatgtggagctgcccctggcctgtgagggcggccgctatggcctcatccaggccgctgctgtggccaccagccgggaggtggcccatggagaggtgctgtttgctgccttcagcagcgctgccccacccaccgtgggccggccccccagcgctgctgctggggccagcggggccagcgccctgtgtgccttccccctggatgaggtggaccggctggccaacagaacaagagatgcctgctacacccgggagggccgggcagaagatggaacagaggtggcctacatcgagtatgatgtgaacagcgactgtgcccagctgcctgtggacaccctggatgcctacccctgtggcagtgaccacacccccagccccatggccagccgggtgcccctggaggccacccccatcctggagtggccaggcatccagctgacagctgtggccgtgaccatggaggatggccacaccatcgccttcctgggggacagccagggccagctgcaccgggtgtacctgggccctggcagtgatggccacccctacagcacccagagcatccagcagggcagcgctgtgtcccgggacctgacctttgatggcacctttgagcacctgtatgtgatgacccagagcaccctgctgaaggtgcctgtggccagctgtgcccagcacctggactgtgccagctgcctggcccaccgggacccctactgcggctggtgtgtgctgctgggccgctgcagccgccgctcagaatgttcccggggccagggccctgagcagtggctgtggagcttccagcctgagctgggctgcctgcaggtggccgccatgagccctgccaacatcagccgggaggagacccgggaggtgttcctgtctgtgcctgacctgccccccctgtggccaggagagagctacagctgccactttggagagcaccagagccctgccctgctgaccggcagcggcgtgatgtgccccagcccagaccccagcgaggcccctgtgctgcccagaggagctgactatgtgtctgtgtctgtggagctgcgctttggagctgtggtgattgccaagaccagcctgtccttctatgactgtgtggccgtgacagagctgcggcccagcgcccagtgccaggcctgtgtgagcagccgctggggctgcaactggtgtgtgtggcagcacctgtgcacccacaaggccagctgtgatgctggccccatggtggccagccaccagagccccctggtgtccccagaccccccagcccggggcggccccagccccagccccccaacagcccccaaggccctggccaccccagccccagacaccctgcctgtggagcccggggcccccagcacagccacagccagtgacatcagccctggggccagccccagcctgctgagcccctggggcccctgggccggcagcggcagcatcagcagccctggcagcacaggcagccccctgcacgaggagcccagcccccccagcccccagaatggacctggaacagctgtgcctgcccccacagacttccggcccagcgccaccccagaggacctgctggccagccccctgagccccagcgaggtggccgctgtgcccccagctgaccccggccctgaggccctgcaccccaccgtgcccctggacctgcccccagccaccgtgcctgccaccaccttccctggggccatgggctctgtgaagccagccctggactggctgacccgggagggcggggagctgcctgaggctgatgagtggacaggaggagatgccccagccttcagcaccagcaccctgctgtctggagatggagacagcgctgagctggagggccccccagcccccctcatcctgcccagcagcctggactaccagtatgacaccccaggcctgtgggagctggaggaggccaccctgggcgccagcagctgcccctgtgtggagagcgtgcagggcagcaccctgatgcctgtgcacgtggagcgggagatccggctgctgggcaggaacctgcacctgttccaggacggccctggggacaatgaatgtgtgatggagctggagggcctggaggtggtggtggaggcccgggtggagtgtgagcccccaccagacacccagtgccacgtgacctgccagcagcaccagctgtcctatgaggccctgcagcctgagctgcgggtgggcctcttcctgcggcgggccggccgcctgcgggtggacagcgctgagggcctgcacgtggtgctgtatgactgcagcgtgggccacggggactgcagccgctgccagacagccatgccccagtatggctgtgtgtggtgtgagggggagcggccccgctgtgtgacccgggaggcctgtggggaggccgaggccgtggccacccagtgcccagcccccctcatccacagcgtggagcccctgactggacctgtggatggcggcaccagggtgaccatccggggcagcaacctgggccagcacgtgcaggatgtgctgggcatggtgacagtggccggcgtgccctgtgctgtggatgcccaggagtatgaggtgagcagcagcctggtgtgcatcaccggggccagcggggaggaggtggccggggccacagctgtggaggtgcccggccggggccggggcgtgtctgaacatgactttgcctaccaggaccccaaggtgcacagcatcttccctgcccggggccccagggctgggggcacccggctgaccctgaatggcagcaagctgctgaccggccgcctggaggacatccgggtggtggtgggggaccagccctgccacctgctgcctgagcagcagagcgagcagctgcgctgtgagaccagcccccggcccaccccagccaccctgcctgtggccgtgtggtttggagccacagaaagaaggctgcagaggggccagttcaagtacaccctggaccccaacatcaccagcgctggccccaccaagagcttcctgagcggcggccgggagatctgtgtgcggggccagaacctggatgtggtgcagaccccccgcatccgggtgacagtggtgtccaggatgctgcagcccagccagggcctgggcagaagaagaagagtggtgcctgagacagcctgcagcctgggccccagctgcagcagccagcagtttgaggagccctgccacgtgaacagcagccagctgatcacctgcaggaccccagccctgcccggcctgcctgaggacccctgggtgcgggtggagttcatcctggacaacctggtgtttgattttgccaccctgaaccccacccccttctcctatgaggccgaccccaccctgcagcccctgaaccctgaggaccccaccatgcccttccgccacaagccaggcagcgtcttctctgtggagggggagaacctggacctggccatgagcaaggaggaggtggtggccatgattggagatggcccctgtgtggtgaagaccctgaccaggcaccacctgtactgtgagccccctgtggagcagcccctgcccaggcaccacgccctgcgggaggccccagacagcctgcctgagttcaccgtgcagatgggcaacctgcgcttcagcctgggccacgtgcagtatgatggagagagccctggggccttccctgtggccgcccaggtgggcctgggcgtgggcaccagcctgctggccctgggcgtcatcatcatcgtgctgatgtacagaaggaagagcaagcaggccctgcgggactacaagaaggtgcagatccagctggagaacctggagagctctgtgcgggaccgctgcaagaaggagttcacagacctgatgacagagatgacagacctgaccagtgacctgctgggcagcggcatccccttcctggactacaaggtgtatgcagagcgcatcttcttccctggccaccgggagagccccctgcaccgggacctgggcgtgcctgagagcagaagacccaccgtggagcagggcctgggccagctgagcaacctgctgaacagcaagctgttcctgaccaagttcatccacaccctggagagccagaggaccttcagcgcccgggaccgggcctacgtggccagcctgctgactgtggccctgcacggcaagctggagtacttcacagacatcctgcggaccctgctgagtgacctggtggcccagtatgtggccaagaaccccaagctgatgctgcggaggacagaaacagtggtggagaagctgctgaccaactggatgagcatctgcctgtacacctttgtgcgggacagcgtgggggagcccctgtacatgctgttccggggcatcaagcaccaggtggacaagggccctgtggacagcgtgacaggcaaggccaagtacaccctgaatgacaaccggctgctgcgggaggatgtggagtaccggcccctgaccctgaatgccctgctggccgtgggccctggagctggggaggcccagggcgtgcctgtgaaggtgctggactgtgacaccatcagccaggccaaggagaagatgctggaccagctgtacaagggcgtgcccctgacccagaggccagaccccaggaccctggatgtggagtggaggtctggagtggccggccacctgatcctgagtgatgaagatgtgaccagcgaggtgcagggcctgtggaggcggctgaacaccctgcagcactacaaggtgcctgatggagccaccgtggccctggtgccctgcctgaccaagcacgtgctgcgggagaaccaggactatgtgcctggagagaggacccccatgctggaggatgtggatgaaggaggcatccggccctggcacctggtgaagcccagtgatgagcctgagcccccccggccccggcggggcagcctgcggggcggggagcgggagcgggccaaggccatccctgagatctacctgacccggctgctgtccatgaagggcaccctgcagaagtttgtggatgacctcttccaggtgatcctgagcaccagcaggcctgtgcccctggccgtgaagtacttctttgacctgctggatgagcaggcccagcagcacggcatcagtgaccaggacaccatccacatctggaagaccaacagcctgcccctgcgcttctggatcaacatcatcaagaacccccagtttgtgtttgatgtgcagaccagtgacaacatggatgctgtgctgctggtgattgcccagaccttcatggatgcctgcaccctggccgaccacaagctgggccgggacagccccatcaacaagctgctgtatgcccgggacatcccccgctacaagaggatggtggagcgctactatgctgacatccggcagacagtgcctgccagtgaccaggagatgaacagcgtgctggccgagctgtcctggaactacagcggggacctgggcgcccgggtggccctgcacgagctgtacaagtacatcaacaagtactatgaccagatcatcacagccctggaggaggatggaacagcccagaagatgcagctgggctaccgcctgcagcagattgctgctgctgtggagaacaaggtgacagacctgtag

SEQ ID NO: 7029 - DNA, 297 bp, synthetic construct
  misc_feature 1..297: note = source = /note="Description of Artificial Sequence: Synthetic coding sequence"
  source 1..297: mol_type = other DNA
atgaagctgatggtgctggtgttcaccatcggcctgaccctgctgctgggcgtgcaggccatgcctgccaaccggctgagctgctacaggaagatcctgaaggaccacaactgccacaacctgcctgagggcgtggccgacctgacccagattgatgtgaatgtgcaggaccacttctgggatggcaagggctgtgagatgatctgctactgcaacttcagcgagctgctgtgctgccccaaggatgtgttcttcggccccaagatcagctttgtgatcccctgcaacaaccagtag

SEQ ID NO: 7030 - DNA, 1443 bp, synthetic construct
  misc_feature 1..1443: note = source = /note="Description of Artificial Sequence: Synthetic coding sequence"
  source 1..1443: mol_type = other DNA
atgaagaggtctgtggccgtgtggctgctggtgggcctgagcctgggcgtgccccagtttgggaagggggacatctgtgaccccaacccctgtgaaaatggaggcatctgcctgcccggcctggctgatggcagcttcagctgtgaatgtccagatggcttcacagaccccaactgcagctctgtggtggaggtggccagtgatgaggaggagcccaccagcgctggcccctgcacccccaacccctgccacaatggaggcacctgtgagatcagcgaggcctacagaggagacaccttcatcggctacgtgtgcaagtgcccccggggcttcaacggcatccactgccagcacaacatcaatgaatgtgaggtggagccctgcaagaatggaggcatctgcacagacctggtggccaactacagctgtgagtgccctggagagttcatgggcaggaactgccagtacaagtgcagcggccccctgggcatcgagggcggcatcatcagcaaccagcagatcacagccagcagcacccaccgggccctgtttggcctgcagaagtggtacccctactatgcccggctgaacaagaagggcctcatcaatgcctggacagctgctgaaaatgaccgctggccctggatccagatcaacctgcagaggaagatgagggtgactggagtcatcacccagggcgccaagagaattggcagccctgagtacatcaagagctacaagatcgcctacagcaatgatggcaagacctgggccatgtacaaggtgaagggcaccaatgaagacatggtgttccggggcaacatcgacaacaacaccccctatgccaacagcttcaccccacccatcaaggcccagtatgtgcggctgtacccccaggtgtgccgccgccactgcaccctgaggatggagctgctgggctgtgagctgagcggctgcagcgagcccctgggcatgaagagcggccacatccaggactaccagatcacagccagcagcatcttccgcaccctgaacatggacatgttcacctgggagcccaggaaggcccggctggacaagcagggcaaggtgaatgcctggaccagcggccacaatgaccagagccagtggctgcaggtggacctgctggtgcccaccaaggtgacaggcatcatcacccagggcgccaaggactttggacatgtgcagtttgtgggcagctacaagctggcctacagcaatgatggagagcactggacagtgtaccaggatgagaagcagaggaaggacaaggtgttccagggcaactttgacaatgacacccacaggaagaatgtgattgatcctcccatctatgcccggcacatccgcatcctgccctggagctggtacggccgcatcaccctgcggtctgagctgctgggctgcacagaggaggagtag

SEQ ID NO: 7031 - DNA, 1323 bp, synthetic construct
  misc_feature 1..1323: note = source = /note="Description of Artificial Sequence: Synthetic coding sequence"
  source 1..1323: mol_type = other DNA
atggctgtgaagctgggcaccctgctgctggccctggccctgggcctggcccagcctgccagcgcccggaggaagctgctggtgttcctgctggatggcttcagaagtgactacatcagtgatgaggccctggagagcctgcccggcttcaaggagatcgtgtccagaggagtgaaggtggactacctgaccccagacttccccagcctgagctaccccaactactacaccctgatgacaggccgccactgtgaggtgcaccagatgattggcaactacatgtgggaccccaccaccaacaagagctttgatattggagtgaacaaggacagcctgatgcccctgtggtggaatggcagcgagcccctgtgggtgaccctgaccaaggccaagaggaaggtgtacatgtactactggccaggctgtgaggtggagatcctgggcgtgcggcccacctactgcctggagtacaagaatgtgcccacagacatcaactttgccaatgctgtgtctgatgccctggacagcttcaagagcggccgggctgacctggccgccatctaccacgagagaattgatgtggagggccaccactacggccctgccagcccccagaggaaggatgccctgaaggctgtggacacagtgctgaagtacatgaccaagtggatccaggagcggggcctgcaggaccggctgaatgtcatcatcttcagtgaccacggcatgacagacatcttctggatggacaaggtgattgagctgaacaagtacatcagcctgaatgacctgcagcaggtgaaggaccggggccctgtggtgtccctgtggccagcccctgggaagcacagcgagatctacaacaagctgagcacagtggagcacatgacagtgtatgagaaggaggccatccccagccgcttctactacaagaagggcaagtttgtgagccccctgaccctggtggctgatgagggctggttcatcacagaaaatcgggagatgctgcccttctggatgaacagcactggaagaagagagggctggcagaggggctggcacggctatgacaatgagctgatggacatgaggggcatcttcctggccttcggccctgacttcaagagcaacttccgggccgcccccatccgctctgtggatgtgtacaacgtgatgtgcaatgtggtgggcatcacccccctgcccaacaacggctcctggagccgggtgatgtgcatgctgaagggccgggccagcacagcccctcctgtgtggcccagccactgtgccctggccctgatcctgctcttcctgctggcctag

SEQ ID NO: 7032 - DNA, 351 bp, synthetic construct
  misc_feature 1..351: note = source = /note="Description of Artificial Sequence: Synthetic coding sequence"
  source 1..351: mol_type = other DNA
atggagagcagccgggtgcggctgctgcccctgctgggcgccgccctgctgctgatgctgcccctgctgggcacccgggcccaggaggatgctgagctgcagccccgggccctggacatctacagcgctgtggatgatgccagccatgagaaggagctgattgaggccctgcaggaggtgctgaagaagctgaagagcaagagggtgcccatctatgagaagaagtatggccaggtgcccatgtgtgatgctggggagcagtgtgctgtgaggaagggggcccgcatcggcaagctgtgtgactgcccccggggcaccagctgcaacagcttcctgctgaagtgcctgtag

SEQ ID NO: 7033 - DNA, 1365 bp, synthetic construct
  misc_feature 1..1365: note = source = /note="Description of Artificial Sequence: Synthetic coding sequence"
  source 1..1365: mol_type = other DNA
atggcccggcccaacaagttcctgctgtggttctgctgctttgcctggctgtgcttccccatcagcctgggcagccaggccagcggcggggaggcccagattgctgccagcgctgagctggagagcggggccatgccctggagcctgctgcagcacattgatgagcgggacagagctggcctgctgcctgccctcttcaaggtgctgtctgtgggccggggcggcagcccccggctgcagcctgacagccgggccctgcactacatgaagaagctgtacaagacctacgccaccaaggagggcatccccaagagcaacagaagccacctgtacaacacagtgcggctcttcaccccctgcaccaggcacaagcaggcccctggggaccaggtgacaggcatcctgcccagcgtggagctgctcttcaacctggaccgcatcaccaccgtggagcacctgctgaagtctgtgctgctgtacaacatcaacaacagcgtgtccttcagcagcgctgtgaagtgtgtgtgcaacctgatgatcaaggagcccaagagcagcagcaggaccctgggccgggccccctacagcttcaccttcaacagccagtttgaatttgggaagaagcacaagtggatccagattgatgtgaccagcctgctgcagcccctggtggccagcaacaagaggagcatccacatgagcatcaacttcacctgcatgaaggaccagctggagcaccccagcgcccagaatggcctcttcaacatgaccctggtgagccccagcctcatcctgtacctgaatgacaccagcgcccaggcctaccacagctggtacagcctgcactacaagagaagacccagccagggccctgaccaggagaggagcctgagcgcctaccctgtgggggaggaggccgcagaagatggccgcagcagccaccaccgccaccggcggggccaggagaccgtgagcagcgagctgaagaagcccctgggccctgccagcttcaacctgtctgagtacttccggcagttcctgctgccccagaatgaatgtgagctgcatgacttccggctgtccttcagccagctgaagtgggacaactggatcgtggccccccaccgctacaacccccgctactgcaagggggactgccccagggctgtgggccacagatatggcagccctgtgcacaccatggtgcagaacatcatctatgagaagctggacagctctgtgccccggcccagctgtgtgcctgccaagtacagccccctgtctgtgctgaccatcgagccagatggcagcatcgcctacaaggagtatgaggacatgattgccaccaagtgcacctgcaggtag

SEQ ID NO: 7034 - DNA, 234 bp, synthetic construct
  misc_feature 1..234: note = source = /note="Description of Artificial Sequence: Synthetic coding sequence"
  source 1..234: mol_type = other DNA
atgtggcacctgaagctgtgtgctgtgctgatgatcttcctgctgctgctgggccagattgatggcagccccatccctgaggtgagcagcgccaagagaagacccaggaggatgacccccttctggaggggcgtgtccctgcggcccatcggggccagctgcagagatgacagcgagtgcatcacccggctgtgcaggaagaggcgctgcagcctgtctgtggcccaggagtag

SEQ ID NO: 7035 - DNA, 912 bp, synthetic construct
  misc_feature 1..912: note = source = /note="Description of Artificial Sequence: Synthetic coding sequence"
  source 1..912: mol_type = other DNA
atgtctgagccccagcctgacctggagcccccccagcacggcctgtacatgctgttcctgctggtgctggtgttcttcctgatgggcctggtgggcttcatgatctgccacgtgctgaagaagaagggctaccgctgcaggaccagccggggcagcgagccagatgatgcccagctgcagcccccagaagatgatgacatgaatgaagatactgtggagagaattgtgcgctgcatcatccagaatgaggccaatgctgaggccctgaaggagatgctgggggacagcgagggggagggcaccgtgcagctgagctctgtggatgccaccagcagcctgcaggatggagcccccagccaccaccacacagtgcacctgggcagcgctgccccctgcctgcactgcagccgcagcaagaggcctcccctggtgcggcagggccgcagcaaggagggcaagagccggcccaggactggagagaccaccgtcttctctgtgggccgcttccgggtgacccacatcgagaagagatatggcctgcacgagcacagagatggcagccccacagaccgctcctggggcagcggcggcggccaggaccccggcggcggccagggcagcggcggcggccagcccaaggccggcatgcctgccatggagcggctgcccccagagcggccccagccccaggtgctggccagcccccctgtgcagaatggaggcctgcgggacagcagcctgaccccccgggccctggagggcaacccccgggccagcgctgagcccaccctgcgggccggcggccggggccccagccctggcctgcccacccaggaggccaacggccagcccagcaagccagacaccagtgaccaccaggtgtccctgccccagggcgccggctccatgtag

SEQ ID NO: 7036 - DNA, 795 bp, synthetic construct
  misc_feature 1..795: note = source = /note="Description of Artificial Sequence: Synthetic coding sequence"
  source 1..795: mol_type = other DNA
atgaggaccctgtggatggccctgtgtgccctgagccggctgtggccaggggcccaggccggctgtgccgaggccggccgctgctgccccggccgggaccctgcctgctttgcccggggctggaggctggacagagtgtatggcacctgcttctgtgaccaggcctgccgcttcaccggggactgctgctttgattatgaccgggcctgcccagcccggccctgctttgtgggggagtggagcccctggagcggctgtgccgaccagtgcaagcccaccaccagggtgagaagaagatctgtgcagcaggagccccagaatggaggagccccctgcccccccctggaggagagagctggctgcctggagtacagcaccccccagggccaggactgtggccacacctacgtgcctgccttcatcaccaccagcgccttcaacaaggagaggacccggcaggccaccagcccccactggagcacccacacagaagatgctggctactgcatggagttcaagacagagagcctgaccccccactgtgccctggagaactggcccctgacccgctggatgcagtacctgcgggagggctacacagtgtgtgtggactgccagcccccagccatgaacagcgtgtccctgcgctgcagcggagatggcctggacagtgatggcaaccagaccctgcactggcaggccatcggcaacccccgctgccagggcacctggaagaaggtgcggcgggtggaccagtgcagctgcccagctgtgcacagcttcatcttcatctag

SEQ ID NO: 7037 - DNA, 312 bp, synthetic construct
  misc_feature 1..312: note = source = /note="Description of Artificial Sequence: Synthetic coding sequence"
  source 1..312: mol_type = other DNA
atgaggcagaggctgctgcccagcgtgaccagcctgctgctggtggccctgctcttccctggcagcagccaggcccggcacgtgaaccacagcgccacagaggccctgggggagctgcgggagcgggcccctggccagggcaccaacggcttccagctgctgcggcatgctgtgaagagggacctgctgccccccaggaccccaccctaccaggtgcacatcagccaccgggaggcccggggccccagcttccgcatctgtgtggacttcctgggcccccgctgggcccggggctgcagcactggaaattag

SEQ ID NO: 7038 - DNA, 3867 bp, synthetic construct
  misc_feature 1..3867: note = source = /note="Description of Artificial Sequence: Synthetic coding sequence"
  source 1..3867: mol_type = other DNA
atggcctctgtggcctgggccgtgctgaaggtgctgctgctgctgcccacccagacctggagccctgtgggcgccggcaaccccccagactgtgatgcccccctggccagcgccctgcccaggagcagcttcagcagcagcagcgagctgagcagcagccacggccctggcttcagccggctgaacagaagagatggagctgggggctggacccccctggtgagcaacaagtaccagtggctgcagattgacctgggggagaggatggaggtgacagctgtggccacccagggcggctacggcagcagtgactgggtgaccagctacctgctgatgttcagtgatggcggcaggaactggaagcagtaccgccgggaggagagcatctggggcttccctggcaacaccaatgctgacagcgtggtgcactaccgcctgcagcccccatttgaggcccgcttcctgcgcttcctgcccctggcctggaacccccggggccgcatcggcatgagaattgaggtgtatggctgtgcctacaagtctgaggtggtgtactttgatggccagagcgccctgctgtaccgcctggacaagaagcccctgaagcccatcagagatgtgatcagcctgaagttcaaggccatgcagagcaatggcatcctgctgcaccgggagggccagcacggcaaccacatcaccctggagctgatcaagggcaagctggtgttcttcctgaacagcggaaatgccaagctgcccagcaccatcgcccctgtgaccctgaccctgggcagcctgctggatgaccagcactggcacagcgtgctgattgagctgctggacacccaggtgaacttcaccgtggacaagcacacccaccacttccaggccaagggggacagcagctacctggacctgaactttgagatcagctttggaggcatccccaccccaggccgcagccgggccttccggaggaagagcttccacggctgcctggagaacctgtactacaatggagtggatgtgacagagctggccaagaagcacaagccccagatcctgatgatgggaaatgtgtccttcagctgcccccagccccagacagtgcctgtgaccttcctgagcagccgcagctacctggccctgcccggcaacagcggggaggacaaggtgtctgtgaccttccagttccgcacctggaacagagctggccacctgctgtttggagagctgcggcggggcagcggcagctttgtgctcttcctgaaggatggcaagctgaagctgagcctcttccagcccggccagagccccagaaatgtgacagctggggccggcctgaatgatggccagtggcacagcgtgtccttcagcgccaagtggagccacatgaatgtggtggtggatgatgacacagctgtgcagcccctggtggccgtgctgattgattctggggacacctactactttggaggctgcctggacaacagcagcggcagcggctgcaagagccccctgggcggcttccagggctgcctgcggctcatcaccatcggggacaaggctgtggaccccatcctggtgcagcagggcgccctgggcagcttccgggacctgcagattgacagctgtggcatcacagaccgctgcctgcccagctactgtgagcacggcggagaatgttcccagagctgggacaccttcagctgtgactgcctgggcaccggctacacaggagagacctgccacagcagcctgtatgagcagagctgtgaggcccacaagcaccggggcaaccccagcggcctgtactacattgatgctgatggcagcggccccctgggccccttcctggtgtactgcaacatgacagcagatgctgcctggacagtggtgcagcacggcggcccagatgctgtgaccctgcggggggcccccagcggccaccccaggtctgctgtgtcctttgcctatgctgctggagctggccagctgcggtctgctgtgaacctggccgagcgctgtgagcagaggctggccctgcgctgtggcacagcccggcggccagacagcagagatggcacccccctgtcctggtgggtgggccgcaccaatgagacccacacctcctggggcggcagcctgcctgatgcccagaagtgcacctgtggcctggagggcaactgcatcgacagccagtactactgcaactgtgatgctggaagaaatgagtggaccagtgacaccatcgtgctgagccagaaggagcacctgcctgtgacccagatcgtgatgacagatgctggccggccccacagcgaggccgcctacaccctgggccccctgctgtgccgcggggaccagagcttctggaacagcgccagcttcaacacagagaccagctacctgcacttccctgccttccacggggagctgacagcagatgtgtgcttcttcttcaagaccaccgtgtcctctggagtcttcatggagaacctgggcatcacagacttcatccgcatcgagctgcgggcccccacagaggtgaccttctcctttgatgtgggcaatggcccctgtgaggtgacagtgcagagccccacccccttcaatgacaaccagtggcaccacgtgcgggcagagagaaatgtgaagggggccagcctgcaggtggaccagctgccccagaagatgcagcctgccccagcagatggccacgtgcggctgcagctgaacagccagctgttcatcggcggcacagccacccggcagaggggcttcctgggctgcatccgcagcctgcagctgaatggagtggccctggacctggaggagcgggccaccgtgaccccaggagtggagcccggctgtgccggccactgcagcacctacggccacctgtgcagaaatggaggccgctgccgggagaagagaagaggagtgacctgtgactgtgccttcagcgcctatgatggccccttctgcagcaatgagatcagcgcctactttgccaccggcagctccatgacctaccacttccaggagcactacaccctgtctgagaacagcagcagcctggtgagcagcctgcacagagatgtgaccctgacccgggagatgatcaccctgtccttccgcaccaccaggacccccagcctgctgctgtatgtgagcagcttctatgaggagtacctgagcgtcatcctggccaacaacggcagcctgcagatccgctacaagctggacagacaccagaacccagatgccttcacctttgacttcaagaacatggctgatggccagctgcaccaggtgaagatcaaccgggaggaggccgtggtgatggtggaggtgaaccagagcaccaagaagcaggtgatcctgagcagcggcacagagttcaatgctgtgaagagcctcatcctgggcaaggtgctggaggccgccggggctgaccctgacaccaggagagctgccaccagcggcttcaccggctgcctgtctgctgtgcgcttcggccgggccgcccccctgaaggccgccctgcggcccagcggccccagccgggtgacagtgcggggccacgtggcccccatggcccgctgtgccgccggggccgccagcggcagccctgcccgggagctggccccccggctggccggcggggccggccgcagcggccctgcagatgaaggagagcccctggtgaatgctgacagaagagacagcgctgtgattggaggagtgattgctgtggtgatcttcatcctgctgtgcatcacagccatcgccatccgcatctaccagcagaggaagctgaggaaagaaaatgaaagcaaggtgtccaagaaggaggagtgctag

SEQ ID NO: 7039 - DNA, 369 bp, synthetic construct
  misc_feature 1..369: note = source = /note="Description of Artificial Sequence: Synthetic coding sequence"
  source 1..369: mol_type = other DNA
atggtgcccggccccccagagagcgtggtgcgcttcttcctgtggttctgcttcctgctgccccccaccaggaaggccagctgtgacccccgggacctgaagagctgcaaccggccctgtgtgtggagccggctgctgaagcccaacagcagcctgagcaacctggagacagcctacttcccccagatcctgcgcttcctgcggccctggtacttcagccgcagccacctgaactaccaccagaaggccccagcccgctgggagtggctgtacagcatctacaggaagggcaccaaggcccagaggagaaatgtgctgcggagcccctgtgccccaccccagcccagctggccctgcagcgtcatctag

SEQ ID NO: 7040 - DNA, 1887 bp, synthetic construct
  misc_feature 1..1887: note = source = /note="Description of Artificial Sequence: Synthetic coding sequence"
  source 1..1887: mol_type = other DNA
atggcccccagcgctgaccccggcatgagcaggatgctgcccttcctgctgctgctgtggttcctgcccatcacagagggcagccagagagctgagcccatgttcaccgctgtgaccaacagcgtgctgcccccagactatgacagcaaccccacccagctgaactacggcgtggccgtgacagatgtggaccatgatggagactttgaaattgtggtggccggctacaacggccccaacctggtgctgaagtatgaccgggcccagaagaggctggtgaacattgctgtggatgagaggagcagcccctactatgccctgcgggaccggcagggcaatgccatcggcgtgacagcctgtgacattgatggagatggccgggaggagatctacttcctgaacaccaacaatgccttcagcggcgtggccacctacacagacaagctgttcaagttcaggaacaaccgctgggaggacatcctgagtgatgaggtgaatgtggcccggggcgtggccagcctgtttgctggccgctctgtggcctgtgtggacaggaagggcagcggccgctacagcatctacatcgccaactatgcctatggaaatgtgggcccagatgccctgattgagatggaccctgaggccagtgacctgagccggggcatcctggccctgagagatgtggccgctgaggccggcgtgtccaagtacacaggaggccggggcgtgtctgtgggccccatcctgagcagcagcgccagtgacatcttctgtgacaatgaaaatggccccaacttcctgttccacaacagaggagatggcacctttgtggatgctgctgccagcgctggggtggatgacccccaccagcacggccggggcgtggccctggccgacttcaacagagatggcaaggtggacatcgtgtatggcaactggaatggcccccaccggctgtacctgcagatgagcacccacggcaaggtgcgcttccgggacatcgccagccccaagttctccatgcccagccctgtgaggacagtcatcacagctgactttgacaatgaccaggagctggagatcttcttcaacaacatcgcctaccgcagcagcagcgccaacagactcttccgggtcatcagaagagagcacggggaccccctgattgaggagctgaaccctggagatgccctggagcctgagggccggggcactggaggagtggtgacagactttgatggagatggcatgctggacctgatcctgagccacggggagagcatggcccagcccctgtctgtgttccggggcaaccagggcttcaacaacaactggctgcgggtggtgcccaggaccaggtttggagcctttgcccggggggccaaggtggtgctgtacaccaagaagagcggggcccacctgcgcatcattgatggcggcagcggctacctgtgtgagatggagcctgtggcccacttcggcctgggcaaggatgaggccagctctgtggaggtgacctggccagatggcaagatggtgtccagaaatgtggccagcggggagatgaacagcgtgctggagatcctgtaccccagagatgaggacaccctgcaggaccctgcccccctggagacccccatgaatgccagcagcagccacagctgtgccctggagaccagcccctacgtgtccacccccatggaggccaccggggccggccccaccaggtctgctgtgggcgccaccagccccaccaggatggcccagcctgcctggggcctgagcgccagccaccgggccccagcccctcctcctccacccctgctgctgcccctgcccctgctgctgcccctgctggagctgcccctgctgcacaggagcagctag

SEQ ID NO: 7041 - DNA, 1008 bp, synthetic construct
  misc_feature 1..1008: note = source = /note="Description of Artificial Sequence: Synthetic coding sequence"
  source 1..1008: mol_type = other DNA
atgcagggccagggcagaagaagaggcacctgcaaggacatcttctgcagcaagatggccagctacctgtatggagtgctgtttgctgtgggcctgtgtgcccccatctactgtgtgtccccagccaatgcccccagcgcctacccccggcccagcagcaccaagagcaccccagccagccaggtgtacagcctgaacacagactttgccttccggctgtacagaaggctggtgctggagacccccagccagaacatcttcttcagccctgcccgcatcaacagccacgtgaagaagaagacccagggcaaggtggtggacatcatccagggcctggacctgctgacagccatggtgctggtgaaccacatcttcttcaaggccaagtgggagaagcccttccaccctgagtacaccaggaagaacttccccttcctggtgggggagcaggtgacagtgcacgtgcccatgatgcaccagaaggagcagtttgccttcggcgtggacacagagctgaactgctttgtgctgcagatggactacaagggagatgctgtggccttctttgtgctgcccagcaagggcaagatgaggcagctggagcaggccctgagcgcccggaccctgaggaagtggagccacagcctgcagaagcgctggattgaggtgttcatcccccgcttcagcatcagcgccagctacaacctggagaccatcctgcccaagatgggcatccagaatgtgtttgacaagaatgctgacttcagcggcatcgccaagagggacagcctgcaggtgtccaaggccacccacaaggctgtgctggatgtgtctgaggagggcacagaggccacagctgccaccaccaccaagttcatcgtgcgcagcaaggatggccccagctacttcaccgtgtccttcaacagaaccttcctgatgatgatcaccaacaaggccacagatggcatcctcttcctgggcaaggtggagaaccccaccaagagctag

SEQ ID NO: 7042 - DNA, 768 bp, synthetic construct
  misc_feature 1..768: note = source = /note="Description of Artificial Sequence: Synthetic coding sequence"
  source 1..768: mol_type = other DNA
atggtgctgctgctggtgatcctgatccctgtgctggtgtcctctgctggcaccagcgcccactatgagatgctgggcacctgcaggatggtgtgtgacccctatggaggcaccaaggcccccagcacagctgccaccccagaccggggcctgatgcagagcctgcccaccttcatccagggccccaagggggaggccggccggcctgggaaggccggcccccggggccccccaggagagcccggccccccaggccccatgggccccccaggagagaagggggagcccggccggcagggcctgcccggccccccaggggcccctggcctgaatgctgctggggccatctctgctgccacctacagcacagtgcccaagatcgccttctacgccggcctgaagaggcagcacgagggctatgaggtgctgaagtttgatgatgtggtgaccaacctgggcaaccactatgaccccaccaccgggaagttcacctgcagcatccctggcatctacttcttcacctaccacgtgctgatgagaggaggagatggcacctccatgtgggccgacctgtgcaagaacaaccaggtgcgggccagcgccatcgcccaggatgctgaccagaactatgactatgccagcaacagcgtggtgctgcacctggagcctggagatgaggtgtacatcaagctggatggcggcaaggcccatggaggcaacaacaacaagtacagcaccttcagcggcttcatcatctatgctgactag

SEQ ID NO: 7043 - DNA, 1617 bp, synthetic construct
  misc_feature 1..1617: note = source = /note="Description of Artificial Sequence: Synthetic coding sequence"
  source 1..1617: mol_type = other DNA
atgtccttcagcgccaccatcctcttcagccccccatctggcagcgaggcccgctgctgctgctgtgcctgcaagtctgagaccaatggaggcaacacaggcagccagggcggcaaccccccacccagcacccccatcaccgtgactggacatggcctggccgtgcagagcagcgagcagctgctgcacgtgatctaccagagggtggacaaggctgtgggcctggccgaggccgccctgggcctggcccgggccaacaatgagctgctgaagaggctgcaggaggaggtgggggacctgcggcagggcaaggtgtccatcccagatgaagatggagagagccgggcccacagcagccccccagaggagcccggccccctgaaggagagccctggagaggccttcaaggccctgtctgctgtggaggaggagtgtgacagcgtgggcagcggcgtgcaggtggtgattgaggagctgcggcagctgggcgccgcctctgtgggccctggccccctgggcttccctgccacccagagggacatgaggctgcccggctgcaccctggccgccagcgaggccgcccccctgctgaaccccctggtggatgattatgtggccagcgagggcgctgtgcagagggtgctggtgcctgcctatgccaagcagctgagccctgccacccagctggccatccagagggccaccccagagaccggcccagaaaatggcaccaagctgcccccacccaggcctgaggacatgctgaatgctgctgctgccctggacagcgccctggaggagagcggccctggcagcactggagagctgcggcacagcctgggcctgactgtgagcccctgcaggacccggggcagcggccagaagaacagcaggaggaagagggacctggtgctgagcaagctggtgcacaacgtgcacaaccacatcaccaatgacaagcgcttcaatggaagtgagagcatcaagagctcctggaacatctctgtggtgaagttcctgctggagaagctgaagcaggagctggtgaccagcccccacaactacacagacaaggagctgaagggggcctgtgtggcctacttcctgaccaagaggcgggagtacagaaacagcctgaaccccttcaagggcctgaaggagaaggaggagaagaagctgcggagccgccgctaccgcctgtttgccaacagaagcagcatcatgaggcactttggacctgaggaccagaggctgtggaatgatgtgacagaggagctgatgtctgatgaggaggacagcctgaatgaacctggggtgtgggtggcccggcccccacgcttccgggcccagaggctgacagagctgtgctaccacctggatgccaacagcaagcacggcaccaaggccaacagagtgtatggccccccaagtgaccggctgcccagcgctgaggcccagctgctgcccccagagctgtacaaccccaacttccaggaggaggaggatgagggcggagatgaaaatgcccctggcagccccagctttgaccagccccacaagacctgctgcccagacctgaacagcttcatcgagatcaaggtggagaaggatgaatag

SEQ ID NO: 7044 - DNA, 2853 bp, synthetic construct
  misc_feature 1..2853: note = source = /note="Description of Artificial Sequence: Synthetic coding sequence"
  source 1..2853: mol_type = other DNA
atgctgctgctgggcatcctgaccctggcctttgctggccgcacagctgggggcagcgagcctgagcgggaggtggtggtgcccatccggctggaccctgacatcaatggccgccgctactactggaggggccctgaggacagcggggaccagggcctcatcttccagatcacagccttccaggaggacttctacctgcacctgaccccagatgcccagttcctggccccagccttcagcacagagcacctgggcgtgcccctgcagggcctgaccggcggcagcagtgacctgcggcgctgcttctacagcggagatgtgaatgctgagccagacagctttgctgctgtgtccctgtgtggcggcctgcggggggccttcggctacagaggagcagaatatgtgatcagccccctgcccaatgccagcgccccagctgcccagaggaacagccagggcgcccacctgctgcagaggagaggagtgcctgggggccccagcggggaccccaccagccgctgtggggtggccagcggctggaacccagccatcctgcgggccctggacccctacaagccccggcgggccggctttggagagagccgcagcagaagaagaagtggccgggccaagagatttgtgtccatccccaggtatgtggagaccctggtggtggctgatgagagcatggtgaagttccacggggctgacctggagcactacctgctgaccctgctggccacagctgcccggctgtaccgccaccccagcatcctgaaccccatcaacatcgtggtggtgaaggtgctgctgctgcgggaccgggacagcggccccaaggtgactggaaatgctgccctgaccctgaggaacttctgtgcctggcagaagaagctgaacaaggtgtctgacaagcaccctgagtactgggacacagccatcctcttcacccggcaggacctgtgtggggccaccacctgtgacaccctgggcatggctgatgtgggcaccatgtgtgaccccaagaggagctgcagcgtgattgaagatgatggcctgcccagcgccttcaccacagcccacgagctgggccacgtgttcaacatgcctcatgacaacgtgaaggtgtgtgaggaggtgtttgggaagctgcgggccaaccacatgatgagccccaccctcatccagattgaccgggccaacccctggagcgcctgcagcgctgccatcatcacagacttcctggacagcggccatggagactgcctgctggaccagcccagcaagcccatcagcctgcctgaggacctgcccggggccagctacaccctgagccagcagtgtgagctggccttcggcgtgggcagcaagccctgcccctacatgcagtactgcaccaagctgtggtgcaccgggaaggccaagggccagatggtgtgccagaccaggcacttcccctgggcagatggcaccagctgtggggagggcaagctgtgcctgaagggggcctgtgtggagcggcacaacctgaacaagcaccgggtggatggctcctgggccaagtgggacccctacggcccctgcagcaggacctgtggcggcggcgtgcagctggcccggcggcagtgcaccaaccccaccccagccaacggcggcaagtactgtgaaggagtgcgggtgaagtaccgcagctgcaacctggagccctgccccagcagcgccagcggcaagagcttccgggaggagcagtgtgaggccttcaacggctacaaccacagcaccaaccggctgaccctggccgtggcctgggtgcccaagtacagcggcgtgagcccccgggacaagtgcaagctgatctgccgggccaatggaacaggctacttctacgtgctggcccccaaggtggtggatggcaccctgtgcagcccagacagcacctctgtgtgtgtgcagggcaagtgcatcaaggccggctgtgatggcaacctgggcagcaagaagagatttgataaatgtggggtgtgtggcggggacaacaagagctgcaagaaggtgacaggcctcttcaccaagcccatgcacggctacaactttgtggtggccatcccagctggggccagcagcattgacatccggcagaggggctacaagggcctgattggagatgacaactacctggccctgaagaacagccagggcaagtacctgctgaatggccactttgtggtgtctgctgtggagcgggacctggtggtgaagggcagcctgctgcgctacagcggcaccggcacagctgtggagagcctgcaggccagccggcccatcctggagcccctgactgtggaggtgctgtctgtgggcaagatgaccccaccccgggtgcgctacagcttctacctgcccaaggagccccgggaggacaagagcagccaccccaaggacccccggggccccagcgtgctgcacaacagcgtgctgagcctgagcaaccaggtggagcagccagatgaccggcccccagcccgctgggtggccggctcctggggcccctgcagcgccagctgtggcagcggcctgcagaagagagctgtggactgccggggcagcgctggccagaggacagtgcctgcctgtgatgctgcccacaggcctgtggagacccaggcctgtggggagccctgccccacctgggagctgagcgcctggagcccctgcagcaagagctgtggccggggcttccagaggaggagcctgaagtgtgtgggccatggaggccgcctgctggcccgggaccagtgcaacctgcacaggaagccccaggagctggacttctgtgtgctgcggccctgctag

SEQ ID NO: 7045 - DNA, 1521 bp, synthetic construct
  misc_feature 1..1521: note = source = /note="Description of Artificial Sequence: Synthetic coding sequence"
  source 1..1521: mol_type = other DNA
atgaccagcaagccccacagcgactggatcccctacagcgtgctggatgatgagggcaggaacctgcggcagcagaagctggaccggcagagggccctgctggagcagaagcagaagaagaagaggcaggagcccctgatggtgcaggccaatgctgatggccggcccaggagcagaagagcccggcagagcgaggagcaggcccccctggtggagagctacctgagcagcagcggcagcaccagctaccaggtgcaggaggccgacagcctggcctctgtgcagctgggcgccacccggcccacagccccagccagcgccaagaggaccaaggctgctgccacagctgggggccagggcggggccgccaggaaggagaagaagggcaagcacaagggcaccagcggccctgctgccctggccgaggacaagtctgaggcccagggccctgtgcagatcctgactgtgggccagagcgaccacgcccaggatgctggggagacagctgctgggggcggggagcggcccagcggccaggacctgcgggccaccatgcagaggaagggcatcagcagctccatgagctttgatgaagatgaagaagatgaggaggagaacagcagcagcagcagccagctgaacagcaacacccggcccagcagcgccaccagcaggaagtctgtgcgggaggccgccagcgcccccagccccacagcccctgagcagcctgtggatgtggaggtgcaggacctggaggagtttgccctgcggcctgccccccagggcatcaccatcaagtgccgcatcacccgggacaagaagggcatggaccggggcatgtaccccacctacttcctgcacctggacagagaagatggcaagaaggtgttcctgctggccggcaggaagaggaagaagagcaagaccagcaactacctgatctctgtggaccccacagacctgagccggggcggggacagctacatcggcaagctgcggagcaacctgatgggcaccaagttcaccgtgtatgacaacggggtgaacccccagaaggccagcagcagcaccctggagagcggcaccctgcggcaggagctggccgctgtgtgctatgagaccaacgtgctgggcttcaagggccccaggaagatgtctgtcatcgtgcccggcatgaacatggtgcatgagcgggtgtccatccggcccagaaatgaacatgagaccctgctggcccgctggcagaacaagaacacagagagcatcatcgagctgcagaacaagacccctgtgtggaatgatgacacccagagctatgtgctgaacttccacggccgggtgacccaggcctctgtgaagaacttccagatcatccatggaaatgaccctgactacatcgtgatgcagtttggccgggtggctgaagatgtgttcaccatggactacaactaccccctgtgtgccctgcaggcctttgccatcgccctgagcagctttgacagcaagctggcctgtgagtag

SEQ ID NO: 7046 - DNA, 594 bp, synthetic construct
  misc_feature 1..594: note = source = /note="Description of Artificial Sequence: Synthetic coding sequence"
  source 1..594: mol_type = other DNA
atggccaagaatggcctggtgatctgcatcctggtgatcaccctgctgctggaccagaccaccagccacaccagccggctgaaggccaggaagcacagcaagagaagagtgcgggacaaggatggagacctgaagacccagatcgagaagctgtggacagaggtgaatgccctgaaggagatccaggccctgcagacagtgtgcctgcggggcaccaaggtgcacaagaagtgctacctggccagcgagggcctgaagcacttccacgaggccaatgaagactgcatcagcaagggcggcatcctggtgatccccaggaacagtgatgagatcaatgccctgcaggactatggcaagaggagcctgcccggggtgaatgacttctggctgggcatcaatgacatggtgacagagggcaagtttgtggatgtgaatggaattgccatctccttcctgaactgggaccgggcccagcccaacggcggcaagcgggagaactgtgtgctcttcagccagagcgcccagggcaagtggagcgatgaggcctgccgcagcagcaagcgctacatctgtgagttcaccatcccccagtag

SEQ ID NO: 7047 - DNA, 2424 bp, synthetic construct
  misc_feature 1..2424: note = source = /note="Description of Artificial Sequence: Synthetic coding sequence"
  source 1..2424: mol_type = other DNA
aagaagaagaggaagatcagcctgctgcccaagccacccaagcatgatgcccccctgaccatcgagttccccaacctggacaagaccagcgctgagtggctgaaggtgaatggcctgaaggccaagaagctgagcctgtaccaggtgctggccccaaatgccttcagccctgtggaggagtttgtgcccatcctgcagaagacagtgagcagcaccatccacgagaaggccatgatccagtttgagtggcatgatggcaccgtgaagaacatccacgtggacccccccttcctgtacaagtaccagcagcagctgagccgggccatgaggatgtatgaaagacgcatcgagtggctgagcctggccagccgccgcatctggggcaccgtgtgtgagaagagggtggtggtgctgctggacatcagcgccaccaacagcatgtacatcatccacatccagcacagcctgcggctgctgctggaggagcagctgagcaacaaggactgcttcaacctgattgccttcggcagcaccattgaatcctggaggcctgagatggtgcctgtgagccacaacaacctgcagagcgcctggcgctgggccctgaacctgcgctgccggggcagcagaaatgtgctgagcgccctgaggaaggctgtggaggtggacttcaaggacaaggacaagcaccagagccagggcatctacctgttcaccggcggcatcccagaccaggacatgcccaccctgagcgcctacatggccgaggcctgtggcggctgtgacctgcagctgaatgtgtgcctcttctacgtgggggagcccaagatggacaccaccccaccagcccgctatgccagccacacagacacagctgctgcctacaaggaggtgaccagggctgctgggggccgcttccactggtttggagacaccggcatctatgaaagtgatgacatcaacagcatcatgtctgagatggagaaggccctgaactacagccagaagtgtgccttcctgatggccagcctgaagaaccacagcggcaaggtgctgggcagcagcgccctgcccaaggagaagcccaagaccctgcagctgcggagccagcccaagaagctgtgccccccccggcccaccgtgcccctgggcgccaggatgagcatcaaggatgatcctgaccgggagaagagcccccccctgaagagcctgaagtggaggcccctgagcagccgggtgggcatcagccctgctgctgcccagcccaccaaggagggcatgatggagctgcggaggaagaccaagagccgggaggccgagaccagcctgctgctcttctacacagagaagggaaatgatgtgggctctgtgtacaagaagtacccccagggccggggcctgcggaggaccagcagcagcattgacctgcccaggaaggacacagtgtgcagcagccaggagtgggtggccaagtatggcctgaagaagctgaagctggagatcagccgctgcatgggccccaactgcacccaccagaagagcggccagaggtctgccagcgccaagcactgcagcatcttccccagcgtggagatccatggagtggtgcgccacatccagtggaccccccgggagatggaggtgtacatccgccacctggagaaggtgctgcggcgctacgtgcagaggctgcagtggctgctgagcggcagccggcggctgtttggaacagtgctggagagcaaggtgtgcatcctgctggacaccagcggctccatgggcccctacctgcagcaggtgaagacagagctggtgctgctgatctgggagcagctgaggaagtgctgtgacagcttcaacctgctgagctttgctgagagcttccagagctggcaggacaccctggtggagaccacagatgctgcctgccacgaggccatgcagtgggtgacccacctgcaggcccagggcagcaccagcatcctgcaggccctgctgaaggccttctccttccatgacctggagggcctgtacctgctgacagatggcaagccagacaccagctgcagcctggtgctgaatgaggtgcagaagctgcgggagaagagagatgtgaaggtgcacaccatcagcctgaactgcagcgacagagctgctgtggagttcctgaggaagctggccagcttcaccggcggccgctaccactgccctgtgggggaggacaccctgagcaagatccacagcctgctgaccaagggcttcatcaatgagaaggaccccaccctgcccccatttgaaggagatgacctgcgcatcctggcccaggagatcaccaaggcccggagcttcctgtggcaggcccagagcttccgcagccagctgcagaagaagaatgatgctgagcccaaggtgaccctgtcctag

SEQ ID NO: 7048 - DNA, 639 bp, synthetic construct
  misc_feature 1..639: note = source = /note="Description of Artificial Sequence: Synthetic coding sequence"
  source 1..639: mol_type = other DNA
atggtgtccaggatggtgtccaccatgctgagcggcctgctcttctggctggccagcggctggaccccagcctttgcctacagccccaggaccccagacagagtgtctgaggccgacatccagaggctgctgcatggagtgatggagcagctgggcatcgcccggccccgggtggagtacccagcccaccaggccatgaacctggtgggcccccagagcattgagggcggggcccacgagggcctgcagcacctgggccccttcggcaacatccccaacatcgtggccgagctgactggagacaacatccccaaggacttcagcgaggaccagggctacccagacccccccaacccctgccctgtgggcaagacagcagatgatggctgcctggagaacaccccagacacagctgagttcagccgggagttccagctgcaccagcacctgtttgatcctgagcatgactacccaggcctgggcaagtggaacaagaagctgctgtatgagaagatgaagggcggggagaggaggaagagaagatctgtgaacccctacctgcagggccagaggctggacaacgtggtggccaagaagtctgtgccccacttcagtgatgaggacaaggaccctgagtag

SEQ ID NO: 7049 - DNA, 1524 bp, synthetic construct
  misc_feature 1..1524: note = source = /note="Description of Artificial Sequence: Synthetic coding sequence"
  source 1..1524: mol_type = other DNA
atgtgcaccaagaccatccctgtgctgtggggctgcttcctgctgtggaacctgtatgtgagcagcagccagaccatctacccaggcatcaaggcccgcatcacccagagggccctggactatggagtgcaggccggcatgaagatgattgagcagatgctgaaggagaagaagctgcctgacctgagcggcagcgagagcctggagttcctgaaggtggactatgtgaactacaacttcagcaacatcaagatcagcgccttctccttccccaacaccagcctggcctttgtgcctggggtgggcatcaaggccctgaccaaccacggcacagccaacatcagcacagactggggctttgagagccccctcttccaggacaccggcggcgctgacctcttcctgagcggcgtgtacttcaccggcatcatcatcctgaccagaaatgactttggccaccccaccctgaagctgcaggactgctacgcccagctgagccacgcccacgtgtccttctctggagagctgtctgtgctgtacaacagctttgctgagcccatggagaagcccatcctgaagaacctgaatgagatgctgtgccccatcatcgccagcgaggtgaaggccctgaatgccaacctgagcaccctggaggtgctgaccaagattgacaactacaccctgctggactacagcctcatcagcagccctgagatcacagagaactacctggacctgaacctgaagggcgtcttctaccccctggagaacctgacagatcctcccttcagccctgtgccctttgtgctgcctgagaggagcaacagcatgctgtacatcggcattgctgagtacttcttcaagagcgccagctttgcccacttcaccgctggggtcttcaacgtgaccctgagcacagaggagatcagcaaccactttgtgcagaacagccagggcctgggcaatgtgctgagcagaattgctgagatctacatcctgagccagcccttcatggtgcgcatcatggccacagagccccccatcatcaacctgcagcccggcaacttcaccctggacatcccagccagcatcatgatgctgacccagcccaagaacagcacagtggagaccatcgtgtccatggactttgtggccagcacctctgtgggcctggtgatcctgggccagaggctggtgtgcagcctgagcctgaaccgcttccggctggccctgcctgagagcaacagaagcaacatcgaggtgctgcgctttgagaacatcctgagcagcatcctgcactttggagtgctgcccctggccaatgccaagctgcagcagggcttccccctgagcaacccccacaagttcctgtttgtgaacagcgacatcgaggtgctggagggcttcctgctgatcagcacagacctgaagtatgagaccagcagcaagcagcagcccagcttccacgtgtgggagggcctgaacctgatcagccggcagtggaggggcaagagcgccccctag

SEQ ID NO: 7050 - DNA, 474 bp, synthetic construct
  misc_feature 1..474: note = source = /note="Description of Artificial Sequence: Synthetic coding sequence"
  source 1..474: mol_type = other DNA
atgcacccctggctgggcagcgccctgggcttccccaagtgccggggcatccacctgtgtgcctgtggaaatggctggaccccaggagagaccctgagccagaacaagacagagatcaccaagaacaaggtgacctgctggaggccccacggctgtgagcccaacacaggcctgggctaccagggcagccacaccagcaagtacaccctgctgccctggaacctgctgaagaccaagcccctgccccccagccacggcaaggagggcggcaaggaggccaaggtgcccagcggggacaacagcggccgcggggaggtgccccgggcccaggagggccaggccgcctgtggccgggccgccagcggggacagccaggagggcatgagaagaggctatgaggagcgggccacagcccagaggcctgctgtgcgctctgctgagaccacagcccacggcacctggatctacccctag

SEQ ID NO: 7051 - DNA, 213 bp, synthetic construct
  misc_feature 1..213: note = source = /note="Description of Artificial Sequence: Synthetic coding sequence"
  source 1..213: mol_type = other DNA
atgagcaacaacatggccaagattgctgaggccaggaagacagtggagcagctgaagctggaggtgaacatcgacaggatgaaggtgtcccaggccgctgctgagctgctggccttctgtgagacccacgccaaggatgaccccctggtgacccctgtgcctgctgctgagaaccccttccgggacaagaggctcttctgtgtgctgctgtag

SEQ ID NO: 7052 - DNA, 645 bp, synthetic construct
  misc_feature 1..645: note = source = /note="Description of Artificial Sequence: Synthetic coding sequence"
  source 1..645: mol_type = other DNA
atggccctgctgctgtgcctggtgtgcctgacagctgccctggcccacggctgcctgcactgccacagcaacttcagcaagaagttctccttctaccgccaccacgtgaacttcaagtcctggtgggtgggggacatccctgtgtctggggccctgctgacagactggagcgatgacaccatgaaggagctgcacctggccatcccagccaagatcacccgggagaagctggaccaggtggccacagctgtgtaccagatgatggaccagctgtaccagggcaagatgtacttccctggctacttccccaatgagctgaggaacatcttccgggagcaggtgcacctgatccagaatgccatcatcgagagcagaattgactgccagcaccgctgtggcatcttccagtatgagaccatcagctgcaacaactgcacagacagccacgtggcctgcttcggctacaactgtgagagcagcgcccagtggaagtctgctgtgcagggcctgctgaactacatcaacaactggcacaagcaggacacctccatgagcctggtgtccccagccctgcgctgcctggagcccccccacctggccaacctgaccctggaggatgctgctgaatgtctgaagcagcactag

SEQ ID NO: 7053 - DNA, 459 bp, synthetic construct
  misc_feature 1..459: note = source = /note="Description of Artificial Sequence: Synthetic coding sequence"
  source 1..459: mol_type = other DNA
atgagcccccacctgacagccctgctgggcctggtgctgtgcctggcccagaccatccacacccaggagggcgccctgccccggcccagcatctctgctgagcccggcaccgtcatcagccctggcagccacgtgaccttcatgtgccggggccctgtgggcgtgcagaccttccggctggagagagaagatcgggccaagtacaaggacagctacaacgtgttccggctgggccccagcgagagcgaggcccgcttccacatcgacagcgtgtctgagggcaatgccggcctgtaccgctgcctgtactacaagcccccaggctggagcgagcacagcgacttcctggagctgctggtgaaggagagcagcggcggccctgacagcccagacacagagcccggcagcagcgctggcaccgtgcccggcacagaggccagcggctttgatgccccctag

SEQ ID NO: 7054 - DNA, 900 bp, synthetic construct
  misc_feature 1..900: note = source = /note="Description of Artificial Sequence: Synthetic coding sequence"
  source 1..900: mol_type = other DNA
atggccccctggagccaccccagcgcccagctgcagcctgtgggcggagatgctgtgtccccagccctgatggtgctgctgtgcctgggcctgagcctgggccccaggacccacgtgcaggccggcaacctgagcaaggccaccctgtgggccgagcccggcagcgtcatcagccggggcaacagcgtgaccatccgctgccagggcaccctggaggcccaggagtaccgcctggtgaaggagggcagccctgagccctgggacacccagaaccccctggagcccaagaacaaggcccgcttcagcatccccagcatgacagagcaccacgccggccgctaccgctgctactactacagccctgctggctggagcgagcccagcgaccccctggagctggtggtgacaggcttctacaacaagcccaccctgagcgccctgcccagccctgtggtgaccagcggggagaatgtgaccctgcagtgtggcagccggctgcgctttgaccgcttcatcctgacagaggagggggaccacaagctgtcctggaccctggacagccagctgacccccagcggccagttccaggccctcttccctgtgggccctgtgacccccagccaccgctggatgctgcgctgctacggcagccgccgccacatcctgcaggtgtggagcgagcccagcgacctgctggagatccctgtgtctggagctgctgacaacctgagccccagccagaacaagagtgacagcggcacagccagccacctgcaggactatgctgtggagaacctgatccgcatgggcatggccggcctcatcctggtggtgctgggcatcctgatcttccaggactggcacagccagaggagcccccaggccgctgctggaagatag

SEQ ID NO: 7055 - DNA, 618 bp, synthetic construct
  misc_feature 1..618: note = source = /note="Description of Artificial Sequence: Synthetic coding sequence"
  source 1..618: mol_type = other DNA
atgaaggtgctgctgctgaccggcctgggcgccctcttctttgcctactactgggatgacaactttgaccccggcggcctggactacctggtgctgaaccacatcggcggggccccagctggcacccgggcccggagcccccaggccacccgctggctgatgcaggtgaactttgtgtcctatgtgcagctgaccagccgggccctgcccagcctgacagacagcaagggcagcctggtggtggtgagcagcctgctgggccgggtgcccaccagcttcagcaccccctacagcgctgccaagtttgccctggatggcttcttcggcagcctgcggcgggagctggatgtgcaggatgtgaatgtggccatcaccatgtgtgtgctgggcctgcgggaccgggccagcgctgctgaggccgtgcggggcgtgaccagggtgaaggccgcccctggccccaaggccgccctggccgtcatccggggcggggccaccagggctgctggggtcttctacccctggaggttccggctgctgtgcctgctgcggcgctggctgccccggccccgggcctggttcatccggcaggagctgaatgtgacagctgctgctgcctag

SEQ ID NO: 7056 - DNA, 795 bp, synthetic construct
  misc_feature 1..795: note = source = /note="Description of Artificial Sequence: Synthetic coding sequence"
  source 1..795: mol_type = other DNA
atgctgcgctgtggcggccggggcctgctgctgggcctggccgtggccgctgctgctgtgatggccgcccggctgatgggctggtggggccccagggctggcttccgcctcttcatccctgaggagctgagccgctaccggggcggccctggggaccccggcctgtacctggccctgctgggccgggtgtatgatgtgagcagcggccgccgccactatgagcccggcagccactacagcggctttgctggaagagatgccagccgggcctttgtgactggagactgcagcgaggccggcctggtggatgatgtgtctgacctgtctgctgctgagatgctgaccctgcacaactggctgtccttctatgagaagaactacgtgtgtgtgggccgggtgacaggccgcttctacggggaggatggcctgcccaccccagccctgacccaggtggaggccgccatcacccggggcctggaggccaacaagctgcagctgcaggagaagcagaccttccccccctgcaatgctgagtggagcagcgcccggggcagccggctgtggtgcagccagaagtctggaggagtgtcccgggactggattggagtgcccaggaagctgtacaagccaggggccaaggagccccgctgtgtgtgtgtgaggaccactggacctccttctggccagatgccagacaaccccccccacaggaacagaggagacctggaccaccccaacctggccgagtacacaggctgcccccccctggccatcacctgcagcttccccctgtag

SEQ ID NO: 7057 - DNA, 468 bp, synthetic construct
  misc_feature 1..468: note = source = /note="Description of Artificial Sequence: Synthetic coding sequence"
  source 1..468: mol_type = other DNA
atgagcaagaggctgctgctgctgctgctgctgtccatgggcggcacctgggccagcaaggagcccctgcggccccgctgccggcccatcaatgccaccctggccgtggagaaggagggctgccctgtgtgcatcaccgtgaacaccaccatctgtgccggctactgccccaccatgaccagggtgctgcagggcgtgctgcctgccctgccccaggtggtgtgcaactacagagatgtgcgctttgagagcatccggctgcccggctgcccccggggcgtgaaccctgtggtgtcctatgctgtggccctgagctgccagtgtgccctgtgccgccgcagcaccacagactgtggcggccccaaggaccaccccctgacctgtgatgacccccgcttccaggacagcagcagcagcaaggcccccccacccagcctgcccagccccagccggctgcccggcccctag

SEQ ID NO: 7058 - DNA, 498 bp, synthetic construct
  misc_feature 1..498: note = source = /note="Description of Artificial Sequence: Synthetic coding sequence"
  source 1..498: mol_type = other DNA
atggagatgttccagggcctgctgctgctgctgctgctgtccatgggcggcacctgggccagcaaggagcccctgcggccccgctgccggcccatcaatgccaccctggccgtggagaaggagggctgccctgtgtgcatcaccgtgaacaccaccatctgtgccggctactgccccaccatgaccagggtgctgcagggcgtgctgcctgccctgccccaggtggtgtgcaactacagagatgtgcgctttgagagcatccggctgcccggctgcccccggggcgtgaaccctgtggtgtcctatgctgtggccctgagctgccagtgtgccctgtgccgccgcagcaccacagactgtggcggccccaaggaccaccccctgacctgtgatgacccccgcttccaggacagcagcagcagcaaggcccccccacccagcctgcccagccccagccggctgcccggccccagcgacacccccatcctgccccagtag

SEQ ID NO: 7059 - DNA, 990 bp, synthetic construct
  misc_feature 1..990: note = source = /note="Description of Artificial Sequence: Synthetic coding sequence"
  source 1..990: mol_type = other DNA
atgctgcccctgctgctgggcctgctgggccctgctgcctgctgggccctgggccccaccccaggccctggcagcagcgagctgcggagcgccttctctgctgcccggaccacccccctggagggcaccagcgagatggctgtgacctttgacaaggtgtatgtgaacattggaggagactttgatgtggccaccggccagttccgctgccgggtgcctggggcctacttcttctccttcaccgctgggaaggccccccacaagagcctgtctgtgatgctggtgaggaacagagatgaggtgcaggccctggcctttgatgagcagaggaggcctggggccaggagagctgccagccagagcgccatgctgcagctggactatggagacacagtgtggctgcggctgcatggagccccccagtatgccctgggcgcccctggggccaccttcagcggctacctggtgtatgcagatgctgatgctgatgccccagcccggggccccccagcccctcctgagcccaggtctgccttctctgctgcccggaccaggagcctggtgggcagtgatgctggccctggccccaggcaccagcccctggcctttgacacagaatttgtgaacatcggcggggactttgatgctgctgctggggtcttccgctgccgcctgcccggggcctacttcttctccttcaccctgggcaagctgcccaggaagaccctgtctgtgaagctgatgaagaacagagatgaggtgcaggccatgatctatgatgatggagccagcagaagaagagagatgcagagccagagcgtgatgctggccctgcggagaggagatgctgtgtggctgctgagccatgaccatgatggctacggggcctacagcaaccacggcaagtacatcaccttcagcggcttcctggtgtacccagacctggccccagctgcccctcctggcctgggcgccagcgagctgctgtag

SEQ ID NO: 7060 - DNA, 873 bp, synthetic construct
  misc_feature 1..873: note = source = /note="Description of Artificial Sequence: Synthetic coding sequence"
  source 1..873: mol_type = other DNA
atgaggaggcctgctgctgtgcccctgctgctgctgctgtgcttcggcagccagagggccaaggccgccacagcctgtggccggcccaggatgctgaacaggatggtgggcggccaggacacccaggagggggagtggccctggcaggtgtccatccagagaaatggcagccacttctgtggcggcagcctgattgctgagcagtgggtgctgacagctgcccactgcttcaggaacaccagcgagaccagcctgtaccaggtgctgctgggcgcccggcagctggtgcagcccggcccccacgccatgtatgcccgggtgcggcaggtggagagcaaccccctgtaccagggcacagccagcagcgcagatgtggccctggtggagctggaggcccctgtgcccttcaccaactacatcctgcctgtgtgcctgcctgaccccagcgtcatctttgagaccggcatgaactgctgggtgacaggctggggcagccccagcgaggaggacctgctgcctgagccccgcatcctgcagaagctggccgtgcccatcatcgacacccccaagtgcaacctgctgtacagcaaggacacagaatttggctaccagcccaagaccatcaagaatgacatgctgtgtgccggctttgaggagggcaagaaggatgcctgcaagggggacagcggcggccccctggtgtgcctggtgggccagagctggctgcaggccggggtcatctcctggggcgagggctgtgcccggcagaacagacctggggtgtacatccgggtgacagcccaccacaactggatccaccgcatcatccccaagctgcagttccagcctgcccggctgggcggccagaagtag

SEQ ID NO: 7061 - DNA, 792 bp, synthetic construct
  misc_feature 1..792: note = source = /note="Description of Artificial Sequence: Synthetic coding sequence"
  source 1..792: mol_type = other DNA
atggccttcctgtggctgctgagctgctgggccctgctgggcaccaccttcggctgcggcgtgcctgccatccaccctgtgctgagcggcctgagccgcatcgtgaatggagaagatgctgtgcccggctcctggccctggcaggtgtccctgcaggacaagacaggcttccacttctgtggcggcagcctcatcagcgaggactgggtggtgacagctgcccactgcggcgtgaggaccagtgatgtggtggtggccggggagtttgaccagggcagtgatgaggagaacatccaggtgctgaagatcgccaaggtgttcaagaaccccaagttcagcatcctgactgtgaacaatgacatcaccctgctgaagctggccaccccagcccgcttcagccagacagtgtctgctgtgtgcctgcccagcgcagatgatgacttccctgctggcaccctgtgtgccaccaccggctggggcaagaccaagtacaatgccaacaagaccccagacaagctgcagcaggccgccctgcccctgctgagcaatgctgagtgcaagaagtcctggggccgccgcatcacagatgtgatgatctgtgccggggccagcggcgtgagcagctgcatgggagacagcggcggccccctggtgtgccagaaggatggagcctggaccctggtgggcatcgtgtcctggggcagcaggacctgcagcaccaccaccccagctgtgtatgcccgggtggccaagctgatcccctgggtgcagaagatcctggccgccaactag

SEQ ID NO: 7062 - DNA, 228 bp, synthetic construct
  misc_feature 1..228: note = source = /note="Description of Artificial Sequence: Synthetic coding sequence"
  source 1..228: mol_type = other DNA
atgggcgccgccatcagccagggcgccctgattgccatcgtgtgcaatggcctggtgggcttcctgctgctgctgctgtgggtgatcctgtgctgggcctgccacagccgctctgcagatgtggacagcctgtctgagagcaggacccaggagagcgcctgcctggagctggaccctgctgcccagagcctggccagcctggcccccatcggggcccagtggccctag

SEQ ID NO: 7063 - DNA, 762 bp, synthetic construct
  misc_feature 1..762: note = source = /note="Description of Artificial Sequence: Synthetic coding sequence"
  source 1..762: mol_type = other DNA
atggcccggagcctgctgctgcccctgcagatcctgctgctgagcctggccctggagacagctggggaggaggcccagggcgacaagatcattgatggagccccctgtgcccggggcagccacccctggcaggtggccctgctgagcggcaaccagctgcactgcggcggcgtgctggtgaatgaacgctgggtgctgacagctgcccactgcaagatgaatgagtacacagtgcacctgggcagtgacaccctgggggaccggcgggcccagaggatcaaggccagcaagagcttccgccaccctggctacagcacccagacccacgtgaatgacctgatgctggtgaagctgaacagccaggcccggctgagctccatggtgaagaaggtgcggctgcccagccgctgtgagcccccaggcaccacctgcaccgtgtctggctggggcaccaccaccagcccagatgtgaccttccccagcgacctgatgtgtgtggatgtgaagctgatcagcccccaggactgcaccaaggtgtacaaggacctgctggagaacagcatgctgtgtgccggcatcccagacagcaagaagaatgcctgcaatggagacagcggcggccccctggtgtgccggggcaccctgcagggcctggtgtcctggggcaccttcccctgtggccagcccaatgaccccggggtgtacacccaggtgtgcaagttcaccaagtggatcaatgacaccatgaagaagcacaggtag

SEQ ID NO: 7064 - DNA, 480 bp, synthetic construct
  misc_feature 1..480: note = source = /note="Description of Artificial Sequence: Synthetic coding sequence"
  source 1..480: mol_type = other DNA
atgaaggcctggggcaccgtggtggtgaccctggccaccctgatggtggtgacagtggatgccaagatctatgaaagatgtgagctggccgcccggctggagcgggccggcctgaatggctacaagggctacggcgtgggggactggctgtgcatggcccactatgaaagtggctttgacacagcctttgtggaccacaacccagatggcagcagtgaatatggcatcttccagctgaacagcgcctggtggtgtgacaatggcatcacccccaccaagaacctgtgccacatggactgccacgacctgctgaacagacacatcctggatgacatccgctgtgccaagcagatcgtgagcagccagaatggcctgagcgcctggacctcctggaggctgcactgcagcggccatgacctgtctgagtggctgaagggctgtgacatgcacgtgaagattgaccccaagatccacccctag

SEQ ID NO: 7065 - DNA, 501 bp, synthetic construct
  misc_feature 1..501: note = source = /note="Description of Artificial Sequence: Synthetic coding sequence"
  source 1..501: mol_type = other DNA
atggcccagaccaacagcttcttcatgctgatcagcagcctgatgttcctgagcctgagccagggccaggagagccagacagagctgcccaacccccgcatcagctgcccagagggcaccaatgcctaccgcagctactgctactacttcaatgaagatcctgagacctgggtggatgctgacctgtactgccagaacatgaacagcggcaacctggtgtctgtgctgacccaggccgagggcgcctttgtggccagcctcatcaaggagagcagcacagatgacagcaatgtgtggattggcctgcatgaccccaagaagaacagacgctggcactggagcagcggcagcctggtgtcctacaagtcctgggacaccggcagccccagcagcgccaatgccggctactgtgccagcctgaccagctgcagcggcttcaagaagtggaaggatgagagctgtgagaagaagttctcctttgtgtgcaagttcaagaactag

SEQ ID NO: 7066 - DNA, 528 bp, synthetic construct
  misc_feature 1..528: note = source = /note="Description of Artificial Sequence: Synthetic coding sequence"
  source 1..528: mol_type = other DNA
atgctgccccccatggccctgcccagcgtgtcctggatgctgctgagctgcctgatgctgctgagccaggtgcagggcgaggagccccagcgggagctgcccagcgcccgcatccgctgccccaagggcagcaaggcctacggcagccactgctacgccctcttcctgagccccaagtcctggacagatgctgacctggcctgccagaagaggccttctggcaacctggtgtctgtgctgtctggagctgagggcagctttgtgagcagcctggtgaagagcatcggcaacagctacagctatgtgtggattggcctgcatgaccccacccagggcacagagcccaacggggagggctgggagtggagcagcagtgatgtgatgaactactttgcctgggagaggaaccccagcaccatcagcagccctggccactgtgccagcctgagccgcagcacagccttcctgcgctggaaggactacaactgcaatgtgcggctgccctacgtgtgcaagttcacagactag

SEQ ID NO: 7067 - DNA, 1686 bp, synthetic construct
  misc_feature 1..1686: note = source = /note="Description of Artificial Sequence: Synthetic coding sequence"
  source 1..1686: mol_type = other DNA
atgggcgcccggacccccctgcccagcttctgggtgtccttctttgctgagaccggcatcctcttccctgggggcaccccctggcccatgggcagccagcacagcaagcagcacaggaagccaggccccctgaagaggggccacagaagagacaggaggaccaccaggaggaagtactggaaggagggccgggagatcgcccgggtgctggatgatgagggcaggaacctgcggcagcagaagctggaccggcagagggccctgctggagcagaagcagaagaagaagaggcaggagcccctgatggtgcaggccaatgctgatggccggcccaggagccggcgggcccggcagagcgaggagcaggcccccctggtggagagctacctgagcagcagcggcagcaccagctaccaggtgcaggaggccgacagcctggcctctgtgcagctgggcgccacccggcccacagccccagccagcgccaagaggaccaaggccgccgccacagctgggggccagggcggggccgccaggaaggagaagaagggcaagcacaagggcaccagcggccctgctgccctggccgaggacaagtctgaggcccagggccctgtgcagatcctgactgtgggccagagcgaccacgcccaggatgctggggagacagctgctgggggcggggagcggcccagcggccaggacctgcgggccaccatgcagaggaagggcatcagcagctccatgagctttgatgaagatgaggaggatgaggaggagaacagcagcagcagcagccagctgaacagcaacacccggcccagcagcgccaccagcaggaagtctgtgcgggaggccgccagcgcccccagccccacagcccctgagcagcctgtggatgtggaggtgcaggacctggaggagtttgccctgcggcctgccccccagggcatcaccatcaagtgccgcatcacccgggacaagaagggcatggaccggggcatgtaccccacctacttcctgcacctggaccgggaggatggcaagaaggtgttcctgctggccggcaggaagaggaagaagagcaagaccagcaactacctgatctctgtggaccccacagacctgagcagaggaggagacagctacatcggcaagctgcggagcaacctgatgggcaccaagttcaccgtgtatgacaatggagtgaacccccagaaggccagcagcagcaccctggagagcggcaccctgcggcaggagctggccgctgtgtgctatgagaccaacgtgctgggcttcaagggccccaggaagatgtctgtgattgtgcccggcatgaacatggtgcatgagcgggtgtccatccggcccagaaatgagcacgagaccctgctggcccgctggcagaacaagaacacagagagcatcatcgagctgcagaacaagacccctgtgtggaatgatgacacccagagctatgtgctgaacttccacggccgggtgacccaggcctctgtgaagaacttccagatcatccacggcaatgaccctgactacatcgtgatgcagtttggccgggtggccgaggatgtgttcaccatggactacaactaccccctgtgtgccctgcaggcctttgccatcgccctgagcagctttgacagcaagctggcctgtgagtag

SEQ ID NO: 7068 - DNA, 1272 bp, synthetic construct
  misc_feature 1..1272: note = source = /note="Description of Artificial Sequence: Synthetic coding sequence"
  source 1..1272: mol_type = other DNA
atgatgtacagaccagatgtggtgcgggccaggaagagggtgtgctgggagccctgggtgattggcctggtgatcttcatcagcctcatcgtgctggccgtgtgcatcggcctgactgtgcactacgtgcgctacaaccagaagaagacctacaactactacagcaccctgtccttcaccacagacaagctgtatgcagagtttggccgggaggccagcaacaacttcacagagatgagccagaggctggagagcatggtgaagaatgccttctacaagagccccctgcgggaggagtttgtgaagagccaggtgatcaagttcagccagcagaagcatggagtgctggcccacatgctgctgatctgccgcttccacagcacagaagatcctgagaccgtggacaagatcgtgcagctggtgctgcacgagaagctgcaggatgctgtgggcccccccaaggtggacccccacagcgtgaagatcaagaagatcaacaagacagaaacagacagctacctgaaccactgctgcggcaccaggaggagcaagaccctgggccagagcctgcgcatcgtgggcggcacagaggtggaggagggggagtggccctggcaggccagcctgcagtgggatggcagccaccgctgtggggccaccctcatcaatgccacctggctggtgtctgctgcccactgcttcaccacctacaagaacccagcccgctggacagccagctttggagtgaccatcaagcccagcaagatgaagaggggcctgcggcgcatcatcgtgcatgagaagtacaagcaccccagccatgactatgacatcagcctggccgagctgagcagccctgtgccctacaccaatgctgtgcaccgggtgtgcctgcctgatgccagctatgagttccagcctggagatgtgatgtttgtgacaggctttggagccctgaagaatgatggctacagccagaaccacctgcggcaggcccaggtgaccctgattgatgccaccacctgcaatgagccccaggcctacaatgatgccatcacccccaggatgctgtgtgccggcagcctggagggcaagacagatgcctgccagggcgacagcggcggccccctggtgtccagtgatgcccgggacatctggtacctggccggcatcgtgtcctggggagatgaatgtgccaagcccaacaagccaggagtgtacaccagggtgacagccctgcgggactggatcaccagcaagacaggcatctag

SEQ ID NO: 7069 - DNA, 282 bp, synthetic construct
  misc_feature 1..282: note = source = /note="Description of Artificial Sequence: Synthetic coding sequence"
  source 1..282: mol_type = other DNA
atgaagcctgtgctgcccctgcagttcctggtggtgttctgcctggccctgcagctggtgcccggcagccccaagcagagggtgctgaagtacatcctggagcccccaccctgcatcagcgcccctgagaactgcacccacctgtgcaccatgcaggaggactgtgagaagggcttccagtgctgcagcagcttctgtggcatcgtgtgcagcagcgagaccttccagaagaggaaccgcatcaagcacaagggcagcgaggtgatcatgcctgccaactag

SEQ ID NO: 7070 - DNA, 1530 bp, synthetic construct
  misc_feature 1..1530: note = source = /note="Description of Artificial Sequence: Synthetic coding sequence"
  source 1..1530: mol_type = other DNA
atggacttcctgctggccctggtgctggtgagcagcctgtacctgcaggccgctgctgagtttgatggccgctggccccggcagatcgtgagcagcatcggcctgtgccgctatggaggaagaattgactgctgctggggctgggcccggcagagctggggccagtgccagcctgtgtgccagccccgctgcaagcacggggagtgcatcggccccaacaagtgcaagtgccaccctggctacgccggcaagacctgcaaccaggacctgaatgaatgtggcctgaagccccggccctgcaagcaccgctgcatgaacacctacggcagctacaagtgctactgcctgaatggctacatgctgatgccagatggcagctgcagcagcgccctgacctgcagcatggccaactgccagtatggctgtgatgtggtgaagggccagatccgctgccagtgccccagccctggcctgcagctggccccagatggccgcacctgtgtggatgtggatgaatgtgccaccggccgggccagctgcccccgcttccggcagtgtgtgaacaccttcggcagctacatctgcaagtgccacaagggctttgacctgatgtacatcggcggcaagtaccagtgccacgacattgatgaatgttccctgggccagtaccagtgcagcagctttgcccgctgctacaacatccggggcagctacaagtgcaagtgcaaggagggctaccagggagatggcctgacctgtgtgtacatccccaaggtgatgattgagcccagcggccccatccacgtgcccaagggaaatggcaccatcctgaagggggacaccggcaacaacaactggatcccagatgtgggcagcacctggtggccacccaagaccccctacatcccccccatcatcaccaaccggcccaccagcaagcccaccacccggcccacccccaagcccacccccatccccaccccacctcctcctccacccctgcccacagagctgcggacccccctgccccccaccaccccagagcggcccaccaccggcctgaccaccatcgccccagctgccagcaccccacctgggggcatcaccgtggacaacagagtgcagacagacccccagaagcccagaggagatgtgttttctgtgctggtgcacagctgcaactttgaccacggcctgtgtggctggatccgggagaaggacaatgacctgcactgggagcccatccgggaccctgctgggggccagtacctgactgtgtctgctgccaaggcccctgggggcaaggccgcccggctggtgctgcccctgggccgcctgatgcacagcggggacctgtgcctgtccttccgccacaaggtgacaggcctgcacagcggcaccctgcaggtgtttgtgaggaagcatggagcccacggggccgccctgtggggcagaaatggaggccacggctggaggcagacccagatcaccctgcggggagctgacatcaagtctgagagccagaggtag

SEQ ID NO: 7071 - DNA, 381 bp, synthetic construct
  misc_feature 1..381: note = source = /note="Description of Artificial Sequence: Synthetic coding sequence"
  source 1..381: mol_type = other DNA
atggacaagagcctgctgctggagctgcccatcctgctgtgctgcttccgggccctgagcggcagcctgtccatgagaaatgatgctgtgaatgaaattgtggccgtgaagaacaacttccctgtgattgaaattgtgcagtgcaggatgtgccacctgcagtttcctggagagaagtgcagccggggccggggcatctgcacagccaccacagaggaggcctgcatggtgggccgcatgttcaagagagatggcaacccctggctgaccttcatgggctgcctgaagaactgtgctgatgtgaagggcatccgctggagcgtgtacctggtgaacttccgctgctgccgcagccatgacctgtgcaatgaagacctgtag

SEQ ID NO: 7072 - DNA, 537 bp, synthetic construct
  misc_feature 1..537: note = source = /note="Description of Artificial Sequence: Synthetic coding sequence"
  source 1..537: mol_type = other DNA
atggagctgctgcaggtgaccatcctcttcctgctgcccagcatctgcagcagcaacagcactggagtgctggaggccgccaacaacagcctggtggtgaccaccaccaagcccagcatcaccacccccaacacagagagcctgcagaagaatgtggtgacccccaccaccggcaccacccccaagggcaccatcaccaatgagctgctgaagatgagcctgatgagcacagccaccttcctgaccagcaaggatgagggcctgaaggccaccaccacagatgtgaggaagaatgacagcatcatcagcaatgtgacagtgacctctgtgaccctgcccaatgctgtgtccaccctgcagagcagcaagcccaagacagagacccagagcagcatcaagaccacagagatccctggcaccccagaaaatggaaatgaccagccccagagcgacaaggagagcgtgaagctgctgactgtgaagaccatcagccatgaaagtggagagcacagcgcccagggcaagaccaagaactag

SEQ ID NO: 7073 - DNA, 2544 bp, synthetic construct
  misc_feature 1..2544: note = source = /note="Description of Artificial Sequence: Synthetic coding sequence"
  source 1..2544: mol_type = other DNA
atgttcaagtgctggagcgtggtgctggtgctgggcttcatcttcctggagagcgagggccggcccaccaaggagggcggctacggcctgaagagctaccagcccctgatgaggctgcggcacaagcaggagaagaaccaggagagcagccgggtgaagggcttcatgatccaggacggccccttcggcagctgtgagaacaagtactgcggcctgggccgccactgtgtgaccagccgggagaccggccaggccgagtgtgcctgcatggacctgtgcaagaggcactacaagcctgtgtgtggcagtgatggagagttctatgagaaccactgtgaggtgcacagagctgcctgcctgaagaagcagaagatcaccatcgtgcacaatgaagactgcttcttcaagggggacaagtgcaagaccacagagtacagcaagatgaagaacatgctgctggacctgcagaaccagaagtacatcatgcaggagaatgaaaaccccaatggagatgacatcagcaggaagaagctgctggtggaccagatgttcaagtactttgatgctgacagcaatggcctggtggacatcaatgagctgacccaggtgatcaagcaggaggagctgggcaaggacctgtttgactgcaccctgtatgtgctgctgaagtatgatgacttcaatgctgacaagcacctggccctggaggagttctaccgggccttccaggtgatccagctgagcctgcctgaggaccagaagctgagcatcacagctgccaccgtgggccagagcgctgtgctgagctgtgccatccagggcaccctgcggccccccatcatctggaagaggaacaacatcatcctgaacaacctggacctggaggacatcaatgactttggagatgatggcagcctgtacatcaccaaggtgaccaccacccacgtgggcaactacacctgctacgcagatggctatgagcaggtgtaccagacccacatcttccaggtgaatgtgccccctgtgatccgggtgtacccagagagccaggcccgggagcccggggtgacagccagcctgcgctgccacgccgagggcatccccaagccccagctgggctggctgaagaatggaattgacatcacccccaagctgagcaagcagctgaccctgcaggccaacggcagcgaggtgcacatcagcaatgtgcgctatgaggacaccggggcctacacctgcatcgccaagaatgaagctggggtggatgaggacatcagcagcctgtttgtggaggacagcgccaggaagaccctggccaacatcctgtggagggaggagggcctgggcatcggcaacatgttttatgtgttctatgaagatggcatcaaggtgatccagcccattgaatgtgagttccagaggcacatcaagcccagcgagaagctgctgggcttccaggatgaggtgtgccccaaggccgagggagatgaggtgcagagatgtgtgtgggccagcgctgtgaatgtgaaggacaagttcatctacgtggcccagcccaccctggacagagtgctgattgtggatgtgcagagccagaaggtggtgcaggccgtgtccacagatcctgtgcctgtgaagctgcactatgacaagagccatgaccaggtgtgggtgctgtcctggggcaccctggagaagaccagccccaccctgcaggtgatcaccctggccagcggaaatgtgccccaccacaccatccacacccagcctgtgggcaagcagtttgacagagtggatgacttcttcatccccaccaccaccctcatcatcacccacatgagatttggcttcatcctgcacaaggatgaggccgccctgcagaagattgacctggagaccatgagctacatcaagaccatcaacctgaaggactacaagtgtgtgccccagagcctggcctacacccacctgggcggctactacttcatcggctgcaagccagacagcactggagctgtgagcccccaggtgatggtggatggagtgacagattctgtgattggcttcaacagtgatgtgacaggcaccccctacgtgtccccagatggccactacctggtgtccatcaatgatgtgaagggcctggtgcgggtgcagtacatcaccatccggggggagatccaggaggcctttgacatctacaccaacctgcacatcagtgacctggccttccagcccagcttcacagaggcccaccagtacaacatctacggcagcagcagcacccagacagatgtgctgtttgtggagctgagcagcggcaaggtgaagatgatcaagagcctgaaggagcccctgaaggccgaggagtggccctggaacaggaagaaccggcagatccaggacagcggcctgtttggccagtacctgatgacccccagcaaggacagcctcttcatcctggatggccgcctgaacaagctgaactgtgagatcacagaggtggagaagggcaacacagtcatctgggtgggagatgcctag

SEQ ID NO: 7074 - DNA, 273 bp, synthetic construct
  misc_feature 1..273: note = source = /note="Description of Artificial Sequence: Synthetic coding sequence"
  source 1..273: mol_type = other DNA
atgaggctgtctgtgtgcctgctgctgctgaccctggccctgtgctgctaccgggccaatgctgtggtgtgccaggccctgggcagcgagatcaccggcttcctgctggccggcaagcctgtgttcaagttccagctggccaagttcaaggcccccctggaggccgtggccgccaagatggaggtgaagaagtgtgtggacaccatggcctatgagaagagggtgctgatcaccaagaccctgggcaagattgctgagaagtgtgacagatag

SEQ ID NO: 7075 - DNA, 1044 bp, synthetic construct
  misc_feature 1..1044: note = source = /note="Description of Artificial Sequence: Synthetic coding sequence"
  source 1..1044: mol_type = other DNA
atgagctcctggagccggcagaggcccaagagccctgggggcatccagccccacgtgtccaggaccctcttcctgctgctgctgctggccgccagcgcctggggcgtgaccctgagccccaaggactgccaggtgttcagaagtgaccacggcagcagcatcagctgccagcccccagctgagatccctggctacctgcctgctgacacagtgcacctggccgtggagttcttcaacctgacccacctgcctgccaacctgctgcagggcgccagcaagctgcaggagctgcacctgagcagcaatggcctggagagcctgagccctgagttcctgcggcctgtgccccagctgcgggtgctggacctgaccagaaatgccctgaccggcctgcccccaggcctcttccaggccagcgccaccctggacaccctggtgctgaaggagaaccagctggaggtgctggaggtgtcctggctgcacggcctgaaggccctgggccacctggacctgagcggcaaccggctgaggaagctgcccccaggcctgctggccaacttcaccctgctgcggaccctggacctgggggagaaccagctggagaccctgcccccagacctgctgcggggccccctgcagctggagcggctgcacctggagggcaacaagctgcaggtgctgggcaaggacctgctgctgccccagcctgacctgcgctacctgttcctgaatggaaacaagctggcccgggtggccgccggggccttccagggcctgcggcagctggacatgctggacctgagcaacaacagcctggcctctgtgcctgagggcctgtgggccagcctgggccagcccaactgggacatgagagatggctttgacatcagcggcaacccctggatctgtgaccagaacctgagtgacctgtaccgctggctgcaggcccagaaggacaagatgttcagccagaatgacacccgctgtgccggccctgaggccgtgaagggccagaccctgctggccgtggccaagagccagtag

SEQ ID NO: 7076 - DNA, 1407 bp, synthetic construct
  misc_feature 1..1407: note = source = /note="Description of Artificial Sequence: Synthetic coding sequence"
  source 1..1407: mol_type = other DNA
atgccaccctggggcgccgccctggccctgatcctggccgtgctggccctgctgggcctgctgggcccccggctgcggggcccctggggccgggctgtgggggagaggaccctgcccggggcccaggacagagatgatggagaggaggctgatggcggcggccctgctgaccagttcagtgatggccgggagcccctgcccggcggctgcagcctggtgtgcaagcccagcgccctggcccagtgcctgctgcgggccctgcggcgctctgaggccctggaggccggccccaggtcctggttcagcggcccccacctgcagaccctgtgccactttgtgctgcctgtggcccctggccctgagctggcccgggagtacctgcagctggctgatgatggcctggtggccctggactgggtggtgggcccctgtgtgcggggccgccgcatcaccagcgctgggggcctgcctgctgtgctgctggtgatccccaatgcctggggccgcctgaccagaaatgtgctgggcctgtgcctgctggccctggagcggggctactaccctgtgatcttccacagaagaggccaccacggctgccccctggtgagcccccggctgcagccctttggagaccccagcgacctgaaggaggccgtgacctacatccgcttccgccaccctgctgcccccctgtttgctgtgtctgagggcagcggcagcgccctgctgctgagctacctgggagaatgtggcagcagcagctatgtgactggagctgcctgcatcagccctgtgctgcgctgccgggagtggtttgaggccggcctgccctggccctatgaaagaggcttcctgctgcaccagaagatcgccctgagccgctatgccacagccctggaggacacagtggacaccagccgcctcttccgcagccgcagcctgcgggagtttgaggaggccctcttctgccacaccaagagcttccccatctcctgggacacctactgggacagaaatgaccccctgagagatgtggatgaggccgctgtgcctgtgctgtgcatctgcagcgcagatgatcctgtgtgtggccccccagaccacaccctgaccacagagctgttccacagcaacccctacttcttcctgctgctgagccgccacggcggccactgcggcttcctgcggcaggagcccctgcctgcctggagccatgaagtcatcctggagagcttccgggccctgacagagttcttcagaacagaggagcgcatcaagggcctgagccgccaccgggccagcttcctgggcggcagaagaagaggaggagccctgcagaggcgggaggtgagcagcagcagcaacctggaggagatcttcaactggaagaggagctacaccaggtag

SEQ ID NO: 7077 - DNA, 423 bp, synthetic construct
  misc_feature 1..423: note = source = /note="Description of Artificial Sequence: Synthetic coding sequence"
  source 1..423: mol_type = other DNA
atgttcttcaccatcagcaggaagaacatgagccagaagctgagcctgctgctgctggtgtttggcctcatctggggcctgatgctgctgcactacaccttccagcagcccaggcaccagagctctgtgaagctgcgggagcagatcctggacctgagcaagcgctacgtgaaggccctggccgaggagaacaagaacacagtggatgtggagaatggagcctccatggccggctacgccgacctgaagaggaccatcgctgtgctgctggatgacatcctgcagaggctggtgaagctggagaacaaggtggactacatcgtggtgaatggcagcgctgccaacaccaccaacggcaccagcggcaacctggtgcctgtgaccaccaacaagaggaccaacgtgtctggcagcatcagatag

SEQ ID NO: 7078 - DNA, 993 bp, synthetic construct
  misc_feature 1..993: note = source = /note="Description of Artificial Sequence: Synthetic coding sequence"
  source 1..993: mol_type = other DNA
cggggggccctggtgggcgcccccaggtctgcccgggccagctgcctgcggggcagaagacctggaagacggcagccctgtggccgctgcccagaccccccaagaagtggccctggccaggccggccgggcccgctgtgccagagatgtggccgcccagacagccctggccccccgggccctggccctgggcgctggggccgccggccctggctggagaggagctgtgccccggcggcctgctgcccgggtgtccagagctgcccagaggcaggagcaggagctggtgcggctgcaccgggagcaggagtgtgagctgcagcctgagcccgccccaccccggcccagcggccctgccacagctgaggaccccggccggcggcctgtgctgccccagaggcctcctgaggagaggcctccccagcccccaggcagcactggagtgattgctgagaccggccaggccggccccccagctggagctggggtgtctggctaccccaagagcccccctgtggccagccctggggcccctgtgcccagcctggtgtccttctctgctggcctgacccagaagcccttccccagtgatggaggagtggtgctcttcaacaaggtgctggtgaatgatggagatgtgtacaaccccagcactggagtcttcaccgccccctatgatggccgctacctgatcacagccaccctgaccccagagagagatgcctacgtggaggccgtgctgtctgtgtccaatgcctctgtggcccagctgcacacagctggctacagaagagagttcctggagtaccaccggcccccaggggccctgcacacctgtggcggccctggggccttccacctgattgtgcacctgaaggctggagatgctgtgaatgtggtggtgactggaggcaagctggcccacacagactttgatgagatgtacagcaccttctctggagtcttcctgtaccccttcctgagccacctgtag

SEQ ID NO: 7079 - DNA, 585 bp, synthetic construct
  misc_feature 1..585: note = source = /note="Description of Artificial Sequence: Synthetic coding sequence"
  source 1..585: mol_type = other DNA
atgtctgccctgtggctgctgctgggcctgctggccctgatggacctgtctgagagcagcaactggggctgctacggcaacatccagagcctggacacccctggggccagctgtggcatcggccgccgccacggcctgaactactgcggcgtgcgggccagcgagcggctggccgagattgacatgccctacctgctgaagtaccagcccatgatgcagaccatcggccagaagtactgcatggaccctgctgtgattgctggggtgctgagcaggaagagccctggggacaagatcctggtgaacatgggagacaggacctccatggtgcaggaccccggcagccaggcccccacctcctggatcagcgagagccaggtgtcccagaccacagaggtgctgaccacccgcatcaaggagatccagaggcgcttccccacctggaccccagaccagtacctgcggggcggcctgtgtgcctacagcggcggggccggctacgtgcgcagcagccaggacctgagctgtgacttctgcaatgatgtgctggcccgggccaagtacctgaagagacatggcttctag

SEQ ID NO: 7080 - DNA, 273 bp, synthetic construct
  misc_feature 1..273: note = source = /note="Description of Artificial Sequence: Synthetic coding sequence"
  source 1..273: mol_type = other DNA
atgaagttcctggccgtgctggtgctgctgggcgtgtccatcttcctggtgtctgcccagaaccccaccacagctgccccagctgacacctacccagccaccggccctgcagatgatgaggccccagatgctgagaccacagctgctgccaccacagccaccacagctgcccccaccacagccaccacagctgccagcaccacagccaggaaggacatccctgtgctgcccaagtgggtgggggacctgcccaacggccgggtgtgcccctag

SEQ ID NO: 7081 - DNA, 1914 bp, synthetic construct
  misc_feature 1..1914: note = source = /note="Description of Artificial Sequence: Synthetic coding sequence"
  source 1..1914: mol_type = other DNA
atgagcaggatgctgcccttcctgctgctgctgtggttcctgcccatcacagagggcagccagagagctgagcccatgttcaccgctgtgaccaacagcgtgctgcccccagactatgacagcaaccccacccagctgaactacggcgtggccgtgacagatgtggaccatgatggagactttgaaattgtggtggccggctacaacggccccaacctggtgctgaagtatgaccgggcccagaagaggctggtgaacattgctgtggatgagaggagcagcccctactatgccctgcgggaccggcagggcaatgccatcggcgtgacagcctgtgacattgatggagatggccgggaggagatctacttcctgaacaccaacaatgccttcagcggcgtggccacctacacagacaagctgttcaagttcaggaacaaccgctgggaggacatcctgagtgatgaggtgaatgtggcccggggcgtggccagcctgtttgctggccgctctgtggcctgtgtggacaggaagggcagcggccgctacagcatctacatcgccaactatgcctatggaaatgtgggcccagatgccctgattgagatggaccctgaggccagtgacctgagccggggcatcctggccctgagagatgtggccgctgaggccggcgtgtccaagtacacaggaggccggggcgtgtctgtgggccccatcctgagcagcagcgccagtgacatcttctgtgacaatgaaaatggccccaacttcctgttccacaacagaggagatggcacctttgtggatgctgctgccagcgctggggtggatgacccccaccagcacggccggggcgtggccctggccgacttcaacagagatggcaaggtggacatcgtgtatggcaactggaatggcccccaccggctgtacctgcagatgagcacccacggcaaggtgcgcttccgggacatcgccagccccaagttctccatgcccagccctgtgaggacagtcatcacagctgactttgacaatgaccaggagctggagatcttcttcaacaacatcgcctaccgcagcagcagcgccaacagactcttccgggtcatcagaagagagcacggggaccccctgattgaggagctgaaccctggagatgccctggagcctgagggccggggcactggaggagtggtgacagactttgatggagatggcatgctggacctgatcctgagccacggggagagcatggcccagcccctgtctgtgttccggggcaaccagggcttcaacaacaactggctgcgggtggtgcccaggaccaggtttggagcctttgcccggggggccaaggtggtgctgtacaccaagaagagcggggcccacctgcgcatcattgatggcggcagcggctacctgtgtgagatggagcctgtggcccacttcggcctgggcaaggatgaggccagctctgtggaggtgacctggccagatggcaagatggtgtccagaaatgtggccagcggggagatgaacagcgtgctggagatcctgtaccccagagatgaggacaccctgcaggaccctgcccccctggagtgtggccagggcttcagccagcaggagaatggccactgcatggacaccaatgaatgcatccagttcccctttgtgtgcccccgggacaagcctgtgtgtgtgaacacctacggcagctaccgctgcaggaccaacaagaagtgcagccggggctatgagcccaatgaagatggaacagcctgtgtggcccaggtggccttcctgggcggctacagcagcgctgccagccgcatcagcgagcccctgagccgggccagctacctgagcctgggcctgggcctgtgcctgcagctgtatgccctgtag

SEQ ID NO: 7082 - DNA, 600 bp, synthetic construct
  misc_feature 1..600: note = source = /note="Description of Artificial Sequence: Synthetic coding sequence"
  source 1..600: mol_type = other DNA
atggccctgaatggagctgaggtggatgacttctcctgggagcccccaacagaagctgagaccaaggtgctgcaggcccggcgggagcggcaggaccgcatcagccggctgatgggagactacctgctgcggggctacaggatgctgggggagacctgtgccgactgtggcaccatcctgctgcaggacaagcagaggaagatctactgtgtggcctgccaggagctggacagtgatgtggacaaggacaacccagccctgaatgcccaggccgccctgagccaggcccgggagcaccagctggccagcgccagcgagctgcccctgggcagcaggcctgccccccagccccctgtgcccaggcctgagcactgtgagggcgctgctgctggcctgaaggccgcccagggccccccagccccagctgtgccccccaacacagatgtgatggcctgcacccagacagccctgctgcagaagctgacctgggccagcgctgagctgggcagcagcaccagcctggagaccagcatccagctgtgtggcctcatccgggcctgtgccgaggccctgcggagcctgcagcagctgcagcactag

SEQ ID NO: 7083 - DNA, 813 bp, synthetic construct
  misc_feature 1..813: note = source = /note="Description of Artificial Sequence: Synthetic coding sequence"
  source 1..813: mol_type = other DNA
atgaagctgggctgtgtgctgatggcctgggccctgtacctgagcctgggcgtgctgtgggtggcccagatgctgctggccgccagctttgagaccctgcagtgtgagggccctgtgtgcacagaggagagcagctgccacacagaagatgacctgacagatgcccgggaggccggcttccaggtgaaggcctacaccttcagcgagcccttccacctgattgtgtcctatgagctgtttcctgcccccatcctgcgggctgtgcccagcgctgagccccaggccggcagccccatgaccctgagctgccagaccaagctgcccctgcagaggtctgctgcccggctgctcttctccttctacaaggatggccgcatcgtgcagagccggggcctgagcagcgagttccagatccccacagccagcgaggaccacagcggcagctactggtgtgaggccgccacagaggacaaccaggtgtggaagcagagcccccagctggagatccgggtgcagggcgccagcagcagcgctgccccacccaccctgaacccagccccccagaagtctgctgcccctggaacagcccctgaggaggcccctggccccctgcccccaccacccacccccagcagtgaagatcctggcttcagcagccccctgggcatgccagacccccacctgtaccaccagatgggcctgctgctgaagcacatgcaggatgtgcgggtgctgctgggccacctgctgatggagctgcgggagctgagcggccacaggaagccaggcaccaccaaggccacagctgagtag

SEQ ID NO: 7084 - DNA, 2421 bp, synthetic construct
  misc_feature 1..2421: note = source = /note="Description of Artificial Sequence: Synthetic coding sequence"
  source 1..2421: mol_type = other DNA
atgaggctgagccctgcccccctgaagctgagcaggaccccagccctgctggccctggccctgcccctggccgccgccctggccttcagtgatgagaccctggacaaggtgcccaagtctgagggctactgcagccgcatcctgcgggcccagggcacccggcgggagggctacacagagttcagcctgcgggtggagggggaccctgacttctacaagccaggcaccagctacagagtgaccctgtctgctgccccacccagctacttccggggcttcaccctcatcgccctgcgggagaaccgggagggggacaaggaggaggaccatgctggcaccttccagatcattgatgaggaggagacccagttcatgagcaactgccctgtggccgtgacagagagcacccccaggaggaggacccgcatccaggtgttctggatcgcccccccagctggcaccggctgcgtcatcctgaaggccagcatcgtgcagaagaggatcatctacttccaggatgagggcagcctgaccaagaagctgtgtgagcaggacagcacctttgatggagtgacagacaagcccatcctggactgctgctgcggcacagccaagtaccgcctgaccttctacggcaactggagcgagaagacccaccccaaggactacccccggcgggccaaccactggagcgccatcatcggcggcagccacagcaagaactacgtgctgtgggagtatggaggctacgccagcgagggcgtgaagcaggtggccgagctgggcagccctgtgaagatggaggaggagatccggcagcagagtgatgaggtgctgaccgtcatcaaggccaaggcccagtggccagcctggcagcccctgaatgtgcgggccgcccccagcgctgagttctctgtggacaggaccaggcacctgatgtccttcctgaccatgatgggccccagcccagactggaatgtgggcctgtctgctgaggacctgtgcaccaaggaatgtggctgggtgcagaaggtggtgcaggacctgatcccctgggatgctggaacagacagcggcgtgacctatgagagccccaacaagcccaccatcccccaggagaagatccggcccctgaccagcctggaccacccccagagccccttctatgaccctgagggcggcagcatcacccaggtggcccgggtggtgattgaaagaattgccaggaagggggagcagtgcaacatcgtgcctgacaacgtggatgacatcgtggccgacctggcccctgaggagaaggatgaagatgacaccccagagacctgcatctacagcaactggagcccctggagcgcctgcagcagcagcacctgtgacaagggcaagaggatgaggcagaggatgctgaaggcccagctggacctgtctgtgccctgcccagacacccaggacttccagccctgcatgggccctggctgcagtgatgaagatggcagcacctgcaccatgtctgagtggatcacctggagcccctgcagcatcagctgtggcatgggcatgaggagccgggagcgctacgtgaagcagtttcctgaagatggctctgtgtgcaccctgcccacagaggagacagagaagtgcaccgtgaatgaggagtgcagccccagcagctgcctgatgacagagtggggcgagtgggatgagtgcagcgccacctgtggcatgggcatgaagaagaggcacaggatgatcaagatgaacccagcagatggctccatgtgcaaggccgagaccagccaggccgagaagtgcatgatgcctgagtgccacaccatcccctgcctgctgagcccctggagcgagtggagcgactgcagcgtgacctgtgggaagggcatgaggacccggcagaggatgctgaagagcctggccgagctgggggactgcaatgaagacctggagcaggtggagaagtgcatgctgcctgaatgtcccatcgactgtgagctgacagagtggagccagtggagcgagtgcaacaagagctgtgggaaaggacatgtgatccgcaccaggatgatccagatggagccccagtttggaggagccccctgcccagagaccgtgcagaggaagaagtgccgcatcaggaagtgcctgaggaaccccagcatccagaagctgcgctggagggaggcccgggagagcagaagaagtgagcagctgaaggaggagagcgagggggagcagtttcctggctgcaggatgaggccctggacagcctggagcgagtgcaccaagctgtgtggcggcggcatccaggagcgctacatgacagtgaagaagcgcttcaagagcagccagttcaccagctgcaaggacaagaaggagatccgggcctgcaatgtgcacccctgctag

SEQ ID NO: 7085 - DNA, 4242 bp, synthetic construct
  misc_feature 1..4242: note = source = /note="Description of Artificial Sequence: Synthetic coding sequence"
  source 1..4242: mol_type = other DNA
atgagacatggagtggcctgggccctgctggtggccgccgccctgggcctgggcgcccggggcgtgagaggagctgtggccctggccgacttctacccctttggagctgagagaggagatgctgtgacccccaagcaggatgatggcggcagcggcctgcggcccctgtctgtgcccttccccttctttggagctgagcacagcggcctgtatgtgaacaacaacggcatcatctccttcctgaaggaggtgtcccagttcacccctgtggccttccccatcgccaaggacagatgtgtggtggccgccttctgggcagatgtggacaacagaagagctggagatgtgtactaccgggaggccacagatcctgccatgctgcggcgggccacagaagatgtgcgccactacttccctgagctgctggacttcaatgccacctgggtgtttgtggccacctggtacagagtgaccttcttcggcggcagcagcagcagccctgtgaacaccttccagacagtgctgatcacagatggcaagctgtccttcaccatcttcaactatgagagcatcgtgtggaccaccggcacccacgccagcagcggcggcaatgccaccggcctgggcggcattgctgcccaggccggcttcaatgctggagatggccagcgctacttcagcatccctggcagcaggacagctgacatggccgaggtggagaccaccaccaacgtgggcgtgcccggccgctgggccttcagaattgatgatgcccaggtgcgggtgggcggctgcggccacaccacctctgtgtgcctggccctgcggccctgcctgaatggaggaaaatgtattgatgactgtgtgacaggcaaccccagctacacctgcagctgcctgagcggcttcaccggccgccgctgccacctggatgtgaatgaatgtgccagccagccctgccagaatggaggcacctgcacccacggcatcaacagcttccgctgccagtgcccagctggctttggaggccccacctgtgaaacagcccagagcccctgtgacaccaaggagtgccagcacggcggccagtgccaggtggagaatggcagcgctgtgtgtgtgtgccaggccggctacaccggggccgcctgtgagatggatgtggatgactgcagcccagacccctgcctgaatggaggcagctgtgtggacctggtgggcaactacacctgcctgtgtgccgagcccttcaagggcctgcgctgtgagaccggggaccaccctgtgcctgatgcctgcctgagcgccccctgccacaacggcggcacctgtgtggatgctgaccagggctacgtgtgtgagtgcccagagggcttcatgggcctggactgccgggagcgggtgcctgatgactgtgaatgtagaaatggaggccgctgcctgggcgccaacaccaccctgtgccagtgccccctgggcttcttcggcctgctgtgtgaatttgagatcacagccatgccctgcaacatgaacacccagtgcccagatggcggctactgcatggagcacggcggcagctacctgtgtgtgtgccacacagaccacaatgccagccacagcctgcccagcccctgtgacagcgacccctgcttcaacggcggcagctgtgatgcccatgatgacagctacacctgtgagtgcccccggggcttccacggcaagcactgtgagaaggcccggccccacctgtgcagcagcggcccctgcagaaatggaggcacctgcaaggaggccggcggggagtaccactgcagctgcccctaccgcttcaccggccgccactgtgaaattggcaagccagacagctgtgccagcggcccctgccacaacggcggcacctgcttccactacatcggcaagtacaagtgtgactgccccccaggcttcagcggccgccactgtgagatcgcccccagcccctgcttccgcagcccctgtgtgaatggaggcacctgtgaagatcgggacacagacttcttctgccactgccaggccggctacatgggccgccgctgccaggccgaggtggactgtggccccccagaggaggtgaagcacgccaccctgcgcttcaacggcacccggctgggcgctgtggccctgtatgcctgtgaccggggctacagcctgagcgcccccagccgcatccgggtgtgccagccccacggcgtgtggagcgagcccccccagtgcctggagattgatgagtgccgcagccagccctgcctgcacggcggcagctgccaggacagagtggccggctacctgtgcctgtgcagcacaggctatgaaggagcccactgtgagctggagagagatgagtgccgggcccacccctgcagaaatggaggcagctgcaggaacctgcccggggcctacgtgtgccgctgcccagctggctttgtgggcgtgcactgtgaaacagaggtggatgcctgtgacagcagcccctgccagcacggcggccgctgtgagagcggcggcggggcctacctgtgtgtgtgcccagagagcttcttcggctaccactgtgagaccgtgtctgacccctgcttcagcagcccctgtggcggccggggctactgcctggccagcaatggcagccacagctgcacctgcaaggtgggctacaccggggaggactgtgccaaggagctgttccccccaacagccctgaagatggagcgggtggaggagagcggcgtgtccatctcctggaacccccccaacggccctgctgcccggcagatgctggatggctatgctgtgacctacgtgtccagtgatggcagctacagaagaacagactttgtggacaggaccaggagcagccaccagctgcaggccctggccgccggccgggcctacaacatctctgtgttttctgtgaagaggaacagcaacaacaagaatgacatcagcaggcctgctgtgctgctggcccggacccggcccaggcctgtggagggctttgaggtgaccaacgtgacagccagcaccatctctgtgcagtgggccctgcaccgcatcagacatgccaccgtgtctggagtgcgggtgtccatccgccaccctgaggccctgcgggaccaggccacagatgtggacagatctgtggaccgcttcaccttccgggccctgctgcccgggaagcgctacaccatccagctgaccaccctgagcggcctgcggggggaggagcaccccacagagagcctggccacagcccccacccacgtgtggacccggcccctgcccccagccaacctgacagctgcccgggtgacagccaccagcgcccacgtggtgtgggatgcccccaccccaggcagcctgctggaggcctacgtgatcaacgtgaccaccagccagagcaccaagagccgctacgtgcccaacgggaagctggccagctacacagtgcgggacctgctgcccggccgccgctaccagctgtctgtgattgctgtgcagagcacagagctgggcccccagcacagcgagcccgcccacctgtacatcatcaccagccccagagatggagctgaccggcgctggcaccagggcggccaccacccccgggtgctgaagaaccggcccccaccagcccggctgcctgagctgcggctgctgaatgaccacagcgcccctgagacccccacccagcccccacgcttcagcgagctggtggatggccggggccgggtgtctgccaggtttggaggcagccccagcaaggccgccaccgtgcgcagccagcccacagccagcgcccagctggagaacatggaggaggcccccaagagggtgtccctggccctgcagctgcctgagcacggcagcaaggacattggaaatgtgcccggcaactgcagcgagaacccctgccagaatggaggcacctgtgtgcctggagcagatgcccacagctgtgactgtggccctggcttcaagggccgccgctgtgagctggcctgcatcaaggtgtcccggccctgcaccaggctcttcagcgagaccaaggccttccctgtgtgggagggcggcgtgtgccaccacgtgtacaagagggtgtacagagtgcaccaggacatctgcttcaaggagagctgtgagagcaccagcctgaagaagacccccaacaggaagcagagcaagagccagaccctggagaagagctag

SEQ ID NO: 7086 - DNA, 1008 bp, synthetic construct
  misc_feature 1..1008: note = source = /note="Description of Artificial Sequence: Synthetic coding sequence"
  source 1..1008: mol_type = other DNA
atgttcctggccaccctgtccttcctgctgccctttgcccaccccttcggcaccgtgtcctgtgagtacatgctgggcagccccctgagcagcctggcccaggtgaacctgagccccttcagccaccccaaggtgcacatggaccccaactactgccaccccagcaccagcctgcacctgtgcagcctggcctggagcttcacccggctgctgcacccccccctgagccctggcatcagccaggtggtgaaggaccacgtgaccaagcccacagccatggcccagggccgggtggcccacctgattgagtggaagggctggagcaagcccagcgacagccctgctgccctggagagcgccttcagcagctacagcgacctgtctgagggggagcaggaggccaggtttgctgctggggtggccgagcagtttgccatcgccgaggccaagctgcgggcctggagctctgtggatggagaggacagcacagatgacagctatgatgaagattttgctgggggcatggacacagacatggccggccagctgcccctgggcccccacctgcaggacctcttcaccggccaccgcttcagcaggcctgtgcggcagggctctgtggagcctgagagtgactgcagccagacagtgtccccagacaccctgtgcagcagcctgtgcagcctggaggatggcctgctgggcagccctgcccggctggccagccagctgctgggagatgagctgctgctggccaagctgccccccagccgggagagcgccttccgcagcctgggccccctggaggcccaggacagcctgtacaacagccccctgacagagagctgcctgagccctgctgaggaggagcccgccccctgcaaggactgccagcccctgtgcccccccctgaccggctcctgggagcggcagaggcaggccagtgacctggccagcagcggcgtggtgtccctggatgaagatgaggccgagcctgaggagcagtag

SEQ ID NO: 7087 - DNA, 828 bp, synthetic construct
  misc_feature 1..828: note = source = /note="Description of Artificial Sequence: Synthetic coding sequence"
  source 1..828: mol_type = other DNA
atgcagcccccaggcccccgggaccccctcatccggctgtgcttcttccgggaggagggcaccaacgtggtgcagaagatctgcttcagcacccagatcatccgccactttgagagcaagctgagtgacaccatcgaggtgtaccaggagcgcatccagtggctgacagagaacagcaagaaggccttcggcctcatcaagggggcccgggtgtccatcctgattgatgtgtctgccatcagcagcggcccccagaaggaggagttccagaaggacctgatgagcctgattgatgagcagctgagccacaaggagaagctgtttgtgctgagctttggcaccaatgccggcagcctgtggccagaccccatggaggtgtctgccagcaccctgcaggagctgaagctgtgggtgaagaccctgcagccagatggcggcagcaacctgctgcaggccctgaagaagatcttcaccctgaagggcctggacagcctggtggccatcatgaggagctgcccagaccagcccagcgagatcctgagtgactacatccagcagagcaccatgggccgggacctgatcatccacttcatcacctaccgctgtgatgaccagatgcctcctgctgtgctgaagaacctggccgaggccgtgcggggctactaccactgctacagccccaagatggagcactacaccagccgggacatggatgagctgctggccgagatccagaaggcccagagcctgctgagccacgtgcaggccctgcagcacagcagcccctgtgaggccctgacctgcaccatggaggagcccaggaactag

SEQ ID NO: 7088 - DNA, 438 bp, synthetic construct
  misc_feature 1..438: note = source = /note="Description of Artificial Sequence: Synthetic coding sequence"
  source 1..438: mol_type = other DNA
atgctgacccggctggtgctgagcgcccacctgagcagcaccaccagccccccctggacccacgccgccatctcctgggagctggacaacgtgctgatgcccagcccccgcatctggccccaggtgacccccaccggccgcagcgcctctgtgcgctctgagggcaacaccagcagcctgtggaacttctctgctggccaggatgtgcacgccatcgtgaccaggacctgtgagagcgtgctgagcagcgctgtgtacacccacggctgcggctgtgtgcgcagcgccaccaacatcacctgccagagcagcggccagcagaggcaggccgcccggcaggaggaggagaacagcatctgcaaggcccatgacagccgggagggccgcctgggctaccccctgagcgcccaccagcccggcagcggcggccccaactag

SEQ ID NO: 7089 - DNA, 777 bp, synthetic construct
  misc_feature 1..777: note = source = /note="Description of Artificial Sequence: Synthetic coding sequence"
  source 1..777: mol_type = other DNA
atgaccccacccaagctgcgggccagcctgagccccagcctgctgctgctgctgagcggctgcctgctggccgccgcccggcgggagaagggggccgccagcaatgtggccgagcctgtgcccggccccaccggcggcagcagcggccgcttcctgagccctgagcagcacgcctgctcctggcagctgctgctgcctgcccctgaggccgccgccggcagcgagctggccctgcgctgccagagcccagatggagcccggcaccagtgtgcctaccggggccaccctgagcgctgtgccgcctatgctgcccggcgggcccacttctggaagcaggtgctgggcggcctgaggaagaagagaagaccctgccacgaccctgcccccctgcaggcccggctgtgtgccggcaagaagggccatggagctgagctgcggctggtgccccgggccagccccccagcccggcccaccgtggccggctttgctggggagagcaagccccgggccaggaacagaggaagaacccgggagcgggccagcggccctgctgctggcaccccaccaccccagagcgccccacccaaggagaaccccagcgagaggaagaccaatgaaggcaagaggaaggccgccctggtgcccaatgaggagcggcccatgggcactggaccagaccctgatggcctggatggaaatgctgagctgacagagacctactgtgccgagaagtggcacagcctgtgcaacttctttgtgaacttctggaatggatag

SEQ ID NO: 7090 - DNA, 393 bp, synthetic construct
  misc_feature 1..393: note = source = /note="Description of Artificial Sequence: Synthetic coding sequence"
  source 1..393: mol_type = other DNA
atggcccggcggcactgcttctcctactggctgctggtgtgctggctggtggtgacagtggccgagggccaggaggaggtgttcaccccacctggggacagccagaacaatgctgatgccacagactgccagatcttcaccctgaccccacctccagcccccaggagccctgtgacccgggcccagcccatcaccaagaccccccgctgccccttccacttcttcccccggcggccccgcatccacttccgcttccccaaccggccctttgtgcccagccgctgcaaccaccgcttccccttccagcccttctactggccccaccgctacctgacctaccgctacttcccccggcggcggctgcagaggggcagcagcagcgaggagagctag

SEQ ID NO: 7091 - DNA, 600 bp, synthetic construct
  misc_feature 1..600: note = source = /note="Description of Artificial Sequence: Synthetic coding sequence"
  source 1..600: mol_type = other DNA
atgtacccagccacagctgtgccccagatcaacatcaccatcctgaagggggagaagggggacagaggagaccggggcctgcagggcaagtatggcaagacaggcagcgctggggcccggggccacacaggccccaagggccagaagggctccatgggcgcccctggagagcgctgcaagagccactacgccgccttctctgtgggcaggaagaagcccatgcacagcaaccactactaccagaccgtcatctttgacacagaatttgtgaacctgtatgaccacttcaacatgttcaccgggaagttctactgctacgtgcccggcctgtacttcttcagcctgaatgtgcacacctggaaccagaaggagacctacctgcacatcatgaagaatgaggaggaggtggtgatcctgtttgcccaggtgggggacaggagcatcatgcagagccagagcctgatgctggagctgcgggagcaggaccaggtgtgggtgcggctgtacaagggggagcgggagaatgccatcttcagcgaggagctggacacctacatcaccttcagcggctacctggtgaagcacgccacagagccctag

SEQ ID NO: 7092 - DNA, 702 bp, synthetic construct
  misc_feature 1..702: note = source = /note="Description of Artificial Sequence: Synthetic coding sequence"
  source 1..702: mol_type = other DNA
atggccctgaagaacaagttcagctgcctgtggatcctgggcctgtgcctggtggccaccaccagcagcaagatccccagcatcacagacccccacttcatcgacaactgcatcgaggcccacaatgagtggaggggcaaggtgaaccccccagctgctgacatgaagtacatgatctgggacaagggcctggccaagatggccaaggcctgggccaaccagtgcaagtttgagcacaatgactgcctggacaagagctacaagtgctatgctgcctttgaatatgtgggggagaacatctggctgggcggcatcaagagcttcacccccaggcatgccatcacagcctggtacaatgagacccagttctatgactttgacagcctgagctgcagccgggtgtgtggccactacacccagctggtgtgggccaacagcttctacgtgggctgtgctgtggccatgtgccccaacctgggcggggccagcacagccatctttgtgtgcaactacggccctgctggcaactttgccaacatgccaccctacgtgcggggggagagctgcagcctgtgcagcaaggaggagaagtgtgtgaagaacctgtgcaagaaccccttcctgaagcccaccggccgggccccccagcagacagccttcaaccccttcagcctgggcttcctgctgctgcgcatcttctag

SEQ ID NO: 7093 - DNA, 669 bp, synthetic construct
  misc_feature 1..669: note = source = /note="Description of Artificial Sequence: Synthetic coding sequence"
  source 1..669: mol_type = other DNA
atggccctgcacatccacgaggcctgcatcctgctgctggtgattcctggcctggtgaccagcgctgccatcagccatgaggactacccagcagatgaaggagaccagatcagcagcaatgacaacctgatctttgatgactaccggggcaagggctgtgtggatgattctggctttgtgtacaagctgggggagcgcttcttccctggccacagcaactgcccctgtgtgtgtgccctggatggccctgtgtgtgaccagccagaatgtcccaagatccaccccaagtgcaccaaggtggagcacaacggctgctgcccagagtgcaaggaggtgaagaacttctgtgagtaccacggcaagaactacaagatcctggaggagttcaagcccagcccctgtgagtggtgccgctgtgagcccagcaatgaggtgcactgtgtggtggccgactgtgctgtgcctgaatgtgtgaaccctgtgtatgagcctgagcagtgctgccctgtgtgcaagaatggccccaactgctttgctggcaccaccatcatcccagctggcatcgaggtgaaggtggatgagtgcaacatctgccactgccacaacggggactggtggaagccagcccagtgcagcaagcgggagtgccagggcaagcagacagtgtag

SEQ ID NO: 7094 - DNA, 957 bp, synthetic construct
  misc_feature 1..957: note = source = /note="Description of Artificial Sequence: Synthetic coding sequence"
  source 1..957: mol_type = other DNA
atgctgcccctgaccatgacagtgctgatcctgctgctgctgcccaccggccaggccgcccccaaggatggagtgaccaggccagacagcgaggtgcagcaccagctgctgcccaaccccttccagcccggccaggagcagctgggcctgctgcagagctacctgaagggcctgggccgcacagaggtgcagctggagcacctgagccgggagcaggtgctgctgtacctgtttgccctgcatgactatgaccagagcggccagctggatggcctggagctgctgtccatgctgacagctgccctggcccctggggccgccaacagccccaccaccaaccctgtgatcctgattgtggacaaggtgctggagacccaggacctgaatggagatggcctgatgaccccagctgagctgatcaacttccctggggtggccctgcggcacgtggagcccggggagcccctggcccccagcccccaggagccccaggccgtgggccggcagagcctgctggccaagagccccctgcggcaggagacccaggaggcccctggcccccgggaggaggccaagggccaggtggaggcccggcgggagagcctggaccctgtgcaggagcccggcggccaggccgaggctgatggagatgtgcccggccccagaggagaggccgagggccaggccgaggccaagggagatgcccctggccccagaggagaggccggcggccaggccgaggccgagggagatgcccctggccccagaggagaggccggcggccaggccgaggccgagggagatgcccctggccccagaggagaggccggcggccaggccgaggcccgggagaatggagaggaggccaaggagctgcctggagagaccctggagagcaagaacacccagaatgactttgaggtgcacatcgtgcaggtggagaatgatgagatctag

SEQ ID NO: 7095 - DNA, 393 bp, synthetic construct
  misc_feature 1..393: note = source = /note="Description of Artificial Sequence: Synthetic coding sequence"
  source 1..393: mol_type = other DNA
atgctggcccccctcttcctgtgctgcctgaggaacctcttcaggaagctgatctccttccagcccccccagctgggccgcaccaacatgcactacagcaagctgcccaggacagccatcgagacagagttcaagcagaatgtgggccccccacccaaggacctgacagctgaggtgtacttccccagcatcaagagccgcagccacctgcctgctgtgttctacaaccagtacttcaagcaccccaagtgtgtgggggagtatggccccaagaatggagctgagcggcagatcgaggagaggaaggtgctgcccaccaccatgatgttctccatgctggccgactgtgtgctgaagagcacccccatccccatcctgggcgtggccatgtag

SEQ ID NO: 7096 - DNA, 4362 bp, synthetic construct
  misc_feature 1..4362: note = source = /note="Description of Artificial Sequence: Synthetic coding sequence"
  source 1..4362: mol_type = other DNA
atgatgctgccccagaacagctggcacatcgactttggccgctgctgctgccaccagaacctcttctctgctgtggtgacctgcatcctgctgctgaacagctgcttcctgatcagcagcttcaacggcacagacctggagctgcggctggtgaatggagatggcccctgcagcggcaccgtggaggtgaagttccagggccagtggggcaccgtgtgtgatgatggctggaacaccacagccagcacagtggtgtgcaagcagctgggctgccccttctcctttgccatgttccgcttcggccaggccgtgaccaggcatggcaagatctggctggatgatgtgtcctgctatggaaatgaaagtgccctgtgggagtgccagcaccgggagtggggcagccacaactgctaccatggagaagatgtgggcgtgaactgctacggggaggccaacctgggcctgcggctggtggatggcaacaacagctgcagcggccgggtggaggtgaagttccaggagcgctggggcaccatctgtgatgatggctggaacctgaacacagctgctgtggtgtgccggcagctgggctgccccagcagcttcatcagcagtggagtggtgaacagccctgctgtgctgcggcccatctggctggatgacatcctgtgccagggcaatgagctggccctgtggaactgccgccaccggggctggggcaaccacgactgcagccacaatgaagatgtgaccctgacctgctatgacagcagtgacctggagctgcggctggtgggcggcaccaaccgctgcatgggccgggtggagctgaagatccagggccgctggggcaccgtgtgccaccacaagtggaacaatgctgctgctgatgtggtgtgcaagcagctgggctgcggcacagccctgcactttgctggcctgccccacctgcagagcggcagtgatgtggtgtggctggatggagtgtcctgcagcggaaatgaaagcttcctgtgggactgccgccacagcggcaccgtgaactttgactgcctgcaccagaatgatgtgtctgtcatctgcagtgatggagctgacctggagctgcggctggctgatggcagcaacaactgcagcggccgggtggaggtgcgcatccacgagcagtggtggaccatctgtgaccagaactggaagaatgagcaggccctggtggtgtgcaagcagctgggctgccccttctctgtgtttggcagccggcgggccaagcccagcaatgaggcccgggacatctggatcaacagcatcagctgcacaggaaatgaaagtgccctgtgggactgcacctatgatggcaaggccaagaggacctgcttccgccgcagtgatgctggggtcatctgcagcgacaaggctgacctggacctgcggctggtgggcgcccacagcccctgctacggccgcctggaggtgaagtaccagggcgagtggggcaccgtgtgccacgaccgctggagcaccagaaatgctgctgtggtgtgcaagcagctgggctgcggcaagcccctgcacgtgtttggcatgacctacttcaaggaggccagcggccccatctggctggatgatgtgtcctgcattggaaatgaaagcaacatctgggactgtgagcacagcggctggggcaagcacaactgtgtgcacagagaagatgtgattgtgacctgcagcggagatgccacctggggcctgcggctggtgggcggcagcaaccgctgcagcggccgcctggaggtgtacttccagggccgctggggcaccgtgtgtgatgatggctggaacagcaaggctgctgctgtggtgtgcagccagctggactgccccagcagcatcatcggcatgggcctgggcaatgccagcacaggctacggcaagatctggctggatgatgtgtcctgtgatggagatgaaagtgacctgtggagctgcagaaattctggctggggcaacaatgactgcagccacagtgaagatgtgggcgtcatctgcagtgatgccagtgacatggagctgcggctggtgggcggcagcagccgctgtgccggcaaggtggaggtgaatgtgcagggcgctgtgggcatcctgtgtgccaacggctggggcatgaacattgctgaggtggtgtgccggcagctggagtgtggcagcgccatccgggtgtcccgggagccccacttcacagagaggaccctgcacatcctgatgagcaacagcggctgcaccggcggggaggccagcctgtgggactgcatccgctgggagtggaagcagacagcctgccacctgaacatggaggccagcctcatctgcagcgcccaccggcagccccggctggtgggcgctgacatgccctgcagcggccgggtggaggtgaagcatgctgacacctggaggtctgtgtgtgacagcgacttcagcctgcacgccgccaacgtgctgtgccgggagctgaactgtggagatgccatcagcctgtctgtgggggaccactttggaaaaggaaatggcctgacctgggccgagaagttccagtgtgagggcagcgagacccacctggccctgtgccccatcgtgcagcaccctgaggacacctgcatccacagccgggaggtgggcgtggtgtgcagccgctacacagatgtgcggctggtgaatggcaagagccagtgtgatggccaggtggagatcaacgtgctgggccactggggcagcctgtgtgacacccactgggaccctgaagatgcccgggtgctgtgccggcagctgagctgtggcacagccctgagcaccaccggcggcaagtacatcggggagaggtctgtgcgggtgtggggccaccgcttccactgcctgggcaatgaaagcctgctggacaactgccagatgacagtgctgggcgccccaccctgcatccacggcaacacagtgtctgtcatctgcaccggcagcctgacccagcccctcttcccctgcctggccaacgtgtctgacccctacctgtctgctgtgcctgagggcagcgccctgatctgcctggaggacaagaggctgcggctggtggatggagacagccgctgtgccggccgggtggagatctaccatgatggcttctggggcaccatctgtgatgatggctgggacctgagtgatgcccacgtggtgtgccagaagctgggctgcggcgtggccttcaatgccaccgtgtctgcccactttggagagggcagcggccccatctggctggatgacctgaactgcaccggcatggagagccacctgtggcagtgccccagccggggctggggccagcacgactgccgccacaaggaggatgctggggtcatctgcagcgagttcaccgccctgcggctgtacagcgagacagaaacagagagctgtgccggccgcctggaggtgttctacaacggcacctggggctctgtgggcagaagaaacatcaccacagccatcgccggcatcgtgtgccggcagctgggctgtggggagaatggagtggtgtccctggcccccctgagcaagacaggcagcggcttcatgtgggtggatgacatccagtgccccaagacccacatcagcatctggcagtgcctgagcgccccctgggagcggcgcatcagcagccctgctgaggagacctggatcacctgtgaagatcgcatccgggtgcggggcggggacacagagtgcagcggccgggtggagatctggcacgccggctcctggggcaccgtgtgtgatgacagctgggacctggccgaggccgaggtggtgtgccagcagctgggctgcggcagcgccctggccgccctgagagatgccagctttggccagggcaccggcaccatctggctggatgacatgcgctgcaagggaaatgaaagcttcctgtgggactgccacgccaagccctggggccagagcgactgtggccacaaggaggatgctggggtgcgctgcagcggccagagcctgaagagcctgaatgccagcagcggccacctggccctgatcctgagcagcatcttcggcctgctgctgctggtgctcttcatcctcttcctgacctggtgccgggtgcagaagcagaagcacctgcccctgcgggtgtccaccaggagaagaggcagcctggaggagaacctcttccacgagatggagacctgcctgaagcgggaggacccccacggcaccaggaccagtgatgacacccccaaccacggctgtgaagatgccagtgacaccagcctgctgggcgtgctgcctgccagcgaggccaccaagtag

SEQ ID NO: 7097 - DNA, 759 bp, synthetic construct
  misc_feature 1..759: note = source = /note="Description of Artificial Sequence: Synthetic coding sequence"
  source 1..759: mol_type = other DNA
atgctgcccccacccaggcctgctgctgccctggccctgcctgtgctgctgctgctgctggtggtgctgaccccaccacccaccggggcccggcccagccctggccctgactacctgcggcggggctggatgaggctgctggccgagggggagggctgtgccccctgcaggcctgaggagtgtgccgccccccggggctgcctggccggccgggtgagagatgcctgtggctgctgctgggagtgtgccaacctggagggccagctgtgtgacctggaccccagcgcccacttctacggccactgtggggagcagctggagtgccgcctggacaccggcggggacctgagcagaggagaggtgcctgagcccctgtgtgcctgccgcagccagagccccctgtgtggcagtgatggccacacctacagccagatctgccgcctgcaggaggccgcccgggcccggccagatgccaacctgactgtggcccaccctggcccctgtgagagcggcccccagatcgtgagccacccctatgacacctggaggggcccccggctgcagaccctgggcacagaggacaccctgaccaccctggtgggcgctgggggcatggcccgggctgtggcctgtggggaggcccctggagagcacctggccctgcaggtgctgtgcctgagcggcaagaggaggcacctgtggcaggtgggcagcacaggcagcagcgagggcgtgcccagcggcggcagcttctggtag

SEQ ID NO: 7098 - DNA, 1323 bp, synthetic construct
  misc_feature 1..1323: note = source = /note="Description of Artificial Sequence: Synthetic coding sequence"
  source 1..1323: mol_type = other DNA
atgaagctggccctgctgctgccctgggcctgctgctgcctgtgtggcagcgccctggccaccggcttcctgtaccccttctctgctgctgccctgcagcagcacggctacccagagcccggggccggcagccctggcagcggctacgccagccgccgccactggtgccaccacacagtgaccaggacagtgtcctgccaggtgcagaatggcagcgagaccgtggtgcagagggtgtaccagagctgccgctggccaggcccctgtgccaacctggtgtcctaccgcaccctcatccggcccacctacagagtgtcctacagaacagtgacagtgctggagtggcgctgctgccccggcttcaccggcagcaactgtgatgaggagtgcatgaactgcacccggctgagtgacatgtctgagcggctgaccaccctggaggccaaggtgctgctgctggaggccgctgagcggcccagcagcccagacaatgacctgcctgcccctgagagcaccccacccacctggaatgaagacttcctgcctgatgccatccccctggcccaccctgtgccccggcagaggcggcccaccggccctgctggccccccaggccagacaggccccccaggccctgctggccccccaggcagcaaaggagaccggggccagacaggagagaagggccctgctggccccccaggcctgctgggccccccaggcccccggggcctgcccggggagatgggccggcccggccccccaggccccccaggccctgctggcaaccctggccccagccccaacagcccccagggcgccctgtacagcctgcagcccccaacagacaaggacaacggggacagccggctggccagcgccatcgtggacacagtgctggccggcgtgcccggcccccggggccccccaggccccccaggccccccaggcccccggggccccccaggccccccaggcaccccaggcagccagggcctggccggggagcggggcaccgtgggccccagcggggagcccggggtgaagggggaggagggggagaaggccgccacagctgagggggagggcgtgcagcagctgcgggaggccctgaagatcctggccgagcgggtgctgatcctggagcacatgattggcatccatgaccccctggccagccctgagggcagcggccaggatgctgccctgcgggccaacctgaagatgaagaggggcggggcccagccagatggagtgctggccgccctgctgggccctgaccccggccagaagtctgtggaccaggccagcagcaggaagtag

SEQ ID NO: 7099 - DNA, 1341 bp, synthetic construct
  misc_feature 1..1341: note = source = /note="Description of Artificial Sequence: Synthetic coding sequence"
  source 1..1341: mol_type = other DNA
atgctgcaccctgagaccagccctggccggggccacctgctggccgtgctgctggccctgctgggcacagcctgggccgaggtgtggccaccccagctgcaggagcaggcccccatggccggggccctgaacaggaaggagagcttcctgctgctgagcctgcacaaccggctgcgctcctgggtgcagcccccagctgctgacatgaggcggctggactggagcgacagcctggcccagctggcccaggcccgggccgccctgtgtggcatccccacccccagcctggccagcggcctgtggaggaccctgcaggtgggctggaacatgcagctgctgcctgctggcctggccagctttgtggaggtggtgtccctgtggtttgctgagggccagcgctacagccatgctgctggggagtgtgccagaaatgccacctgcacccactacacccagctggtgtgggccaccagcagccagctgggctgcggccgccacctgtgcagcgctggccaggccgccatcgaggcctttgtgtgtgcctacagcccccggggcaactgggaggtgaatggcaagaccatcgtgccctacaagaagggggcctggtgcagcctgtgcacagcctctgtgtctggctgcttcaaggcctgggaccatgctgggggcctgtgtgaggtgcccaggaacccctgcaggatgagctgccagaaccacggccgcctgaacatcagcacctgccactgccactgccccccaggctacacaggccgctactgccaggtgcgctgcagcctgcagtgtgtgcacggccgcttccgggaggaggagtgcagctgtgtgtgtgacatcggctacggcggggcccagtgtgccaccaaggtgcacttccccttccacacctgtgacctgagaattgatggagactgcttcatggtgtcctctgaggccgacacctactaccgggccaggatgaagtgccagaggaagggcggcgtgctggcccagatcaagagccagaaggtgcaggacatcctggccttctacctgggccgcctggagaccaccaatgaagtcatcgacagcgactttgagaccaggaacttctggattggcctgacctacaagacagccaaggacagcttccgctgggccaccggggagcaccaggccttcaccagctttgccttcggccagcctgacaaccacggctttggaaactgtgtggagctgcaggccagcgctgccttcaactggaacaaccagcgctgcaagaccaggaaccgctacatctgccagtttgcccaggagcacatcagccgctggggccctggcagctag

SEQ ID NO: 7100 - DNA, 219 bp, synthetic construct
  misc_feature 1..219: note = source = /note="Description of Artificial Sequence: Synthetic coding sequence"
  source 1..219: mol_type = other DNA
atgcagaggctggtgctgctgctggccatcagcctgctgctgtaccaggacctgcctgtgcgctcagaatttgagctggaccgcatctgtggctacggcacagcccgctgcaggaagaagtgccgcagccaggagtaccgcatcggccgctgccccaacacctacgcctgctgcctgaggaagtgggatgagagcctgctgaacagaaccaagccctag

SEQ ID NO: 7101 - DNA, 2349 bp, synthetic construct
  misc_feature 1..2349: note = source = /note="Description of Artificial Sequence: Synthetic coding sequence"
  source 1..2349: mol_type = other DNA
ctgtggctgctgctgtgggccgccgcctggaggctgggcgccagcgcctgcccagccctgtgcacctgcaccggcaccaccgtggactgccacggcaccggcctgcaggccatccccaagaacatccccaggaacacagagcggctggagctgaatggaaacaacatcacccgcatccacaagaatgactttgctggcctgaagcagctgcgggtgctgcagctgatggagaaccagatcggggctgtggagcggggggcctttgatgacatgaaggagctggagcggctgcggctgaacagaaaccagctgcacatgctgcctgagctgctcttccagaacaaccaggccctgagccggctggacctgtctgaaaatgccatccaggccatccccaggaaggccttccggggggccacagacctgaagaacctgcagctggacaagaaccagatcagctgcatcgaggagggcgccttccgggccctgcggggcctggaggtgctgaccctgaacaacaacaacatcaccaccatccctgtgtcctccttcaaccacatgcccaagctgcggaccttccggctgcacagcaaccacctgttctgtgactgccacctggcctggctgagccagtggctgcggcagaggcccaccatcggcctcttcacccagtgcagcggccctgccagcctgcggggcctgaatgtggccgaggtgcagaagtctgagttcagctgcagcggccagggcgaggccggccgggtgcccacctgcaccctgagcagcggcagctgcccagccatgtgcacctgcagcaatggaattgtggactgccggggcaagggcctgacagccatcccagccaacctgcctgagaccatgacagagatccggctggagctgaatggcatcaagagcatccccccaggggccttcagcccctacaggaagctgcggcgcatctgccccctgtccttctgcagcccctgccgggacctgagcaacaaccagattgctgagatcgccccagatgccttccagggcctgcggagcctgaacagcctggtgctgtatggcaacaagatcacagacctgccccggggcgtgtttggaggcctgtacaccctgcagctgctgctgctgaatgccaacaagatcaactgcatccggccagatgccttccaggacctgcagaacctgagcctgctgagcctgtatgacaacaagatccagagcctggccaagggcaccttcaccagcctgcgggccatccagaccctgcacctggcccagaaccccttcatctgtgactgcaacctgaagtggctggccgacttcctgcggaccaaccccatcgagaccagcggggcccgctgtgccagcccccggcggctggccaacaagagaattggccagatcaagagcaagaagttccgctgcagcgccaaggagcagtacttcatccctggaacagaggactaccagctgaacagcgagtgcaacagtgatgtggtgtgcccccacaagtgccgctgtgaggccaacgtggtggagtgcagcagcctgaagctgaccaagatccctgagcgcatcccccagagcacagctgagctgcggctgaacaacaatgagatcagcatcctggaggccaccggcatgttcaagaagctgacccacctgaagaagatcaacctgagcaacaacaaggtgtctgaaattgaagatggagcctttgagggcgccgcctctgtgtctgagctgcacctgacagccaaccagctggagagcatccgcagcggcatgttccggggcctggatggcctgcggaccctgatgctgaggaacaaccgcatcagctgcatccacaatgacagcttcaccggcctgagaaatgtgcggctgctgagcctgtatgacaaccagatcaccaccgtgtcccctggggcctttgacaccctgcagagcctgagcaccctgaacctgctggccaaccccttcaactgcaactgccagctggcctggctgggcggctggctgaggaagaggaagatcgtgacaggcaacccccgctgccagaacccagacttcctgcggcagatccccctgcaggatgtggccttcccagacttccgctgtgaggagggccaggaggagggcggctgcctgccccggccccagtgcccccaggagtgtgcctgcctggacacagtggtgcgctgcagcaacaagcacctgcgggccctgcccaagggcatccccaagaatgtgacagagctgtacctggatggcaaccagttcaccctggtgcccggccagctgagcaccttcaagtacctgcagctggtgtag

SEQ ID NO: 7102 - DNA, 411 bp, synthetic construct
  misc_feature 1..411: note = source = /note="Description of Artificial Sequence: Synthetic coding sequence"
  source 1..411: mol_type = other DNA
atgagcaatgtgccccacaagagcagcctgcctgagggcatccggcccggcaccgtgctgcgcatccggggcctggtgcccccaaatgccagccgcttccacgtgaacctgctgtgtggggaggagcagggcagtgatgctgccctgcacttcaacccccggctggacaccagcgaggtggtgttcaacagcaaggagcagggctcctggggccgggaggagcggggccctggggtgcccttccagaggggccagccctttgaggtgctgatcatcgccagtgatgatggcttcaaggctgtggtgggagatgcccagtaccaccacttccgccaccggctgcccctggcccgggtgcggctggtggaggtgggcggagatgtgcagctggacagcgtgcgcatcttctag

SEQ ID NO: 7103 - DNA, 1926 bp, synthetic construct
  misc_feature 1..1926: note = source = /note="Description of Artificial Sequence: Synthetic coding sequence"
  source 1..1926: mol_type = other DNA
atgcccccacccctgcccctgctgctgctgactgtgctggtggtggccgccgcccggcccggctgtgaatttgagaggaacccagctgccacctgtgtggacctgcagctgcggacctgcagtgatgctgcctacaaccacaccaccttccccaacctgctgcagcaccgctcctgggaggtggtggaggccagcagcgagtacatcctgctgtctgtgctgcaccagctgctggagggccagtgcaacccagacctgcggctgctgggctgtgctgtgctggccccccgctgtgagggcggctgggtgcggcggccctgccgccacatctgtgagggcctgcgggaggtgtgccagcctgcctttgatgccatcgacatggcctggccctacttcctggactgccaccgctacttcacccgggaggatgagggctgctatgaccccctggagaagctgcggggcggcctggaggctgatgaggccctgcccagcggcctgccccccaccttcatccgcttcagccaccacagctatgcccagatggtgcgggtgctgcggaggacagccagccgctgtgcccacgtggcccggacctacagcatcggccgcagctttgatggccgggagctgctggtgattgagttcagcagccggcccggccagcacgagctgatggagcctgaggtgaagctgattggcaacatccatggaaatgaggtggccggccgggagatgctgatctacctggcccagtacctgtgcagcgagtacctgctgggcaacccccgcatccagaggctgctgaacaccacccgcatccacctgctgcccagcatgaacccagatggctatgaggtggccgctgctgagggcgccggctacaacggctggaccagcggccggcagaatgcccagaacctggacctgaacagaaacttcccagacctgaccagcgagtactaccgcctggccgagaccaggggggcccggagtgaccacatccccatcccccagcactactggtggggcaaggtggcccctgagaccaaggccatcatgaagtggatgcagaccatcccctttgtgctgagcgccagcctgcatggaggagacctggtggtgtcctacccctttgacttcagcaagcacccccaggaggagaagatgttcagccccaccccagatgagaagatgttcaagctgctgagccgggcctatgcagatgtgcaccccatgatgatggacagaagtgaaaatagatgtggcggcaacttcctgaagaggggcagcatcatcaacggggctgactggtacagcttcaccggcggcatgtctgacttcaactacctgcacaccaactgctttgagatcaccgtggagctgggctgtgtgaagttccccccagaggaggccctgtacatcctgtggcagcacaacaaggagagcctgctgaactttgtggagaccgtgcaccggggcatcaagggcgtggtgacagacaagtttgggaagcctgtgaagaatgcccgcatctctgtgaagggcatcagacatgacatcaccacagccccagatggagactactggaggctgctgcccccaggcatccacatcgtgattgcccaggcccctggctacgccaaggtgatcaagaaggtgatcatcccagccaggatgaagagagctggccgggtggacttcatcctgcagcccctgggcatgggccccaagaacttcatccacggcctgcggaggacaggcccccatgaccccctgggcggggccagcagcctgggggaggccacagagccagaccccctgcgggcccggcggcagcccagcgcagatggcagcaagccctggtggtggagctacttcaccagcctgagcacccaccggccccgctggctgctgaagtactag

SEQ ID NO: 7104 - DNA, 1305 bp, synthetic construct
  misc_feature 1..1305: note = source = /note="Description of Artificial Sequence: Synthetic coding sequence"
  source 1..1305: mol_type = other DNA
atggccagcctgggcctgctgctgctgctgctgctgacagccctgccccccctgtggagcagcagcctgcccggcctggacacagctgagagcaaggccaccatcgctgacctgatcctgagcgccctggagcgggccaccgtcttcctggagcagaggctgcctgagatcaacctggatggcatggtgggcgtgcgggtgctggaggagcagctgaagtctgtgcgggagaagtgggcccaggagcccctgctgcagcccctgagcctgcgggtgggcatgctgggggagaagctggaggccgccatccagaggagcctgcactacctgaagctgagtgaccccaagtacctgcgggagttccagctgaccctgcagcccggcttctggaagctgccccacgcctggatccacacagatgccagcctggtgtaccccaccttcggcccccaggacagcttcagcgaggagaggagtgatgtgtgcctggtgcagctgctgggcactggaacagacagcagcgagccctgtggcctgagtgacctgtgccgcagcctgatgaccaagccaggctgcagcggctactgcctgagccaccagctgctcttcttcctgtgggccaggatgaggggctgcacccagggccccctgcagcagagccaggactacatcaacctcttctgtgccaacatgatggacctgaacagaagagctgaggccatcggctacgcctaccccacccgggacatcttcatggagaacaacgtgacaggccaccctgtgttctacctgcccctgtgtgacagcttcctgccccccaaggccgcccctgtgacagagctgtacacagatggccctgtgatgttctgtggcatgggcggcttcagtgacttctacaagctgcgctggctggaggccatcctgtcctggcagaagcagcaggagggctgcttcggggagccagatgctgaagatgaggagctgagcaaggccatccagtaccagcagcacttcagccggcgggtgaagaggcgggagaagcagttcccagacagccgctctgtggcccaggccggcgtgcagtggaggaacctgggcagcctgcagcccctgcccccaggcttcaagcagttcagctgcctgatcctgcccagctcctgggactacagatctgtgcccccctacctggccaacttctacatcttcctggtggagaccggcttccaccacgtggcccacgccggcctggagctgctgatcagccgggacccccccaccagcggcagccagagcgtgggcctgtag

SEQ ID NO: 7105 - DNA, 555 bp, synthetic construct
  misc_feature 1..555: note = source = /note="Description of Artificial Sequence: Synthetic coding sequence"
  source 1..555: mol_type = other DNA
atgatgtccttcctgctgggcgccatcctgaccctgctgtgggcccccacagcccaggccgaggtgctgctgcagcctgacttcaatgctgagaagttcagcggcctgtggtacgtggtgtccatggccagtgactgcagggtcttcctgggcaagaaggaccacctgtccatgagcacccgggccatccggcccacagaggagggcggcctgcacgtgcacatggagttccctggagcagatggctgcaaccaggtggatgctgagtacctgaaggtgggcagcgagggccacttccgggtgcctgccctgggctacctggatgtgagaattgtggacacagactacagcagctttgctgtgctgtacatctacaaggagctggagggcgccctgagcaccatggtgcagctgtacagcaggacccaggatgtgagcccccaggccctgaagagcttccaggacttctaccccaccctgggcctgcccaaggacatgatggtgatgctgccccagagtgatgcctgcaaccctgagagcaaggaggccccctag

SEQ ID NO: 7106 - DNA, 219 bp, synthetic construct; identical to SEQ ID NO: 7100
  misc_feature 1..219: note = source = /note="Description of Artificial Sequence: Synthetic coding sequence"
  source 1..219: mol_type = other DNA

SEQ ID NO: 7107 - DNA, 2247 bp, synthetic construct
  misc_feature 1..2247: note = source = /note="Description of Artificial Sequence: Synthetic coding sequence"
  source 1..2247: mol_type = other DNA
atgggccgggccggggctgctgctgtgattcctggcctggccctgctgtgggccgtgggcctgggcagcgctgcccccccaccccggctgcggctgtccttccaggagctgcaggcctggcacggcctgcagaccttcagcctggagaggacctgctgctaccaggccctgctggtggatgaggagcggggccgcctgtttgtgggcgcagaaaatcatgtggccagcctgaacctggacaacatcagcaagagggccaagaagctggcctggccagcccctgtggagtggagggaggagtgcaactgggccggcaaggacatcggcacagagtgcatgaactttgtgaagctgctgcacgcctacaacagaacccacctgctggcctgtggcaccggggccttccaccccacctgtgcctttgtggaggtgggccacagagctgaggagcctgtgctgcggctggaccccggcagaattgaagatggcaagggcaagagcccctatgaccccaggcacagagctgcctctgtgctggtgggggaggagctgtacagcggcgtggccgctgacctgatgggccgggacttcaccatcttccgcagcctgggccagaggcccagcctgaggacagagccccatgacagccgctggctgaatgagcccaagtttgtgaaggtgttctggatccctgagagcgagaacccagatgatgacaagatctacttcttcttccgggagacagctgtggaggccgccccagccctgggccgcctgtctgtgtcccgggtgggccagatctgcagaaatgatgtgggcggccagaggagcctggtgaacaagtggaccaccttcctgaaggcccggctggtgtgcagcgtgcctggggtggagggggacacccactttgaccagctgcaggatgtgttcctgctgagcagccgggaccacaggacccccctgctgtatgctgtgttcagcaccagcagcagcatcttccagggcagcgctgtgtgtgtgtacagcatgaatgatgtgagaagagccttcctgggcccctttgcccacaaggagggccccatgcaccagtgggtgtcctaccagggccgggtgccctacccccggcccggcatgtgccccagcaagaccttcggcaccttcagcagcaccaaggacttcccagatgatgtgatccagtttgccaggaaccaccccctgatgtacaacagcgtgctgcccaccggcggccggcccctcttcctgcaggtgggcgccaactacaccttcacccagattgctgctgacagagtggccgctgctgatggccactatgatgtgctcttcatcggcacagatgtgggcaccgtgctgaaggtgatctctgtgcccaagggcagccggcccagcgctgagggcctgctgctggaggagctgcacgtgtttgaggacagcgctgctgtgacctccatgcagatcagcagcaagaggcaccagctgtatgtggccagccgctctgctgtggcccagatcgccctgcaccgctgtgccgcccacggccgggtgtgcacagagtgctgcctggcccgggacccctactgtgcctgggatggagtggcctgcacccgcttccagcccagcgccaagaggcgcttccggcggcaggatgtgagaaatggagaccccagcaccctgtgcagcggggacagcagcaggcctgccctgctggagcacaaggtgtttggagtggagggcagcagcgccttcctggagtgtgagcccaggagcctgcaggcccgggtggagtggaccttccagagagctggggtgacagcccacacccaggtgctggccgaggagaggacagagaggacagcccggggcctgctgctgcggcggctgcggcggcgggacagcggcgtgtacctgtgtgccgctgtggagcagggcttcacccagcccctgcggcggctgagcctgcacgtgctgagcgccacccaggccgagcggctggcccgggcagaggaggccgccccagctgcccctcctggccccaagctgtggtacagagacttcctgcagctggtggagcccggcggcggcggcagcgccaacagcctgaggatgtgccggccccagcctgccctgcagagcctgcccctggagagcagaagaaaaggaagaaacagaaggacccacgcccctgagcccagggctgagcggggccccaggtctgccacccactggtag

SEQ ID NO: 7108 - DNA, 369 bp, synthetic construct
  misc_feature 1..369: note = source = /note="Description of Artificial Sequence: Synthetic coding sequence"
  source 1..369: mol_type = other DNA
atggtgctgctgtgcctcttcctggccagcctggccgccacccccagggctggggtgactggagcctggcccaccagcggcctgagcatcctggcccagctgcagcccagctgtgagctgcgctggacccagctgagccgcagctcctggagggacctggtgatgaccaccagcctgtggagcctggcctacttccagcacttcagccaggagaccaccacccaggagcagctggatgagatggaggagatcccccgggagagccagtgtggccggcaggacttccacgccctgagctgccccacagccagcccccgggacagagtgctgctgtgctgccccggctggagggccatggtgcccagctag

SEQ ID NO: 7109 - DNA, 570 bp, synthetic construct
  misc_feature 1..570: note = source = /note="Description of Artificial Sequence: Synthetic coding sequence"
  source 1..570: mol_type = other DNA
atgctgctgggccagctgagcaccctgctgtgcctgctgagcggggccctgcccactggaagtggccggcctgagccccagagcccccggccccagagctgggccgccgccaaccagacctgggccctgggccctggggccctgccccccctggtgcctgccagcgccctgggctcctggaaggccttcctgggcctgcagaaggcccggcagctgggcatgggccgcctgcagaggggccaggatgaggtggccgctgtgaccctgcccctgaacccccaggaggtgatccagggcatgtgcaaggctgtgccctttgtgcaggtgttcagcaggcctggctgcagcgccatccggctgaggaaccacctgtgcttcggccactgcagcagcctgtacatccctggcagtgaccccacccccctggtgctgtgcaacagctgcatgcctgccaggaagcgctgggcccctgtggtgctgtggtgcctgaccggcagcagcgccagcagaagaagagtgaagatcagcaccatgctgattgagggctgccactgcagccccaaggcctag

SEQ ID NO: 7110 - DNA, 2505 bp, synthetic construct
  misc_feature 1..2505: note = source = /note="Description of Artificial Sequence: Synthetic coding sequence"
  source 1..2505: mol_type = other DNA
atgaagcacaccctggccctgctggcccccctgctgggcctgggcctgggcctggccctgagccagctggccgccggggccacagactgcaagttcctgggccctgctgagcacctgaccttcaccccagctgcccgggcccgctggctggccccccgggtgcgggcccctggcctgctggacagcctgtatggcaccgtgcggcgcttcctgtctgtggtgcagctgaaccccttccccagcgagctggtgaaggccctgctgaatgagctggcctctgtgaaggtgaatgaggtggtgcgctatgaggccggctacgtggtgtgtgctgtgattgctggcctgtacctgctgctggtgcccacagctggcctgtgcttctgctgctgccgctgccaccggcgctgtggcggccgggtgaagacagagcacaaggccctggcctgtgagcgggccgccctgatggtgttcctgctgctgaccaccctgctgctgctgattggagtggtgtgtgcctttgtgaccaaccagaggacccatgagcagatgggccccagcattgaggccatgcctgagaccctgctgagcctgtggggcctggtgtctgatgtgccccaggagctgcaggccgtggcccagcagttcagcctgccccaggagcaggtgtctgaggagctggatggagtgggcgtgtccatcggcagcgccatccacacccagctgcggagctctgtgtaccccctgctggccgctgtgggcagcctgggccaggtgctgcaggtgtctgtgcaccacctgcagaccctgaatgccaccgtggtggagctgcaggccggccagcaggacctggagcccgccatccgggagcaccgggaccggctgctggagctgctgcaggaggcccgctgccagggcgactgtgccggggccctgtcctgggcccggaccctggagctgggcgctgacttcagccaggtgcccagcgtggaccacgtgctgcaccagctgaagggcgtgcctgaggccaacttcagctccatggtgcaggaggagaacagcaccttcaatgccctgcctgccctggccgccatgcagaccagctctgtggtgcaggagctgaagaaggctgtggcccagcagcctgagggcgtgaggaccctggccgagggcttccctggcctggaggccgccagccgctgggcccaggccctgcaggaggtggaggagagcagccggccctacctgcaggaggtgcagagatatgagacctaccgctggatcgtgggctgtgtgctgtgcagcgtggtgctgtttgtggtgctgtgcaacctgctgggcctgaacctgggcatctggggcctgagcgccagagatgaccccagccaccctgaggccaagggggaggccggggcccgcttcctgatggccggcgtgggcctgtccttcctgtttgctgcccccctcatcctgctggtgtttgccaccttcctggtgggcggcaatgtgcagaccctggtgtgccagagctgggagaatggagagctgtttgaatttgctgacaccccaggcaacctgccccccagcatgaacctgagccagctgctgggcctgaggaagaacatcagcatccaccaggcctaccagcagtgcaaggagggcgccgccctgtggacagtgctgcagctgaatgacagctatgacctggaggagcacctggacatcaaccagtacaccaacaagctgcggcaggagctgcagagcctgaaggtggacacccagagcctggacctgctgagcagcgctgcccggcgggacctggaggccctgcagagcagcggcctgcagaggatccactacccagacttcctggtgcagatccagaggcctgtggtgaagacctccatggagcagctggcccaggagctgcagggcctggcccaggcccaggacaacagcgtgctgggccagaggctgcaggaggaggcccagggcctgaggaacctgcaccaggagaaggtggtgccccagcagagcctggtggccaagctgaacctgtctgtgcgggccctggagagcagcgcccccaacctgcagctggagaccagtgatgtgctggccaacgtgacctacctgaagggggagctgcctgcctgggccgcccgcatcctgagaaatgtgtctgagtgcttcctggcccgggagatgggctacttcagccagtatgtggcctgggtgcgggaggaggtgacccagagaattgccacctgccagcccctgagcggggccctggacaacagcagggtcatcctgtgtgacatgatggctgacccctggaatgccttctggttctgcctggcctggtgcaccttcttcctgatccccagcatcatctttgctgtgaagaccagcaagtacttccggcccatcaggaagaggctgagcagcaccagcagcgaggagacccagctgttccacatcccccgggtgaccagcctgaagctgtag

SEQ ID NO: 7111 - DNA, 2505 bp, synthetic construct; identical to SEQ ID NO: 7110
  misc_feature 1..2505: note = source = /note="Description of Artificial Sequence: Synthetic coding sequence"
  source 1..2505: mol_type = other DNA

SEQ ID NO: 7112 - DNA, 216 bp, synthetic construct
  misc_feature 1..216: note = source = /note="Description of Artificial Sequence: Synthetic coding sequence"
  source 1..216: mol_type = other DNA
atgacccagctgctgctcttcctggtggccctgctggtgctgggccacgtgcccagcggccgctctgagttcaagcgctgctggaagggccagggcgcctgccagacctactgcacccggcaggagacctacatgcacctgtgcccagatgccagcctgtgctgcctgtcctatgccctgaagcccccacctgtgcccaagcatgaatatgaatag

SEQ ID NO: 7113 - DNA, 1377 bp, synthetic construct
  misc_feature 1..1377: note = source = /note="Description of Artificial Sequence: Synthetic coding sequence"
  source 1..1377: mol_type = other DNA
atggaggccaccggcacagatgaggtggacaagctgaagaccaagttcatcagcgcctggaacaacatgaagtacagctgggtgctgaagaccaagacctacttcagcaggaacagccctgtgctgctgctgggcaagtgctaccacttcaagtatgaagatgaggacaagaccctgcctgctgagagcggctgcaccatcgaggaccacgtgattgctggaaatgtggaggagttcaggaaggacttcatcagccgcatctggctgacctaccgggaggagttcccccagatcgagggcagcgccctgaccacagactgtggctggggctgcaccctgaggacaggccagatgctgctggcccagggcctcatcctgcacttcctgggccgggcctggacctggccagatgccctgaacatcgagaacagcgacagcgagagctggaccagccacacagtgaagaagttcaccgccagctttgaggccagcctgagcggggagcgggagttcaagacccccaccatcagcctgaaggagaccatcggcaagtacagtgatgaccacgagatgagaaatgaggtgtaccacaggaagatcatctcctggtttggagacagccccctggccctgtttggcctgcaccagctgattgaatatggcaagaagagcggcaagaaggccggggactggtacggccctgctgtggtggcccacatcctgaggaaggctgtggaggaggcccggcacccagacctgcagggcatcaccatctacgtggcccaggactgcaccgtgtacaacagtgatgtgattgacaagcagagcgcctccatgaccagtgacaatgctgatgacaaggccgtcatcatcctggtgcctgtgcggctgggcggggagaggaccaacacagactacctggagtttgtgaagggcatcctgagcctggagtactgtgtgggcatcattggaggcaagcccaagcagagctactactttgctggcttccaggatgacagcctcatctacatggacccccactactgccagagctttgtggatgtgtccatcaaggacttccccctggagaccttccactgccccagccccaagaagatgtccttcaggaagatggaccccagctgcaccatcggcttctactgcagaaatgtgcaggacttcaagagggccagcgaggagatcaccaagatgctgaagttcagcagcaaggagaagtaccccctcttcacctttgtgaatggccacagccgggactatgacttcaccagcaccaccaccaatgaggaggacctcttctctgaagatgagaagaagcagctgaagcgcttcagcacagaggagtttgtgctgctgtag

SEQ ID NO: 7114 - DNA, 342 bp, synthetic construct
  misc_feature 1..342: note = source = /note="Description of Artificial Sequence: Synthetic coding sequence"
  source 1..342: mol_type = other DNA
atgaggcagaggctgctgcccagcgtgaccagcctgctgctggtggccctgctcttccctggcagcagccaggcccggcacgtgaaccacagcgccacagaggccctgggggagctgcgggagcgggcccctggccagggcaccaacggcttccagctgctgcggcatgctgtgaagagggacctgctgccccccaggaccccaccctaccaggagcccgccagtgacctgaaggtggtggactgcagaagaagtgagggcttctgccaggagtactgcaactacatggagacccaggtgggctactgcagcaagaagaaggatgcctgctgcctgcactag

SEQ ID NO: 7115 - DNA, 258 bp, synthetic construct
  misc_feature 1..258: note = source = /note="Description of Artificial Sequence: Synthetic coding sequence"
  source 1..258: mol_type = other DNA
atgaagaaggtgctgctgctgatcacagccatcctggccgtggccgtgggcttccctgtgtcccaggaccaggagcgggagaagaggagcatcagtgacagtgatgagctggccagcggcttctttgtgttcccctacccctaccccttccggcccctgccccccatccccttcccccgcttcccctggttcagaagaaacttccccatccccatccctgagagcgcccccaccacccccctgcccagcgagaagtag

SEQ ID NO: 7116 - DNA, 264 bp, synthetic construct
  misc_feature 1..264: note = source = /note="Description of Artificial Sequence: Synthetic coding sequence"
  source 1..264: mol_type = other DNA
atggctgtgtctgtgctgcggctgactgtggtgctgggcctgctggtgctcttcctgacctgctacgcagatgacaagccagacaagccagatgacaagccagatgattctgggaaggaccccaagccagacttccccaagttcctgagcctgctgggcacagagatcattgaaaatgctgtggagttcatcctgcgctccatgagccgcagcacaggcttcatggagtttgatgacaatgaaggcaagcacagcagcaagtag

SEQ ID NO: 7117 - DNA, 945 bp, synthetic construct
  misc_feature 1..945: note = source = /note="Description of Artificial Sequence: Synthetic coding sequence"
  source 1..945: mol_type = other DNA
atgagcagcgaggccgagacccagcagcccccagctgcccccccagctgccccagccctgtctgctgctgacaccaagccaggcaccaccggggcccagggcgctgtggcccgggcccacatcggcggggccggcggggacaagaaggtgattgccaccaaggtgctgggcaccgtgaagtggttcaacgtgagaaatggctacggcttcatcaacagaaatgacaccaaggaggatgtgtttgtgcaccagacagccatcaagaagaacaaccccaggaagtacctgcggtctgtgggagatggagagaccgtggagtttgatgtggtggagggggagaagggagctgaggccgccaacgtgacaggccctgggggcgtgcctgtgcagggcagcaaatatgctgctgacaggaaccactaccgccgctaccccaggagaagaggcccccccaggaactaccagcagaactaccagaacagcgagagcggggagaagaatgaaggcagcgagagcgcccctgagcggcccaacaatgccggcccccaggccaaggtgcccaccctgctgcacgccgagtatggccggcggccccagtacagcaacccccctgtgcagggcgaggtgatggagggcgctgacaaccagggcgctggggagcagggccggcctgtgcggcagtgcattggagacatcgaccatgacagcgctggggccctgctggcccggcagcccagagaagatggaaatgaggaggacaaggagaaccagggagatgagacccagggccagcagcccccccagaggcgctacagaagaaacttcaactacagaagaagaagacctgagaaccccaagccccaggacggcaaggagaccaaggctgctgaccccccagctgagaacagcagcgcccctgaggccgagcagggcggcgctgagtag

SEQ ID NO: 7118 - DNA, 636 bp, synthetic construct
  misc_feature 1..636: note = source = /note="Description of Artificial Sequence: Synthetic coding sequence"
  source 1..636: mol_type = other DNA
atggtgttcctgaagttcttctgcatgtccttcttctgccacctgtgccagggctactttgatggccccctgtacccagagatgagcaatggcaccctgcaccactactttgtgcctgatggagactatgaagaaaatgatgatcctgagaagtgccagctgctcttccgggtgtctgaccaccggcgctgcagccagggcgagggcagccaggtgggcagcctgctgagcctgaccctgcgggaggagttcaccgtgctgggccggcaggtggaggatgctggccgggtgctggagggcatcagcaagagcatctcctatgacctggatggagaggagagctatggcaagtacctgcggcgggagagccaccagattggagatgcctacagcaacagcgacaagagcctgacagagctggagagcaagttcaagcagggccaggagcaggacagccggcaggagagccggctgaatgaagacttcctgggcatgctggtgcacaccaggagcctgctgaaggagaccctggacatctctgtgggcctgcgggacaagtatgagctgctggccctgaccatccgcagccacggcacccggctgggccgcctgaagaatgactacctgaaggtgtag

SEQ ID NO: 7119 - DNA, 1566 bp, synthetic construct
  misc_feature 1..1566: note = source = /note="Description of Artificial Sequence: Synthetic coding sequence"
  source 1..1566: mol_type = other DNA
atgctgtgtgccctgctgctgctgcccagcctgctgggcgccacccgggccagccccaccagcggcccccaggagtgtgccaagggcagcacagtgtggtgccaggacctgcagacagctgcccgctgtggggctgtgggctactgccagggcgctgtgtggaacaagcccacagccaagagcctgccctgtgatgtgtgccaggacattgctgctgctgctggaaatggcctgaacccagatgccacagaaagtgacatcctggccctggtgatgaagacctgtgagtggctgcccagccaggagagcagcgctggctgcaagtggatggtggatgcccacagcagcgccatcctgtccatgctgcggggggccccagacagcgccccagcccaggtgtgcacagccctgagcctgtgtgagcccctgcagaggcacctggccaccctgcggcccctgagcaaggaggacacctttgaagctgtggcccccttcatggccaacggccccctgaccttccacccccggcaggcccctgagggcgccctgtgccaggactgtgtgcggcaggtgtcccggctgcaggaggccgtgcgcagcaacctgaccctggccgacctgaacatccaggagcagtgtgagagcctgggccctggcctggccgtgctgtgcaagaactacctgttccagttctttgtgcctgctgaccaggccctgcggctgctgcccccccaggagctgtgcaggaagggcggcttctgtgaggagctgggcgccccagcccggctgacccaggtggtggccatggatggagtgcccagcctggagctgggcctgcccaggaagcagagcgagatgcagatgaaggccggcgtgacctgtgaggtgtgcatgaatgtggtgcagaagctggaccactggctgatgagcaacagcagcgagctgatgatcacccacgccctggagcgggtgtgcagcgtgatgcctgccagcatcaccaaggagtgcatcatcctggtggacacctacagccccagcctggtgcagctggtggccaagatcaccccagagaaggtgtgcaagttcatccggctgtgtggcaacagaagaagagcccgggctgtgcatgatgcctatgccatcgtgcccagccctgagtgggatgctgagaaccagggcagcttctgcaatggctgcaagaggctgctgactgtgagcagccacaacctggagagcaagagcaccaagagggacatcctggtggccttcaagggcggctgcagcatcctgcccctgccctacatgatccagtgcaagcactttgtgacccagtatgagcctgtgctgattgagagcctgaaggacatgatggaccctgtggccgtgtgcaagaaggtgggcgcctgccacggccccaggacccccctgctgggcacagaccagtgtgccctgggccccagcttctggtgccgcagccaggaggccgccaagctgtgcaatgctgtgcagcactgccagaagcacgtgtggaaggagatgcacctgcatgctggggagcacgcctag

SEQ ID NO: 7120 - DNA, 2127 bp, synthetic construct
  misc_feature 1..2127: note = source = /note="Description of Artificial Sequence: Synthetic coding sequence"
  source 1..2127: mol_type = other DNA
atggctgctgctgctgtggccgctgctgctgctgctgctgctgctgccagcctgcaggtgctggagatggagagcatggagacagctgctgctggcagcgctggcctggccgctgaggtgcggggcagcggcaccgtggactttggacctggccctggcatcagcgccatggaggccagcggcggggaccccggccctgaggctgaagattttgagtgcagcagccactgcagcgagctgtcctggaggcagaatgagcagaggcggcagggcctcttctgtgacatcaccctgtgcttcggcggggccggcggccgggagttccgggcccacaggtctgtgctggccgccgccacagagtacttcacccccctgctgagcggccagttcagcgagagccgcagcggccgggtggagatgaggaagtggagcagcgagcccggccctgagccagacacagtggaggccgtcatcgagtacatgtacacaggccgcatccgggtgtccacaggctctgtgcatgaggtgctggagctggccgaccgcttcctgctgatccggctgaaggagttctgtggggagttcctgaagaagaagctgcacctgagcaactgtgtggccatccacagcctggcccacatgtacaccctgagccagctggccctgaaggctgctgacatgatcagaagaaacttccacaaggtgatccaggatgaggagttctacaccctgcccttccacctgatccgggactggctgagtgacctggagatcaccgtggacagcgaggaggtgctgtttgaaacagtgctgaagtgggtgcagagaaatgctgaggagcgggagcgctactttgaggagctgttcaagctgctgcggctgagccagatgaagcccacctacctgaccaggcatgtgaagccagagcggctggtggccaacaatgaggtgtgtgtgaagctggtggctgatgctgtggagagacatgccctgcgggcagagaacatccagagcggcacctgccagcaccccaccagccacgtgtccctgctgcccaggtatggccagaacatggatgtgatcatggtgattggaggagtgtctgagggcggggactacctgtctgaatgtgtgggctactttgtggatgaggaccgctgggtgaacctgccccacatccacaaccacctggatggccatgctgtggccgtgacagagagctatgtgtatgtggccggctccatggagcccggctttgccaagacagtggagcgctacaaccccaacctgaacacctgggagcacgtgtgcagcctgatgaccaggaagcacagctttggcctgacagaggtgaagggcaagctgtacagcatcggcggccacggcaacttcagccctggcttcaaggatgtgacagtgtacaaccctgagctggacaagtggcacaacctggagagcgcccccaagatcctgagagatgtgaaggccctggccatcgaggacagatttgtgtacatcgccgcccggacccctgtggaccgggacacagaagatggcctgaaggccgtcatcacctgctatgacacagagacccggcagtggcaggatgtggagagcctgcccctgattgacaactactgcttcttccagatgtctgtggtgaacagcaacttctaccagacagccagctgctgccccaagagctactgcctggagaatgaggaggccgtgaggaagatcgccagccaggtgtctgatgagatcctggagagcctgcccccagaggtgctgagcattgaaggagctgccatctgctactacaaggatgatgtgttcatcatcggcggctggaagaacagtgatgacatcgacaagcagtacaggaaggaggcctaccgctactgtgccgagaggaagcgctggatgctgctgccccccatgccccagccccgctgccgggccacagcctgccacgtgcgcatcccctaccgctacctgcacggcacccagcgctaccccatgccccagaacctgatgtggcagaaggaccgcatccggcagatgcaggagatccacagacatgccctgaacatgagaagagtgcccagcagccagattgaatgttag

SEQ ID NO: 7121 - DNA, 1578 bp, synthetic construct
  misc_feature 1..1578: note = source = /note="Description of Artificial Sequence: Synthetic coding sequence"
  source 1..1578: mol_type = other DNA
atgagcggcaactgggtgcaccctggccagatcctgatctgggccatctgggtgctggccgcccccaccaagggccccagcgctgagggcccccagaggaacacccggctgggctggatccagggcaagcaggtgacagtgctgggcagccctgtgcctgtgaatgtgttcctgggcgtgccctttgctgccccacccctgggcagcctgcgcttcaccaacccccagcctgccagcccctgggacaacctgcgggaggccaccagctaccccaacctgtgcctgcagaacagcgagtggctgctgctggaccagcacatgctgaaggtgcactaccccaagtttggagtgtctgaggactgcctgtacctgaacatctatgccccagcccacgccgacaccggcagcaagctgcctgtgctggtgtggttccctggaggagccttcaagacaggcagcgccagcatctttgatggcagcgccctggccgcctatgaagatgtgctggtggtggtggtgcagtaccgcctgggcatcttcggcttcttcaccacctgggaccagcacgcccctggcaactgggccttcaaggaccaggtggccgccctgtcctgggtgcagaagaacatcgagttctttggaggagaccccagctctgtgaccatctttggagagagcgctggggccatctctgtgagcagcctcatcctgagccccatggccaagggcctcttccacaaggccatcatggagagcggcgtggccatcatcccctacctggaggcccatgactatgagaagtctgaggacctgcaggtggtggcccacttctgtggcaacaatgccagtgacagcgaggccctgctgcgctgcctgcggaccaagcccagcaaggagctgctgaccctgagccagaagaccaagagcttcaccagggtggtggatggagccttcttccccaatgagcccctggacctgctgagccagaaggccttcaaggccatccccagcatcattggagtgaacaaccatgaatgtggcttcctgctgcccatgaaggaggcccctgagatcctgagcggcagcaacaagagcctggccctgcacctgatccagaacatcctgcacatccccccccagtacctgcacctggtggccaatgagtacttccatgacaagcacagcctgacagagatccgggacagcctgctggacctgctgggagatgtgttctttgtggtgcctgccctgatcacagcccgctaccaccgggagggcgccacagaggaggagaagctgctgagcaggaagatgatgaagtactgggccacctttgccaggacaggcaaccccaatggaaatgacctgagcctgtggccagcctacaacctgacagagcagtacctgcagctggacctgaacatgagcctgggccagaggctgaaggagccccgggtggacttctggaccagcaccatccccctcatcctgagcgccagtgacatgctgcacagccccctgagcagcctgaccttcctgagcctgctgcagcccttcttcttcttctgtgccccctag

SEQ ID NO: 7122 - DNA, 900 bp, synthetic construct
  misc_feature 1..900: note = source = /note="Description of Artificial Sequence: Synthetic coding sequence"
  source 1..900: mol_type = other DNA
atggtgcgctgcctgggccctgccctgctgctgctgctgctgctgggcagcgccagctctgtgggcggcaacagatgtgtggatgctgctgaggcctgcacagcagatgcccgctgccagaggctgcggagtgaatatgtggcccagtgcctgggccgggccgcccagggcggctgcccccgggcccgctgcagaagagccctgcggcgcttctttgcccggggccccccagccctgacccacgccctgctcttctgcccctgtgccggccctgcctgtgccgagcggcggcggcagacctttgtgcccagctgtgccttcagcggccctggccctgccccacccagctgcctggagcccctgaacttctgtgagaggagccgggtgtgccgctgtgcccgggctgctgctggcccctggaggggctggggccggggcctgagccctgcccacaggcctcctgctgcccaggccagccccccaggcctgagcggcctggtgcaccccagcgcccagaggccccggcggctgcctgctggccctggccggcccctgcctgcccggctgcggggcccccggggcgtgcctgctggaacagctgtgacccccaactacgtggacaacgtgtctgcccgggtggccccctggtgtgactgtggggccagcggcaacagaagagaggactgtgaggccttccggggcctcttcaccaggaaccgctgcctggatggagccatccaggcctttgccagcggctggccccctgtgctgctggaccagctgaacccccagggcgaccctgagcacagcctgctgcaggtgagcagcacaggccgggccctggagaggaggagcctgctgagcatcctgcctgtgctggccctgcctgccctgctgtag

SEQ ID NO: 7123 - DNA, 270 bp, synthetic construct
  misc_feature 1..270: note = source = /note="Description of Artificial Sequence: Synthetic coding sequence"
  source 1..270: mol_type = other DNA
atgcaggcctgcatggtgcccggcctggccctgtgcctgctgctgggccccctggccggggccaagcctgtgcaggaggagggggacccctatgcagagctgcctgccatgccctactggcccttcagcaccagtgacttctggaactacgtgcagcacttccaggccctgggcgcctacccccagatcgaggacatggcccggaccttctttgcccacttccccctgggcagcaccctgggcttccacgtgccctaccaggaggactag

SEQ ID NO: 7124 - DNA, 663 bp, synthetic construct
  misc_feature 1..663: note = source = /note="Description of Artificial Sequence: Synthetic coding sequence"
  source 1..663: mol_type = other DNA
atggccagcgagcggctgcccaacagacctgcctgcctgctggtggccagcggggctgctgagggcgtgtctgcccagagcttcctgcactgcttcaccatggccagcacagccttcaacctgcaggtggccacccctgggggcaaggccatggagtttgtggatgtgacagagagcaatgcccgctgggtgcaggacttccggctgaaggcctatgccagccctgccaagctggagagcattgatggagcccgctaccacgccctgctgatccccagctgccctggggccctgacagacctggccagcagcggcagcctggcccgcatcctgcagcacttccacagcgagagcaagcccatctgtgctgtgggccacggcgtggccgccctgtgctgtgccaccaatgaagatcgctcctgggtgtttgacagctacagcctgaccggccccagcgtgtgtgagctggtgcgggcccctggctttgcccggctgcccctggtggtggaggactttgtgaaggacagcggggcctgcttcagcgccagcgagccagatgctgtgcacgtggtgctggacagacacctggtgacaggccagaatgccagcagcacagtgcctgctgtgcagaacctgctcttcctgtgtggcagcaggaagtag

SEQ ID NO: 7125 - DNA, 1158 bp, synthetic construct
  misc_feature 1..1158: note = source = /note="Description of Artificial Sequence: Synthetic coding sequence"
  source 1..1158: mol_type = other DNA
atgtggggcttccggctgctgcggagcccccccctgctgctgctgctgccccagctgggcattggaaatgccagcagctgcagccaggcccggaccatgaaccctgggggcagcggcggggcccgctgcagcctgtctgctgaggtgagaagacggcagtgcctgcagctgagcacagtgcctggagctgacccccagaggagcaatgagctgctgctgctggccgctgctggggagggcctggagcggcaggacctgcccggggaccctgccaaggaggagccccagcccccaccccagcaccacgtgctgtacttccctggagatgtgcagaactaccacgagatcatgaccaggcaccctgagaactaccagtgggagaactggagcctggagaatgtggccaccatcctggcccaccgcttccccaacagctacatctgggtgatcaagtgcagcaggatgcacctgcacaagttcagctgctatgacaactttgtgaagagcaacatgtttggagcccctgagcacaacacagactttggagccttcaagcacctgtacatgctgctggtgaatgccttcaacctgagccagaacagcctgagcaagaagagcctgaatgtgtggaacaaggacagcatcgccagcaactgccgcagcagccccagccacaccaccaacggctgccagggcgagaaggtgaggacctgtgagaagagtgatgagagcgccatgtccttctacccacccagcctgaatgatgccagcttcaccctgattggcttcagcaagggctgtgtggtgctgaaccagctgctgtttgagctgaaggaggccaagaaggacaagaacattgatgccttcatcaagagcatccgcaccatgtactggctggatggcggccacagcggcggcagcaacacctgggtgacctacccagaggtgctgaaggagtttgcccagacaggcatcatcgtgcacacccacgtgaccccctaccaggtgcgggaccccatgaggtcctggattggcaaggagcacaagaagtttgtgcagatcctgggggacctgggcatgcaggtgaccagccagatccacttcaccaaggaggcccccagcattgagaaccacttccgggtgcatgaggtgttctag

SEQ ID NO: 7126 - DNA, 936 bp, synthetic construct
  misc_feature 1..936: note = source = /note="Description of Artificial Sequence: Synthetic coding sequence"
  source 1..936: mol_type = other DNA
atgagaggagctgcccgggccgcctggggccgggccggccagccctggccccggcccccagcccctggccccccacctccacccctgcccctgctgctgctgctgctggccggcctgctgggcggggccggggcccagtacagcagtgaccgctgctcctggaagggcagcggcctgacccatgaggcccacaggaaggaggtggagcaggtgtacctgcgctgtgccgccggggctgtggagtggatgtaccccaccggggccctgattgtgaacctgcggcccaacaccttcagccctgcccggcacctgactgtgtgcatccgctccttcacagacagcagcggggccaacatctacctggagaagacaggagagctgcggctgctggtgcctgatggagatggccggcccggccgggtgcagtgcttcggcctggagcagggcggcctgtttgtggaggccaccccccagcaggacattggaagaaggaccaccggcttccagtatgagctggtgcggcggcaccgggccagtgacctgcacgagctgagcgccccctgccggccctgcagcgacacagaggtgctgctggccgtgtgcaccagtgactttgctgtgcggggcagcatccagcaggtgacccatgagcctgagcggcaggacagcgccatccacctgcgggtgtcccggctgtaccggcagaagagccgggtgtttgagcctgtgcctgaaggagatggccactggcagggccgggtgaggaccctgctggagtgtggggtgcggcccggccacggggacttcctgttcaccggccacatgcactttggagaggcccggctgggctgtgccccccgcttcaaggacttccagaggatgtacagagatgcccaggagcggggcctgaacccctgtgaggtgggcacagactag

SEQ ID NO: 7127 - DNA, 1221 bp, synthetic construct
  misc_feature 1..1221: note = source = /note="Description of Artificial Sequence: Synthetic coding sequence"
  source 1..1221: mol_type = other DNA
atgggccccagcacccccctgctgatcctcttcctgctgtcctggagcggccccctgcagggccagcagcaccacctggtggagtacatggagcggcggctggccgccctggaggagcggctggcccagtgccaggaccagagcagcagacatgctgctgagctgcgggacttcaagaacaagatgctgcccctgctggaggtggccgagaaggagcgggaggccctgaggacagaggccgacaccatcagcggccgggtggaccggctggagcgggaggtggactacctggagacccagaacccagccctgccctgtgtggagtttgatgagaaggtgactggaggccctggcaccaagggcaagggcagaagaaatgagaagtatgacatggtgacagactgtggctacaccatcagccaggtgcgctccatgaagatcctgaagagatttggaggccctgctggcctgtggaccaaggaccccctgggccagacagagaagatctacgtgctggatggcacccagaatgacacagcctttgtgttcccccggctgcgggacttcaccctggccatggccgccaggaaggccagccgggtgcgggtgcccttcccctgggtgggcaccggccagctggtgtatggaggcttcctgtactttgcccggcggcccccaggccggcctgggggcggcggggagatggagaacaccctgcagctgatcaagttccacctggccaacagaacagtggtggacagctctgtgtttcctgctgagggcctcatccccccctacggcctgacagctgacacctacatcgacctggccgcagatgaggagggcctgtgggccgtgtatgccaccagagaagatgacagacacctgtgcctggccaagctggacccccagaccctggacacagagcagcagtgggacaccccctgccccagagaaaatgctgaggccgcctttgtgatctgtggcaccctgtatgtggtgtacaacaccaggcctgccagccgggcccgcatccagtgcagctttgatgccagcggcaccctgaccccagagcgggccgccctgccctacttccccaggagatatggagcccacgccagcctgcgctacaacccccgggagcggcagctgtatgcctgggatgatggctaccagatcgtgtacaagctggagatgaggaagaaggaggaggaggtgtag

SEQ ID NO: 7128 - DNA, 900 bp, synthetic construct
  misc_feature 1..900: note = source = /note="Description of Artificial Sequence: Synthetic coding sequence"
  source 1..900: mol_type = other DNA
atgggcggcccccgggccctgctggccgccctgtgggccctggaggccgccggcacagctgccctgcgcatcggggccttcaacatccagagctttggagacagcaaggtgtctgaccctgcctgtggcagcatcatcgccaagatcctggccggctatgacctggccctggtgcaggaggtgcgggaccctgacctgtctgctgtgtctgccctgatggagcagatcaacagcgtgtctgagcacgagtacagctttgtgagcagccagcccctgggccgggaccagtacaaggagatgtacctgtttgtgtacaggaaggatgctgtgtctgtggtggacacctacctgtacccagaccctgaagatgtgttcagccgggagccctttgtggtgaagttcagcgcccctggcactggagagcgggccccacccctgcccagcagaagagccctgaccccaccacccctgcctgctgctgcccagaacctggtgctgatccccctgcatgctgccccccaccaggccgtggccgagattgatgccctgtatgatgtgtacctggatgtgattgacaagtggggcacagatgacatgctgttcctgggggacttcaatgctgactgcagctatgtgcgggcccaggactgggccgccatccggctgcggagcagcgaggtgttcaagtggctgatcccagattctgctgacaccaccgtgggcaacagcgactgtgcctatgaccgcatcgtggcctgtggggcccggctgcggcgcagcctgaagccccagagcgccaccgtgcatgacttccaggaggagtttggcctggaccagacccaggccctggccatcagtgaccacttccctgtggaggtgaccctgaagttccacaggtag

SEQ ID NO: 7129 - DNA, 1617 bp, synthetic construct
  misc_feature 1..1617: note = source = /note="Description of Artificial Sequence: Synthetic coding sequence"
  source 1..1617: mol_type = other DNA
atgggctgcctgtggggcctggccctgcccctcttcttcttctgctgggaggtgggcgtgtctggcagcagcgctggccccagcacccggcgggctgacacagccatgaccacagatgacacagaggtgcctgccatgaccctggcccctggccatgctgccctggagacccagaccctgtctgctgagaccagcagccgggccagcaccccagctggccccatccctgaggccgagaccaggggggccaagaggatcagccctgcccgggagaccaggagcttcaccaagaccagccccaacttcatggtgctgattgccacctctgtggagaccagcgctgccagcggcagccctgagggcgccggcatgaccaccgtgcagaccatcactggaagtgacccccgggaggccatctttgacaccctgtgcacagatgacagcagcgaggaggccaagaccctgaccatggacatcctgaccctggcccacaccagcacagaggccaagggcctgagcagcgagagcagcgccagcagtgacagcccccaccctgtgatcacccccagccgggccagcgagagcagcgccagcagtgatggcccccaccctgtgatcacccccagccgggccagcgagagcagcgccagcagtgatggcccccaccctgtgatcacccccagctggagccctggcagtgatgtgaccctgctggccgaggccctggtgacagtgaccaacatcgaggtgatcaactgcagcatcacagaaattgagaccaccaccagcagcatccctggggccagtgacacagacctgatccccacagagggcgtgaaggccagcagcaccagtgaccccccagccctgcctgacagcacagaggccaagccccacatcacagaggtgacagccagcgctgagaccctgagcacagctggcaccacagagagcgctgccccagatgccaccgtgggcacccccctgcccaccaacagcgccacagagcgggaggtgacagcccctggggccaccaccctgagcggggccctggtgacagtgtccaggaaccccctggaggagaccagcgccctgtctgtggagacccccagctatgtgaaggtgtctggggccgcccctgtgtccattgaagctggcagcgctgtgggcaagaccaccagctttgctggcagcagcgccagcagctacagccccagcgaggccgccctgaagaacttcacccccagcgagacccccaccatggacatcgccaccaagggccccttccccaccagccgggaccccctgcccagcgtgccccccaccaccaccaacagcagccggggcaccaacagcaccctggccaagatcaccaccagcgccaagaccaccatgaagcccccaacagccacccccaccacagcccggacccggcccaccacagatgtgtctgctggagaaaatggaggcttcctgctgctgcggctgtctgtggccagccctgaggacctgacagacccccgggtggccgagcggctgatgcagcagctgcaccgggagctgcacgcccacgccccccacttccaggtgtccctgctgcgggtgcggcggggctag

SEQ ID NO: 7130 - DNA, 975 bp, synthetic construct
  misc_feature 1..975: note = source = /note="Description of Artificial Sequence: Synthetic coding sequence"
  source 1..975: mol_type = other DNA
atgagcagcgaggccgagacccagcagcccccagctgcccccccagctgccccagccctgtctgctgctgacaccaagccaggcaccaccggcagcggggccggcagcggcggccctgggggcctgaccagcgctgccccagctggaggagacaagaaggtgattgccaccaaggtgctgggcaccgtgaagtggttcaacgtgagaaatggctacggcttcatcaacagaaatgacaccaaggaggatgtgtttgtgcaccagacagccatcaagaagaacaaccccaggaagtacctgcggtctgtgggagatggagagaccgtggagtttgatgtggtggagggggagaagggagctgaggccgccaacgtgacaggccctgggggcgtgcctgtgcagggcagcaaatatgctgctgacaggaaccactaccgccgctaccccaggagaagaggcccccccaggaactaccagcagaactaccagaacagcgagagcggggagaagaatgaaggcagcgagagcgcccctgagggccaggcccagcagaggcggccctacagaagaagacgcttccccccctactacatgagaagaccctacggccggcggccccagtacagcaacccccctgtgcagggcgaggtgatggagggcgctgacaaccagggcgctggggagcagggccggcctgtgcggcagaacatgtaccggggctaccggccccgcttccggcggggccccccccggcagaggcagcccagagaagatggaaatgaggaggacaaggagaaccagggagatgagacccagggccagcagcccccccagaggcgctacagaagaaacttcaactacagaagaagaagacctgagaaccccaagccccaggacggcaaggagaccaaggctgctgaccccccagctgagaacagcagcgcccctgaggccgagcagggcggcgctgagtag

SEQ ID NO: 7131 - DNA, 210 bp, synthetic construct
  misc_feature 1..210: note = source = /note="Description of Artificial Sequence: Synthetic coding sequence"
  source 1..210: mol_type = other DNA
atgaggatcttctactacctgcacttcctgtgctacgtgaccttcatcctgcctgccacctgcaccctggtgaatgctgaccgctgcaccaagagatatggccgctgcaagagggactgcctggagagcgagaagcagattgacatctgcagcctgcccaggaagatctgctgcacagagaagctgtatgaagaagatgacatgttttag

SEQ ID NO: 7132 - DNA, 342 bp, synthetic construct
  misc_feature 1..342: note = source = /note="Description of Artificial Sequence: Synthetic coding sequence"
  source 1..342: mol_type = other DNA
atgaagctgctgaccaccatctgccgcctgaagctggagaagatgtacagcaagaccaacaccagcagcaccatctttgagaaggcccggcatggaacagagaagatcagcacagcccggtctgagggccaccacatcaccttcagccgctggaagagctgcacagccatcggcggccgctgcaagaaccagtgtgatgacagcgagttccgcatctcctactgtgcccggcccaccacccactgctgcgtgacagaatgtgaccccacagaccccaacaactggatccccaaggacagcgtgggcacccaggagtggtaccccaaggacagccgccactag

SEQ ID NO: 7133 - DNA, 3030 bp, synthetic construct
  misc_feature 1..3030: note = source = /note="Description of Artificial Sequence: Synthetic coding sequence"
  source 1..3030: mol_type = other DNA
atggacctgatccggggcgtgctgctgcggctgctgctgctggccagcagcctgggccctggagctgtgtccctgcgggccgccatcaggaagccaggcaaggtgggcccccccctggacatcaagctgggcgccctgaactgcacagccttcagcatccagtggaagatgcccaggcaccctggcagccccatcctgggctacacagtgttctacagcgaggtgggcgctgacaagagcctgcaggagcagctgcacagcgtgcccctgagccgggacatccccaccacagaggaggtgattggagacctgaagccaggcacagagtacagagtgtccattgctgcctacagccaggccggcaagggccgcctgagcagccccaggcatgtgaccaccctgagccaggacagctgcctgcccccagctgccccccagcagccccacgtgattgtggtgtctgacagcgaggtggccctgtcctggaagccaggggccagcgagggcagcgcccccatccagtactacagcgtggagttcatccggccagactttgacaagaagtggaccagcatccacgagcgcatccagatggacagcatggtgatcaagggcctggaccctgacaccaactaccagtttgctgtgcgggccatgaacagccacggccccagccccaggtcctggcccagcgacatcatccgcaccctgtgcccagaggaggccggcagcggccgctatggcccccgctacatcacagacatgggcgctggagaagatgatgagggctttgaagatgacctggacctggacatcagctttgaggaggtgaagcccctgcctgccaccaagggcggcaacaagaagttcctggtggagagcaagaagatgagcatcagcaaccccaagaccatcagccgcctcatcccccccaccagcgccagcctgcctgtgaccaccgtggccccccagcccatccccatccagaggaagggcaagaatggagtggccatcatgagccggctgtttgacatgccctgtgatgagaccctgtgcagcgctgacagcttctgtgtgaatgactacacctggggcggcagccgctgccagtgcaccctgggcaaaggaggagagagctgcagcgaggacatcgtcatccagtacccccagttcttcggccacagctatgtgacctttgagcccctgaagaacagctaccaggccttccagatcaccctggagttccgggcagaggccgaggatggcctgctgctgtactgtggagaaaatgagcacggccgcggggacttcatgagcctggccatcatccgccgcagcctgcagttccgcttcaactgtggcactggagtggccatcatcgtgtctgagaccaagatcaagctgggcggctggcacacagtgatgctgtacagagatggcctgaatggcctgctgcagctgaacaacggcacccctgtgacaggccagagccagggccagtacagcaagatcaccttccgcacccccctgtacctgggcggggcccccagcgcctactggctggtgcgggccaccggcaccaacagaggcttccagggctgtgtgcagagcctggccgtgaatggaagaagaattgacatgaggccctggcccctgggcaaggccctgtctggagcagatgtgggagaatgtagcagcggcatctgtgatgaggccagctgcatccacggcggcacctgcacagccatcaaggctgacagctacatctgcctgtgccccctgggcttcaagggccgccactgtgaagatgccttcaccctgaccatcccccagttccgggagagcctgcggagctatgctgccaccccctggcccctggagccccagcactacctgtccttcatggagtttgagatcaccttccggccagattctggagatggagtgctgctgtacagctatgacaccggcagcaaggacttcctgagcatcaacctggccggcggccacgtggagttccgctttgactgtggcagcggcactggagtgctgcggtctgaggaccccctgaccctgggcaactggcatgagctgcgggtgtccaggacagccaagaatggcatcctgcaggtggacaagcagaagatcgtggagggcatggccgagggcggcttcacccagatcaagtgcaacacagacatcttcatcggcggcgtgcccaactatgatgatgtgaagaagaacagcggcgtgctgaagcccttcagcggcagcatccagaagatcatcctgaatgacaggaccatccacgtgaagcatgacttcaccagcggcgtgaatgtggagaatgctgcccacccctgtgtgcgggccccctgtgcccatggaggcagctgccggcccaggaaggagggctatgactgtgactgccccctgggctttgagggcctgcactgccagaaggccatcatcgaggccatcgagatcccccagttcatcggccgcagctacctgacctatgacaacccagacatcctgaagagggtgtctggcagccgcagcaatgtgttcatgaggttcaagaccacagccaaggatggcctgctgctgtggaggggggacagccccatgaggcccaacagcgacttcatcagcctgggcctgagagatggagccctggtgttctcctacaacctgggcagcggcgtggccagcatcatggtgaatggcagcttcaatgatggccgctggcaccgggtgaaggctgtgagagatggccagagcggcaagatcaccgtggatgattatggagccaggacaggcaagagccctggcatgatgaggcagctgaacatcaatggagccctgtatgtgggcggcatgaaggagatcgccctgcacaccaaccggcagtacatgaggggcctggtgggctgcatcagccacttcaccctgagcacagactaccacatcagcctggtggaggatgctgtggatggcaagaacatcaacacctgtggggccaagtag

SEQ ID NO: 7134 - DNA, 1272 bp, synthetic construct
  misc_feature 1..1272: note = source = /note="Description of Artificial Sequence: Synthetic coding sequence"
  source 1..1272: mol_type = other DNA
atgtctgtgcggggcatcctgcggctgggcacccaggagtaccccagccccctggaccctgaggtgggcccctactgtgacacccccaccatgaggaccctcttcaacctgctgtggctggccctggcctgcagccctgtgcacaccaccctgagcaagagtgatgccaagaaggccgccagcaagaccctgctggagaagagccagttcagtgacaagcctgtgcaggaccggggcctggtggtgacagacctgaaggccgagagcgtggtgctggagcacaggagctactgcagcgccaaggcccgggacagacactttgctggagatgtgctgggctacgtgaccccctggaacagccacggctatgatgtgaccaaggtgtttggcagcaagttcacccagatcagccctgtgtggctgcagctgaagagaagaggccgggagatgtttgaggtgacaggcctgcatgatgtggaccagggctggatgagagctgtgaggaagcacgccaagggcctgcacatcgtgccccggctgctgtttgaggactggacctatgatgacttcagaaatgtgctggacagtgaagatgaaattgaggagctgagcaagacagtggtgcaggtggccaagaaccagcactttgatggctttgtggtggaggtgtggaaccagctgctgagccagaagagggtgggcctcatccacatgctgacccacctggccgaggccctgcaccaggcccggctgctggccctgctggtgatccccccagccatcaccccaggcacagaccagctgggcatgttcacccacaaggagtttgagcagctggcccctgtgctggatggcttcagcctgatgacctatgactacagcacagcccaccagcccggccccaatgcccccctgtcctgggtgcgggcctgtgtgcaggtgctggaccccaagagcaagtggaggagcaagatcctgctgggcctgaacttctacggcatggactatgccaccagcaaggatgcccgggagcctgtggtgggcgcccgctacatccagaccctgaaggaccaccggcccaggatggtgtgggacagccaggccagcgagcacttctttgagtacaagaagagccgcagcggcagacatgtggtgttctaccccaccctgaagagcctgcaggtgcggctggagctggcccgggagctgggcgtgggcgtgtccatctgggagctgggccagggcctggactacttctatgacctgctgtag

SEQ ID NO: 7135 - DNA, 1182 bp, synthetic construct
  misc_feature 1..1182: note = source = /note="Description of Artificial Sequence: Synthetic coding sequence"
  source 1..1182: mol_type = other DNA
atgaggaccctcttcaacctgctgtggctggccctggcctgcagccctgtgcacaccaccctgagcaagagtgatgccaagaaggccgccagcaagaccctgctggagaagagccagttcagtgacaagcctgtgcaggaccggggcctggtggtgacagacctgaaggccgagagcgtggtgctggagcacaggagctactgcagcgccaaggcccgggacagacactttgctggagatgtgctgggctacgtgaccccctggaacagccacggctatgatgtgaccaaggtgtttggcagcaagttcacccagatcagccctgtgtggctgcagctgaagagaagaggccgggagatgtttgaggtgacaggcctgcatgatgtggaccagggctggatgagagctgtgaggaagcacgccaagggcctgcacatcgtgccccggctgctgtttgaggactggacctatgatgacttcagaaatgtgctggacagtgaagatgaaattgaggagctgagcaagacagtggtgcaggtggccaagaaccagcactttgatggctttgtggtggaggtgtggaaccagctgctgagccagaagagggtgggcctcatccacatgctgacccacctggccgaggccctgcaccaggcccggctgctggccctgctggtgatccccccagccatcaccccaggcacagaccagctgggcatgttcacccacaaggagtttgagcagctggcccctgtgctggatggcttcagcctgatgacctatgactacagcacagcccaccagcccggccccaatgcccccctgtcctgggtgcgggcctgtgtgcaggtgctggaccccaagagcaagtggaggagcaagatcctgctgggcctgaacttctacggcatggactatgccaccagcaaggatgcccgggagcctgtggtgggcgcccgctacatccagaccctgaaggaccaccggcccaggatggtgtgggacagccaggccagcgagcacttctttgagtacaagaagagccgcagcggcagacatgtggtgttctaccccaccctgaagagcctgcaggtgcggctggagctggcccgggagctgggcgtgggcgtgtccatctgggagctgggccagggcctggactacttctatgacctgctgtag

SEQ ID NO: 7136 - DNA, 1959 bp, synthetic construct
  misc_feature 1..1959: note = source = /note="Description of Artificial Sequence: Synthetic coding sequence"
  source 1..1959: mol_type = other DNA
atggcctctgtggcctgggccgtgctgaaggtgctgctgctgctgcccacccagacctggagccctgtgggcgccggcaaccccccagactgtgatgcccccctggccagcgccctgcccaggagcagcttcagcagcagcagcgagctgagcagcagccacggccctggcttcagccggctgaacagaagagatggagctgggggctggacccccctggtgagcaacaagtaccagtggctgcagattgacctgggggagaggatggaggtgacagctgtggccacccagggcggctacggcagcagtgactgggtgaccagctacctgctgatgttcagtgatggcggcaggaactggaagcagtaccgccgggaggagagcatctggggcttccctggcaacaccaatgctgacagcgtggtgcactaccgcctgcagcccccatttgaggcccgcttcctgcgcttcctgcccctggcctggaacccccggggccgcatcggcatgagaattgaggtgtatggctgtgcctacaagtctgaggtggtgtactttgatggccagagcgccctgctgtaccgcctggacaagaagcccctgaagcccatcagagatgtgatcagcctgaagttcaaggccatgcagagcaatggcatcctgctgcaccgggagggccagcacggcaaccacatcaccctggagctgatcaagggcaagctggtgttcttcctgaacagcggaaatgccaagctgcccagcaccatcgcccctgtgaccctgaccctgggcagcctgctggatgaccagcactggcacagcgtgctgattgagctgctggacacccaggtgaacttcaccgtggacaagcacacccaccacttccaggccaagggggacagcagctacctggacctgaactttgagatcagctttggaggcatccccaccccaggccgcagccgggccttccggaggaagagcttccacggctgcctggagaacctgtactacaatggagtggatgtgacagagctggccaagaagcacaagccccagatcctgatgatgggaaatgtgtccttcagctgcccccagccccagacagtgcctgtgaccttcctgagcagccgcagctacctggccctgcccggcaacagcggggaggacaaggtgtctgtgaccttccagttccgcacctggaacagagctggccacctgctgtttggagagctgcggcggggcagcggcagctttgtgctcttcctgaaggatggcaagctgaagctgagcctcttccagcccggccagagccccagaaatgtgacagctggggccggcctgaatgatggccagtggcacagcgtgtccttcagcgccaagtggagccacatgaatgtggtggtggatgatgacacagctgtgcagcccctggtggccgtgctgattgattctggggacacctactactttggagccctgtatgagcagagctgtgaggcccacaagcaccggggcaaccccagcggcctgtactacattgatgctgatggcagcggccccctgggccccttcctggtgtactgcaacatgacagatgctgcctggacagtggtgcagcacggcggcccagatgctgtgaccctgcggggggcccccagcggccaccccaggtctgctgtgtcctttgcctatgctgctggagctggccagctgcggtctgctgtgaacctggccgagcgctgtgagcagaggctggccctgcgctgtggcacagcccggcggccagacagcagagatggcacccccctgtcctggtgggtgggccgcaccaatgagacccacacctcctggggcggcagcctgcctgatgcccagaagtgcacctgtggcctggagggcaactgcatcgacagccagtactactgcaactgtgatgctggaagaaatgagtggtag

SEQ ID NO: 7137 - DNA, 1455 bp, synthetic construct
  misc_feature 1..1455: note = source = /note="Description of Artificial Sequence: Synthetic coding sequence"
  source 1..1455: mol_type = other DNA
atgtggtacgtgtccacccggggcgtggccccccgggtgaactttgaaggagccctcttcagcggctacgccccagatggcggcctcttcatgcctgaggagctgccccagctggaccggggcaccctgtgccagtggagcaccctgagctacccaggcctggtgaaggagctgtgtgccctcttcatcggcagcgagctgctgcccaaggatgagctgaatgacctgattgaccgggccttcagccgcttccgccaccgggaggtggtgcacctgagccggctgagaaatggcctgaatgtgctggagctgtggcacggcgtgacctacgccttcaaggacctgagcctgagctgcaccacccagttcctgcagtacttcctggagaagcgggagaagcacgtgacagtggtggtgggcaccagcggggacaccggcagcgctgccatcgagagcgtgcagggcgccaagaacatggacatcatcgtgctgctgcccaagggccactgcaccaagatccaggagctgcagatgaccaccgtgctgaagcagaatgtgcacgtgtttggagtggagggcaacagtgatgagctggatgagcccatcaagacagtgtttgctgatgtggcctttgtgaagaagcacaacctgatgagcctgaacagcatcaactggagccgggtgctggtgcagatggcccaccacttctttgcctacttccagtgcacccccagcctggacacccaccccctgcccctggtggaggtggtggtgcccaccggggctgctggcaacctggccgccggctacatcgcccagaagattggcctgcccatccggctggtggtggccgtgaacagaaatgacatcatccacaggacagtgcagcagggcgacttcagcctgtctgaggccgtgaagagcaccctggccagcgccatggacatccaggtgccctacaacatggagagggtcttctggctgctgagcggcagtgacagccaggtgacccgggccctgatggagcagtttgagaggacccagagcgtgaacctgcccaaggagctgcacagcaagctgtctgaggccgtgacctctgtgtctgtgtctgatgaggccatcacccagaccatgggccgctgctgggatgagaaccagtacctgctgtgcccccacagcgctgtggccgtgaactaccactaccagcagattgaccggcagcagcccagcaccccccgctgctgcctggccccagccagcgctgccaagtttcctgaggccgtgctggccgccggcctgaccccagagaccccagctgagatcgtggccctggagcacaaggagacccgctgcaccctgatgagaagaggagacaactggatgctgatgctgcgggacaccatcgaggacctgagccggcagtggaggagccacgccctgaacaccagccagtag

SEQ ID NO: 7138 - DNA, 264 bp, synthetic construct
  misc_feature 1..264: note = source = /note="Description of Artificial Sequence: Synthetic coding sequence"
  source 1..264: mol_type = other DNA
atggtgtccctgatgaagctgtggatccccatgctgatgaccttcttctgcaccgtgctgctgtctgtgctgggggagatgaggaagaagagatatgacaggaaggagctgctgctggaggagtgctggggcaagcccaacgtgaaggagtgcaccaacaagtgcagcaaggccttccgctgcaaggacaagaactacacctgctgctggacctactgcggcaacatctgctggatcaacgtggagaccagcggggactactag

SEQ ID NO: 7139 - DNA, 453 bp, synthetic construct
  misc_feature 1..453: note = source = /note="Description of Artificial Sequence: Synthetic coding sequence"
  source 1..453: mol_type = other DNA
atgaggttcatggccggccctgctggcagccagagcctgggccccctgtgcttccacagcagcccccaggccctgtacacagtgctgctgattgtgctggtgatgatgagcctggtgtttgggaagtttgtgcctgtgaactgggagcccccccagcccctgcccttccccaagtacctgcgctgctaccgctgcctgctggagaccaaggagctgggctgcctgctgggcagtgacatctgcctgaccccagctggcagcagctgcatcaccctgcacaagaagaacagcagcggcagtgatgtgatggtgtctgactgccgcagcaaggagcagatgtctgactgcagcaacaccaggaccagccctgtgtctggcttctggatcttcagccagtactgcttcctggacttctgcaatgacccccagaacagaggcctgtacaccccctag

SEQ ID NO: 7140 - DNA, 873 bp, synthetic construct
  misc_feature 1..873: note = source = /note="Description of Artificial Sequence: Synthetic coding sequence"
  source 1..873: mol_type = other DNA
atgtctgtgcggcggggcagaagacctgcccggcccggcacccggctgtcctggctgctgtgctgcagcgccctgctgagccctgctgctggctacgtgattgtgtcctctgtgtcctgggccgtgaccaatgaggtggatgaggagctggacagcgccagcacagaggaggccatgcctgccctgctggaggacagcggcagcatctggcagcagagcttccctgccagcgcccacaaggaggatgcccacctgcggcccagggctggagctgcccgggcccggcccccaccagcccctcctggcatgttctcctacagaagagagggcggccagacagccagcgcccctcctggcccccggctgcgggccgccacagcccggagcctggcccacgcctctgtgtggggctgcctggccaccgtgtccacccacaagaagatccagggcctgccctttggaaactgcctgcctgtgtctgatggccccttcaacaacagcacaggcatccccttcttctacatgacagccaaggaccctgtggtggccgacctgatgaagaaccccatggccagcctgatgctgcctgagagcgagggggagttctgcaggaagaacatcgtggaccctgaggacccccgctgtgtgcagctgaccctgaccggccagatgattgctgtgtccccagaggaggtggagtttgccaagcaggccatgttcagccgccaccctggcatgaggaagtggccccggcagtatgagtggttcttcatgaagatgagaattgagcacatctggctgcagaagtggtatggaggagccagcagcatcagccgggaggagtacttcaaggctgtgcccaggaaggcctag

SEQ ID NO: 7141 - DNA, 2742 bp, synthetic construct
  misc_feature 1..2742: note = source = /note="Description of Artificial Sequence: Synthetic coding sequence"
  source 1..2742: mol_type = other DNA
atgggccctgaggccctgagcagcctgctgctgctgctgctggtggccagcggagatgctgacatgaagggccactttgatcctgccaagtgccgctatgccctgggcatgcaggacaggaccatcccagacagcgacatcagcgccagcagctcctggagcgacagcacagctgcccggcacagccggctggagagcagtgatggagatggagcctggtgcccagctggcagcgtcttccccaaggaggaggagtacctgcaggtggacctgcagaggctgcacctggtggccctggtgggcacccagggcagacatgctgggggcctgggcaaggagttcagccgcagctaccgcctgcgctacagcagagatggaagacgctggatgggctggaaggaccgctggggccaggaggtgatctctggaaatgaagatcctgagggcgtggtgctgaaggacctgggcccccccatggtggcccggctggtgcgcttctaccccagggctgacagagtgatgtctgtgtgcctgcgggtggagctgtatggctgcctgtggagagatggcctgctgagctacacagcccctgtgggccagaccatgtacctgtctgaggccgtgtacctgaatgacagcacctatgatggccacacagtgggcggcctgcagtatggaggcctgggccagctggctgatggagtggtgggcctggatgacttcaggaagagccaggagctgcgggtgtggccaggctatgactatgtgggctggagcaaccacagcttcagcagcggctacgtggagatggagtttgaatttgaccggctgcgggccttccaggccatgcaggtgcactgcaacaacatgcacaccctgggcgcccggctgcccggcggcgtggagtgccgcttccggcggggccctgccatggcctgggagggggagcccatgaggcacaacctgggcggcaacctgggggacccccgggcccgggctgtgtctgtgcccctgggcggccgggtggcccgcttcctgcagtgccgcttcctgtttgctggcccctggctgctcttcagcgagatctccttcatcagtgatgtggtgaacaacagcagccctgccctgggcggcaccttccccccagccccctggtggcccccaggccccccacccaccaacttcagcagcctggagctggagccccggggccagcagcctgtggccaaggccgagggcagccccacagccatcctgattggctgcctggtggccatcatcctgctgctgctgctgatcatcgccctgatgctgtggaggctgcactggaggcggctgctgagcaaggccgagcggcgggtgctggaggaggagctgactgtgcacctgtctgtgcctggggacaccatcctgatcaacaaccggcccggcccccgggagcccccaccctaccaggagccccggccccggggcaaccccccccacagcgccccctgtgtgcccaacggcagcgccctgctgctgagcaacccagcctaccgcctgctgctggccacctacgcccggcccccccggggccctggcccccccaccccagcctgggccaagcccaccaacacccaggcctacagcggggactacatggagcctgagaagccaggggcccccctgctgcccccaccaccccagaacagcgtgccccactacgccgaggccgacatcgtgaccctgcagggcgtgactggaggcaacacctatgctgtgcctgccctgcccccaggagctgtgggagatggccccccccgggtggacttccccaggagccggctgcgcttcaaggagaagctgggggagggccagtttggagaggtgcacctgtgtgaggtggacagcccccaggacctggtgtccctggacttccccctgaatgtgaggaagggccaccccctgctggtggccgtgaagatcctgcggccagatgccaccaagaatgccagaaatgacttcctgaaggaggtgaagatcatgagccggctgaaggaccccaacatcatccggctgctgggcgtgtgtgtgcaggatgaccccctgtgcatgatcacagactacatggagaatggagacctgaaccagttcctgagcgcccaccagctggaggacaaggctgctgagggcgcccctggagatggccaggccgcccagggccccaccatctcctaccccatgctgctgcacgtggccgcccagatcgccagcggcatgagatacctggccaccctgaactttgtgcaccgggacctggccaccaggaactgcctggtgggggagaacttcaccatcaagattgctgactttggcatgagcaggaacctgtatgctggggactactacagagtgcagggccgggctgtgctgcccatccgctggatggcctgggagtgcatcctgatgggcaagttcaccacagccagtgatgtgtgggcctttggagtgaccctgtgggaggtgctgatgctgtgccgggcccagcccttcggccagctgacagatgagcaggtgattgaaaatgctggggagttcttccgggaccagggccggcaggtgtacctgagccggcccccagcctgcccccagggcctgtatgagctgatgctgcgctgctggagccgggagagcgagcagaggcctcccttcagccagctgcaccgcttcctggctgaagatgccctgaacacagtgtag

SEQ ID NO: 7142 - DNA, 243 bp, synthetic construct
  misc_feature 1..243: note = source = /note="Description of Artificial Sequence: Synthetic coding sequence"
  source 1..243: mol_type = other DNA
atgaagctgagcggcatgttcctgctgctgagcctggccctcttctgcttcctgactggagtcttcagccagggcggccaggtggactgtggggagttccaggaccccaaggtgtactgcacccgggagagcaacccccactgcggcagtgatggccagacctacggcaacaagtgtgccttctgcaaggccatcgtgaagagcggcggcaagatcagcctgaagcaccctggaaaatgttag

SEQ ID NO: 7143 - DNA, 270 bp, synthetic construct
  misc_feature 1..270: note = source = /note="Description of Artificial Sequence: Synthetic coding sequence"
  source 1..270: mol_type = other DNA
atgaagccctggatcctgctgctggtgatgttcatctctggagtggtgatgctgctgcctgtgctgggcagcttctggaacaaggaccccttcctggacatgatccgggagacagagcagtgctgggtgcagcccccctacaagtactgtgagaagcgctgcaccaagatcatgacctgtgtgcggcccaaccacacctgctgctggacctactgcggcaacatctgcctggacaatgaggagcccctgaagtccatgctgaacccctag

SEQ ID NO: 7144 - DNA, 264 bp, synthetic construct
  misc_feature 1..264: note = source = /note="Description of Artificial Sequence: Synthetic coding sequence"
  source 1..264: mol_type = other DNA
atgctgccctgcctggccctgctgctgctgatggagctgtctgtgtgcaccgtggccggagatggaggagaggagcagaccctgagcacagaggccgagacctgggagggcgccggccccagcatccagctgcagctgcaggaggtgaagacaggcaaggccagccagttcttcggcctgatgggcaagagggtgggcggccggcccctcatccagcccaggaggaagaagggccgggaggatgaggcccagggcagcgagtag

SEQ ID NO: 7145 - DNA, 285 bp, synthetic construct
  misc_feature 1..285: note = source = /note="Description of Artificial Sequence: Synthetic coding sequence"
  source 1..285: mol_type = other DNA
atgcagcacagcctggtgttcttctttgctgtgatcctgcacctgagccacctgctgcacctggatgccagcatccaccccttccggctgcccttcagcagcaagcccttcctgctgatccccatgagcaacaccaccctgccccacacagcctggcccctgtccttcctgcaccagacagtgtccaccctgaaggctgtggccgtgacccacagcctgtggcacctgcagatccctgtggactgccaggcctgcaacaggaagagcaagaagatctactgctag

SEQ ID NO: 7146 - DNA, 327 bp, synthetic construct
  misc_feature 1..327: note = source = /note="Description of Artificial Sequence: Synthetic coding sequence"
  source 1..327: mol_type = other DNA
atgaggcagaggctgctgcccagcgtgaccagcctgctgctggtggccctgctcttccctggcagcagccaggcccggcacgtgaaccacagcgccacagaggccctgggggagctgcgggagcgggcccctggccagggcaccaacggcttccagctgctgcggcatgctgtgaagagggacctgctgccccccaggaccccaccctaccagggagatgtgcccctgggcatccggaacaccatctgcaggatgcagcagggcatctgccgcctcttcttctgccacagcggcaccggccagcagcaccggcagagatgtggctag

SEQ ID NO: 7147 - DNA, 807 bp, synthetic construct
  misc_feature 1..807: note = source = /note="Description of Artificial Sequence: Synthetic coding sequence"
  source 1..807: mol_type = other DNA
atgctgctgctggccgccgccttcctggtggcctttgtgctgctgctgtacatggtgagccccctcatcagccccaagcccctggccctgcccggggcccacgtggtggtgactggaggcagcagcggcatcggcaagtgcatcgccatcgagtgctacaagcagggcgccttcatcaccctggtggccagaaatgaagacaagctgctgcaggccaagaaggagattgagatgcacagcatcaatgacaagcaggtggtgctgtgcatctctgtggatgtgtcccaggactacaaccaggtggagaatgtcatcaagcaggcccaggagaagctgggccctgtggacatgctggtgaactgtgccggcatggctgtgtctgggaagtttgaggacctggaggtgtccacctttgaggtgaagccctacaacgtgtacatcaccgtggcctaccccccagacacagacaccccaggctttgctgaagaaaatagaaccaagcccctggagaccaggctcatcagcgagaccacctctgtgtgcaagccagagcaggtggccaagcagatcgtgaaggatgccatccagggcaacttcaacagcagcctgggcagtgatggctacatgctgagcgccctgacctgtggcatggcccctgtgaccagcatcacagagggcctgcagcaggtggtgaccatgggcctcttccgcaccatcgccctcttctacctgggcagctttgacagcatcgtgcggcgctgcatgatgcagcgggagaagtcagaaaatgctgacaagacagcctag

SEQ ID NO: 7148 - DNA, 1686 bp, synthetic construct
  misc_feature 1..1686: note = source = /note="Description of Artificial Sequence: Synthetic coding sequence"
  source 1..1686: mol_type = other DNA
atgcgctggatcctgtgctggagcctgaccctgtgcctgatggcccagacagccctgggcgccctgcacaccaagaggccccaggtggtgaccaagtatggcaccctgcagggcaagcagatgcacgtgggcaagacccccatccaggtgttcctgggcgtgcccttcagcaggcctcccctgggcatcctgcgctttgcccctcctgagcccccagagccctggaagggcatcagagatgccaccacctacccacctggctgcctgcaggagagctggggccagctggcctccatgtatgtgtccacccgggagcgctacaagtggctgcgcttcagcgaggactgcctgtacctgaatgtgtatgccccagcccgggcccctggggacccccagctgcctgtgatggtgtggttccctgggggcgccttcatcgtgggcgccgccagcagctatgagggcagtgacctggccgcccgggagaaggtggtgctggtgttcctgcagcaccggctgggcatcttcggcttcctgagcacagatgacagccacgcccggggcaactggggcctgctggaccagatggccgccctgcgctgggtgcaggagaacattgctgccttcggcggggaccctggaaatgtgaccctgtttggccagagcgctggggccatgagcatcagcggcctgatgatgagccccctggccagcggcctcttccaccgggccatcagccagagcggcacagccctcttccgcctcttcatcaccagcaaccccctgaaggtggccaagaaggtggcccacctggccggctgcaaccacaacagcacccagatcctggtgaactgcctgcgggccctgagcggcaccaaggtgatgagggtgagcaacaagatgaggttcctgcagctgaacttccagagggaccctgaggagatcatctggagcatgagccctgtggtggatggagtggtgatcccagatgaccccctggtgctgctgacccagggcaaggtgtcctctgtgccctacctgctgggcgtgaacaacctggagttcaactggctgctgccctacatcatgaagttccccctgaaccggcaggccatgaggaaggagaccatcaccaagatgctgtggagcaccaggaccctgctgaacatcaccaaggagcaggtgcccctggtggtggaggagtacctggacaacgtgaatgaacatgactggaagatgctgaggaacaggatgatggacatcgtgcaggatgccacctttgtgtatgccaccctgcagacagcccactaccacagagatgctggcctgcctgtgtacctgtatgaatttgagcaccacgcccggggcatcatcgtgaagcccaggacagatggagctgaccatggagatgagatgtacttcctgtttggaggcccctttgccaccggcctgtccatgggcaaggagaaggccctgagcctgcagatgatgaagtactgggccaactttgccaggactggaaaccccaatgatggcaacctgccctgctggccccgctacaacaaggatgagaagtacctgcagctggacttcaccaccagggtgggcatgaagctgaaggagaagaagatggccttctggatgagcctgtaccagagccagaggcctgagaagcagaggcagttctag

SEQ ID NO: 7149 - DNA, 444 bp, synthetic construct
  misc_feature 1..444: note = source = /note="Description of Artificial Sequence: Synthetic coding sequence"
  source 1..444: mol_type = other DNA
atggccagcagcctgaagatctggggcaccctgctggccctgctgtgcatcctgtgcaccctgctggtgcagagcaaggaggtgtcctggagggagttcatgaagcagcactacctgagccccagccgggagttccgggagtacaagtgtgatgtgctgatgagagaaaatgaggccctgaaggacaagagcagccacatgttcatctacatctcctggtacaagattgagcacatctgcaccagtgacaactggatggaccgcttcagaaatgcctacgtgtgggtgcagaaccccctgaaggtgctgaagtgccaccaggagaacagcaagaacagctacacagagagccgctccttcaactacatcgagttccactgcagcatggatggctacgtggacagcattgaggacctgaagatggtggagcccatcggcaactag

SEQ ID NO: 7150 - DNA, 444 bp, synthetic construct
  misc_feature 1..444: note = source = /note="Description of Artificial Sequence: Synthetic coding sequence"
  source 1..444: mol_type = other DNA
atgaccagcagcctgaagatctggggcatcctgctggccctgctgtgcatcctgtgccgcctgtgtgtgtacagcaacaacatctactggagggagttcatcaagctgcactacctgagccccagccgggagttcaaggagtacaagtgtgatgtgctgatgagggagaaggaggccctgaagggcaagagcttccacatgttcatctacagcctgtggttcaagatccagagggcctgcatcaatgagaagggcagtgaccgctacagaaatgcctacgtgtgggcccctggggccctgaaggtgctggagtgccactgggagaagtacaacaaccgctacacagagagccgctccttctcctacatcgagttccactgcggcgtggatggctacgtggacaacatcgaggacctgcgcatcatcgagcccatcagcaactag

SEQ ID NO: 7151 - DNA, 1248 bp, synthetic construct
  misc_feature 1..1248: note = source = /note="Description of Artificial Sequence: Synthetic coding sequence"
  source 1..1248: mol_type = other DNA
atgagccccttcctgtacctggtgctgctggtgctgggcctgcacgccaccatccactgtgccagccctgagggcaaggtgacagcctgccacagcagccagcccaatgccaccctgtacaagatgagcagcatcaatgctgactttgccttcaacctgtaccgccgcttcaccgtggagaccccagacaagaacatcttcttcagccctgtgtccatctctgctgccctggtgatgctgagctttggagcctgctgcagcacccagacagagatcgtggagaccctgggcttcaacctgacagacacccccatggtggagatccagcacggcttccagcacctgatctgcagcctgaacttccccaagaaggagctggagctgcagattggaaatgccctcttcatcggcaagcacctgaagcccctggccaagttcctgaatgatgtgaagaccctgtatgaaacagaggtgttcagcacagacttcagcaacatctctgctgccaagcaggagatcaacagccacgtggagatgcagaccaagggcaaggtggtgggcctcatccaggacctgaagcccaacaccatcatggtgctggtgaactacatccacttcaaggcccagtgggccaacccctttgaccccagcaagacagaggacagcagcagcttcctgattgacaagaccaccaccgtgcaggtgcccatgatgcaccagatggagcagtactaccacctggtggacatggagctgaactgcaccgtgctgcagatggactacagcaagaatgccctggccctgtttgtgctgcccaaggagggccagatggagagcgtggaggccgccatgagcagcaagaccctgaagaagtggaaccggctgctgcagaagggctgggtggacctgtttgtgcccaagttcagcatcagcgccacctatgacctgggcgccaccctgctgaagatgggcatccagcacgcctacagtgaaaatgctgacttcagcggcctgacagaggacaatggcctgaagctgagcaatgctgcccacaaggctgtgctgcacatcggggagaagggcacagaggccgctgctgtgcctgaggtggagctgagtgaccagcctgagaacaccttcctgcaccccatcatccagattgacaggagcttcatgctgctgatcctggagaggagcaccaggagcatcctcttcctgggcaaggtggtgaaccccacagaggcctag

SEQ ID NO: 7152 - DNA, 285 bp, synthetic construct
  misc_feature 1..285: note = source = /note="Description of Artificial Sequence: Synthetic coding sequence"
  source 1..285: mol_type = other DNA
atgaggaccctggccatcctggccgccatcctgctggtggccctgcaggcccaggccgagcccctgcaggcccgggcagatgaggtggccgccgcccctgagcagattgctgctgacatccctgaggtggtggtgtccctggcctgggatgagagcctggcccccaagcaccctggcagcaggaagaacatggactgctactgccgcatcccagcctgcatcgccggggagcggcgctatggcacctgcatctaccagggccgcctgtgggccttctgctgctag

SEQ ID NO: 7153 - DNA, 1062 bp, synthetic construct
  misc_feature 1..1062: note = source = /note="Description of Artificial Sequence: Synthetic coding sequence"
  source 1..1062: mol_type = other DNA
atgaggctgcccaggagagctgccctgggcctgctgcccctgctgctgctgctgcccccagcccctgaggccgccaagaagcccaccccctgccaccgctgccggggcctggtggacaagttcaaccagggcatggtggacacagccaagaagaactttggaggcggcaacacagcctgggaggagaagaccctgagcaaatatgagagcagcgagatccggctgctggagatcctggagggcctgtgtgagagcagtgactttgagtgcaaccagatgctggaggcccaggaggagcacctggaggcctggtggctgcagctgaagtctgagtacccagacctgtttgagtggttctgtgtgaagaccctgaaggtgtgctgcagccctggcacctacggccctgactgcctggcctgccagggcggcagccagaggccctgcagcggaaatggccactgcagcggagatggcagccggcagggagatggcagctgccgctgccacatgggctaccagggccccctgtgcacagactgcatggatggctacttcagcagcctgagaaatgagacccacagcatctgcacagcctgtgatgagagctgcaagacctgcagcggcctgaccaacagagactgtggggagtgtgaggtgggctgggtgctggatgagggcgcctgtgtggatgtggatgaatgtgccgctgagcccccaccctgcagcgctgcccagttctgcaagaatgccaacggcagctacacctgtgaggagtgtgacagcagctgtgtgggctgcacaggagagggccctggcaactgcaaggagtgcatcagcggctacgcccgggagcacggccagtgtgctgatgtggatgaatgttccctggccgagaagacctgtgtgaggaagaatgaaaactgctacaacaccccaggcagctatgtgtgtgtgtgcccagatggctttgaggagacagaagatgcctgtgtgcccccagctgaggccgaggccacagaaggagagagccccacccagctgcccagccgggaggacctgtag

SEQ ID NO: 7154 - DNA, 651 bp, synthetic construct
  misc_feature 1..651: note = source = /note="Description of Artificial Sequence: Synthetic coding sequence"
  source 1..651: mol_type = other DNA
atgaagctgaacctggtgcagatcttcttcatgctgctgatgctgctgctgggcctgggcatgggcctgggcctgggcctgcacatggccacagctgtgctggaggagagtgaccagcccctgaatgagttctggagcagtgacagccaggacaaggccgaggccacagaggagggagatggcacccagaccacagagaccctggtgctgagcaacaaggaggtggtgcagcccggctggccagaggaccccatcctgggggaggatgaggtgggcggcaacaagatgctgcgggccagcgccctcttccagagcaacaaggactacctgcggctggaccagacagaccgggagtgcaatgacatgatggcccacaagatgaaggagcccagccagagctgcatcgcccagtatgccttcatccacgaggacctgaacacagtgaaggctgtgtgcaacagccctgtgattgcctgtgagctgaagggcggcaagtgccacaagagcagccggccctttgacctgaccctgtgtgagctgagccagcctgaccaggtgacccccaactgcaactacctgaccagcgtcatcaagaagcacatcatcatcacctgcaatgacatgaagaggcagctgcccaccggccagtag

SEQ ID NO: 7155 - DNA, 222 bp, synthetic construct
  misc_feature 1..222: note = source = /note="Description of Artificial Sequence: Synthetic coding sequence"
  source 1..222: mol_type = other DNA
atgagaattgctgtgctgctgtttgccatcttcttcttcatgagccaggtgctgcctgcccggggcaagttcaaggagatctgtgagcggcccaacggcagctgccgggacttctgcctggagacagagatccacgtgggccgctgcctgaacagccagccctgctgcctgcccctgggccaccagcccagaattgagagcaccacccccaagaaggactag

SEQ ID NO: 7156 - DNA, 609 bp, synthetic construct
  misc_feature 1..609: note = source = /note="Description of Artificial Sequence: Synthetic coding sequence"
  source 1..609: mol_type = other DNA
atggagagaggagctggggccaagctgctgcccctgctgctgctgctgcgggccaccggcttcacctgtgcccagacagatggaagaaatggctacacagctgtgattgaggtgaccagcggcggcccctggggagactgggcctggccagagatgtgcccagatggcttctttgccagcggcttcagcctgaaggtggagcccccccagggcatccctggagatgacacagccctgaatggcatccggctgcactgtgcccggggaaatgtgctgggcaacacccacgtggtggagagccagagcggctcctggggcgagtggagcgagcccctgtggtgccggggcggggcctacctggtggccttcagcctgcgggtggaggcccccaccaccctgggggacaacacagctgccaacaacgtgcgcttccgctgcagtgatggagaggagctgcagggccctggcctgtcctggggagactttggagactggagcgaccactgccccaagggggcctgtggcctgcagaccaagatccagggcccccggggcctgggagatgacacagccctgaatgatgcccggctcttctgctgccgctcctag

SEQ ID NO: 7157 - DNA, 759 bp, synthetic construct
  misc_feature 1..759: note = source = /note="Description of Artificial Sequence: Synthetic coding sequence"
  source 1..759: mol_type = other DNA
atgcagctgacccgctgctgctttgtgttcctggtgcagggcagcctgtacctggtgatctgtggccaggatgatggccccccaggctctgaagatcctgagagagatgaccacgagggccagccccggccccgggtgcccaggaagaggggccacatcagccccaagagccggcccatggccaacagcaccctgctgggcctgctggcccctcctggagaggcctggggcatcctgggccagccccccaaccggcccaaccacagccccccaccttctgccaaggtgaagaagatcttcggctggggagacttctacagcaacatcaagacagtggccctgaacctgctggtgacaggcaagatcgtggaccatggaaatggcaccttctctgtgcacttccagcacaatgccaccggccagggcaacatcagcatcagcctggtgccccccagcaaggctgtggagttccaccaggagcagcagatcttcatcgaggccaaggccagcaagatcttcaactgcaggatggagtgggagaaggtggagcggggccgccgcaccagcctgtgcacccatgaccctgccaagatctgcagccgggaccacgcccagagcagcgccacctggagctgcagccagcccttcaaggtggtgtgtgtgtacatcgccttctacagcacagactaccgcctggtgcagaaggtgtgcccagactacaactaccacagcgacaccccctactaccccagcggctag

SEQ ID NO: 7158 - DNA, 555 bp, synthetic construct
  misc_feature 1..555: note = source = /note="Description of Artificial Sequence: Synthetic coding sequence"
  source 1..555: mol_type = other DNA
atgaagatcctggtggccttcctggtggtgctgaccatcttcggcatccagagccacggctatgaggtgttcaacatcatcagccccagcaacaacggcggcaatgtgcaggagaccgtgaccatcgacaatgagaagaacacagccatcatcaacatccatgctggcagctgcagcagcaccaccatctttgactacaagcacggctacatcgccagccgggtgctgagccggcgggcctgcttcatcctgaagatggaccaccagaacatcccccccctgaacaacctgcagtggtacatctatgagaagcaggccctggacaacatgttcagcagcaagtacacctgggtgaagtacaaccccctggagagcctcatcaaggatgtggactggttcctgctgggcagccccatcgagaagctgtgcaagcacatccccctgtacaagggggaggtggtggagaacacccacaacgtgggcgctgggggctgtgccaaggccggcctgctgggcatcctgggcatcagcatctgtgccgacatccacgtgtag

SEQ ID NO: 7159 - DNA, 651 bp, synthetic construct
  misc_feature 1..651: note = source = /note="Description of Artificial Sequence: Synthetic coding sequence"
  source 1..651: mol_type = other DNA
atgggcgctgtgatgggcaccttcagcagcctgcagaccaagcagaggcggcccagcaaggacaagattgaagatgagctggagatgaccatggtgtgccacaggcctgagggcctggagcagctggaggcccagaccaacttcaccaagcgggagctgcaggtgctgtaccggggcttcaagaatgaatgtcccagcggcgtggtgaatgaagacaccttcaagcagatctatgcccagttcttcccccatggagatgccagcacctacgcccactacctgttcaatgcctttgacaccacccagacaggctctgtgaagtttgaagattttgtgacagccctgagcatcctgctgcggggcaccgtgcatgagaagctgcgctggaccttcaacctgtatgacatcaacaaggatggctacatcaacaaggaggagatgatggacatcgtgaaggccatctatgacatgatgggcaagtacacctaccctgtgctgaaggaggacaccccccggcagcacgtggatgtgttcttccagaagatggacaagaacaaggatggcatcgtgaccctggatgagttcctggagagctgccaggaggatgacaacatcatgaggagcctgcagctgttccagaatgtgatgtag

SEQ ID NO: 7160 - DNA, 2736 bp, synthetic construct
  misc_feature 1..2736: note = source = /note="Description of Artificial Sequence: Synthetic coding sequence"
  source 1..2736: mol_type = other DNA
atggcccagctgttcctgcccctgctggccgccctggtgctggcccaggccccagctgccctggctgatgtgctggagggggacagcagtgaagatcgggccttccgggtgagaattgctggagatgcccccctgcagggcgtgctgggcggggccctgaccatcccctgccacgtgcactacctgcggcccccacccagccggcgggctgtgctgggcagcccccgggtgaagtggaccttcctgagccggggccgggaggccgaggtgctggtggcccggggcgtgcgggtgaaggtgaatgaggcctaccgcttccgggtggccctgcctgcctacccagccagcctgacagatgtgtccctggccctgtctgagctgcggcccaatgacagcggcatctaccgctgtgaggtgcagcacggcattgatgacagcagtgatgctgtggaggtgaaggtgaagggcgtggtgttcctgtaccgggagggcagcgcccgctatgccttctccttcagcggggcccaggaggcctgtgcccgcatcggggcccacatcgccaccccagagcagctgtatgctgcctacctgggcggctatgagcagtgtgatgctggctggctgagtgaccagacagtgcgctaccccatccagaccccccgggaggcctgctatggagacatggatggcttccctggggtgagaaattatggagtggtggaccctgatgacctgtatgatgtgtactgctacgccgaggacctgaatggagagctgttcctgggggaccccccagagaagctgaccctggaggaggcccgggcctactgccaggagagaggagctgagatcgccaccaccggccagctgtatgctgcctgggatggcggcctggaccactgcagccctggctggctggctgatggctctgtgcgctaccccatcgtgacccccagccagagatgtggcggcggcctgcccggggtgaagaccctcttcctgttccccaaccagacaggcttccccaacaagcacagccgcttcaacgtgtactgcttccgggacagcgcccagcccagcgccatccctgaggccagcaacccagccagcaacccagccagtgatggcctggaggccatcgtgacagtgacagagaccctggaggagctgcagctgccccaggaggccacagaaagtgagagcagaggagccatctacagcatccccatcatggaggatggcggcggcggcagcagcaccccagaggaccctgctgaggcccccaggaccctgctggagtttgagacccagagcatggtgcccccaacaggcttcagcgaggaggagggcaaggccctggaggaggaggagaagtatgaagatgaggaggagaaggaggaggaggaggaggaggaggaggtggaggatgaggccctgtgggcctggcccagcgagctgagcagccctggccctgaggccagcctgcccacagagcctgctgcccaggaggagagcctgagccaggccccagcccgggctgtgctgcagcccggggccagccccctgcctgatggagagagcgaggccagccggcccccccgggtgcacggccccccaacagagaccctgcccaccccccgggagaggaacctggccagccccagccccagcaccctggtggaggcccgggaggtgggggaggccactggaggccctgagctgtctggagtgcccagaggagagagcgaggagaccggcagcagcgagggcgcccccagcctgctgcctgccacccgggcccctgagggcacccgggagctggaggcccccagcgaggacaacagcggccgcacagccccagctggcacctctgtgcaggcccagcctgtgctgcccacagattctgccagcagaggaggagtggccgtggtgcctgccagcggggactgtgtgcccagcccctgccacaatggaggcacctgcctggaggaggaggagggcgtgcgctgcctgtgcctgcccggctacggcggggacctgtgtgatgtgggcctgcgcttctgcaaccctggctgggatgccttccagggcgcctgctacaagcacttcagcacccggcgctcctgggaggaggccgagacccagtgcaggatgtatggagcccacctggccagcatcagcaccccagaggagcaggacttcatcaacaaccgctaccgggagtaccagtggattggcctgaatgacaggaccatcgagggggacttcctgtggagcgatggagtgcccctgctgtatgagaactggaaccctggccagcctgacagctacttcctgagcggggagaactgtgtggtgatggtgtggcatgaccagggccagtggagcgatgtgccctgcaactaccacctgagctacacctgcaagatgggcctggtgtcctgtggccccccacctgagctgcccctggcccaggtgtttggccggccccggctgcgctatgaggtggacacagtgctgcgctaccgctgccgggagggcctggcccagaggaacctgcccctcatccgctgccaggagaatggccgctgggaggccccccagatcagctgtgtgccccggcggcctgcccgggccctgcaccctgaggaggaccctgagggccggcagggccgcctgctgggccgctggaaggccctgctgatcccccccagcagccccatgcctggcccctag

SEQ ID NO: 7161 - DNA, 852 bp, synthetic construct
  misc_feature 1..852: note = source = /note="Description of Artificial Sequence: Synthetic coding sequence"
  source 1..852: mol_type = other DNA
atgggcctgggcctgcggggctggggccggcccctgctgactgtggccacagccctgatgctgcctgtgaagcccccagctggctcctggggcgcccagatcattggaggccacgaggtgaccccccacagccggccctacatggcctctgtgcgctttggaggccagcaccactgcggcggcttcctgctgcgggcccgctgggtggtgtctgctgcccactgcttcagccaccgggacctgaggacaggcctggtggtgctgggcgcccacgtgctgagcacagctgagcccacccagcaggtgtttggaattgatgccctgaccacccacccagactaccaccccatgacccacgccaatgacatctgcctgctgcggctgaatggatctgctgtgctgggccctgctgtgggcctgctgcggcccccaggccggcgggcccggcccccaacagctggcacccgctgccgggtggccggctggggctttgtgtctgactttgaggagctgcccccaggcctgatggaggccaaggtgcgggtgctggaccctgatgtgtgcaacagctcctggaagggccacctgaccctgaccatgctgtgcaccaggtctggggacagccaccggcggggcttctgcagcgctgacagcggcggccccctggtgtgcaggaacagagcccacggcctggtgtccttcagcggcctgtggtgtggggaccccaagaccccagatgtgtacacccaggtgtctgcctttgtggcctggatctgggatgtggtgagaagaagcagcccccagcccggccccctgcccggcaccacccggcccccaggagaggccgcctag

SEQ ID NO: 7162 - DNA, 1209 bp, synthetic construct
  misc_feature 1..1209: note = source = /note="Description of Artificial Sequence: Synthetic coding sequence"
  source 1..1209: mol_type = other DNA
atgatggtggccctgcggggggccagcgccctgctggtgctcttcctggccgccttcctgcccccaccccagtgcacccaggaccctgccatggtgcactacatctaccagcgcttccgggtgctggagcagggcctggagaagtgcacccaggccacccgggcctacatccaggagttccaggagttcagcaagaacatctctgtgatgctgggccgctgccagacctacaccagcgagtacaagtctgctgtgggcaacctggccctgcgggtggagcgggcccagcgggagattgactacatccagtacctgcgggaggctgatgagtgcatcgagagcgaggacaagaccctggccgagatgctgctgcaggaggccgaggaggagaagaagatccgcaccctgctgaatgccagctgtgacaacatgctgatgggcatcaagagcctgaagatcgtgaagaagatgatggacacccacggctcctggatgaaggatgctgtgtacaacagccccaaggtgtacctgctgattggcagcaggaacaacacagtgtgggagtttgccaacatccgggccttcatggaggacaacaccaagccagcccccaggaagcagatcctgaccctgtcctggcagggcaccggccaggtgatctacaagggcttcctgttcttccacaaccaggccaccagcaatgagatcatcaagtacaacctgcagaagaggacagtggaggacaggatgctgctgcctggaggagtgggccgggccctggtgtaccagcacagccccagcacctacatcgacctggccgtggatgaacatggcctgtgggccatccacagcggccctggcacccacagccacctggtgctgaccaagattgagcccggcaccctgggcgtggagcacagctgggacaccccctgccgcagccaggatgctgaggccagcttcctgctgtgtggggtgctgtatgtggtgtacagcactggaggccagggcccccaccgcatcacctgcatctatgaccccctgggcaccatcagcgaggaggacctgcccaacctcttcttccccaagaggcccaggagccacagcatgatccactacaacccccgggacaagcagctgtatgcctggaatgaaggcaaccagatcatctacaagctgcagaccaagaggaagctgcccctgaagtag

SEQ ID NO: 7163 - DNA, 1221 bp, synthetic construct
  misc_feature 1..1221: note = source = /note="Description of Artificial Sequence: Synthetic coding sequence"
  source 1..1221: mol_type = other DNA
atgcagctgttcctgctgctgtgcctggtgctgctgagcccccagggcgccagcctgcaccgccaccacccccgggagatgaagaagagggtggaggacctgcacgtgggcgccaccgtggcccccagcagcagaagagacttcacctttgacctgtaccgggccctggccagcgctgcccccagccagagcatcttcttcagccctgtgtccatctccatgagcctggccatgctgagcctgggcgccggcagcagcaccaagatgcagatcctggagggcctgggcctgaacctgcagaagagcagcgagaaggagctgcaccggggcttccagcagctgctgcaggagctgaaccagcccagagatggcttccagctgagcctgggcaatgccctcttcacagacctggtggtggacctgcaggacacctttgtgtctgccatgaagaccctgtacctggccgacaccttccccaccaacttccgggacagcgctggggccatgaagcagatcaatgactatgtggccaagcagaccaagggcaagatcgtggacctgctgaagaacctggacagcaatgctgtggtgatcatggtgaactacatcttcttcaaggccaagtgggagaccagcttcaaccacaagggcacccaggagcaggacttctacgtgaccagcgagaccgtggtgcgggtgcccatgatgagccgggaggaccagtaccactacctgctggacaggaacctgagctgccgggtggtgggcgtgccctaccagggcaatgccacagccctcttcatcctgcccagcgagggcaagatgcagcaggtggagaatggcctgtctgagaagaccctgaggaagtggctgaagatgttcaagaagaggcagctggagctgtacctgcccaagttcagcattgagggcagctaccagctggagaaggtgctgcccagcctgggcatcagcaatgtgttcaccagccatgctgacctgagcggcatcagcaaccacagcaacatccaggtgtctgagatggtgcacaaggctgtggtggaggtggatgagagcggcaccagggctgctgctgccaccggcaccatcttcaccttccgcagcgcccggctgaacagccagaggctggtgttcaaccggcccttcctgatgttcatcgtggacaacaacatcctcttcctgggcaaggtgaaccggccctag

SEQ ID NO: 7164 - DNA, 1626 bp, synthetic construct
  misc_feature 1..1626: note = source = /note="Description of Artificial Sequence: Synthetic coding sequence"
  source 1..1626: mol_type = other DNA
atgaggctgagccccttccacctgcagctggagttccacatgaaggagaagcgggaggacctgcagatctcctggagcttcatctctgtgcctgagatggctgtgaacatccagcccaaggccctgggggaggaccaggtggccgagaccagcgccatgtctgatgtgctgaaggacatcctgaagcacctggccggcagcgccagccccagcgtggtgctgatcaccaagcccaccaccgtgaaggaggcccagaacctgcagtgtgccgccagcacagcccaggagagctgcccccccaagccaccccgggcccacgagctgaagctgctggtgaggaacatccacgtgctgctgctgtctgagcccggggccagcggccacatcaatgctgtgtgtgtggtgcagctgaatgaccctgtgcagcgcttcagcagcaccctgaccaagaacaccccagacctgatgtgggaggaggagttcacctttgagctgaatgccaagagcaaggagctgcacctgcagatcagcgaggccggccgcagcagcgagggcctgctggccacagccaccgtgcccctggacctcttcaagaagcagcccagcggcccccagagcttcaccctgaccagcggcagcgcctgtggcagctctgtgctgggctctgtgacagctgagttctcctacatggagcccggggagctgaagtcctggcccatccccccacctgtgcctgctgccaagattgagaaggacagaacagtgatgccctgtggcaccgtggtgaccaccgtgacagctgtgaagaccaagccccgggtggatgtgggccgggccagccccctgagcagtgacagccctgtgaagacccccatcaaggtgaaggtgattgagaaggacatctctgtgcaggccatcgcctgccgcagcgcccctgtgtccaagaccctgagcagcagtgacacagagctgctggtgctgaatggaagtgaccctgtggccgaggtggccatccggcagctgtctgagagcagcaagctgaagctgaagagccccaggaagaagagcaccatcatcatcagcggcatcagcaagaccagcctgagccaggaccatgatgctgccctgatgcagggctacacagcctctgtggacagcacccaccaggaggatgcccccagccaccctgagagagctgctgccagcgcccctcctgaggaggccgagagcgcccaggccagcctggcccccaagccccaggaggatgagctggacagctgggacctggagaaggagccccaggccgccgcctggagcagccaggtgctgctggaccctgatggagatgagctgtctgagagctccatgtctgtgctggagcctggaacagccaagaagcacaagggcggcatcctgaggaagggggccaagctgttcttcagaagaagacaccagcagaaggaccccggcatgagccagagccacaatgacctggtgttcctggagcagcctgagggcagcaggaggaagggcatcaccctgacccgcatcctgaacaagaagctgctgagccgccacaggaacaagaacaccatgaatggagcccctgtggagccctgcacctag

SEQ ID NO: 7165 - DNA, 993 bp, synthetic construct
  misc_feature 1..993: note = source = /note="Description of Artificial Sequence: Synthetic coding sequence"
  source 1..993: mol_type = other DNA
atggccttcctgcccagctgggtgtgtgtgctggtgggcagcttcagcgccagcctggccggcaccagcaacctgtctgaaacagagccccccctgtggaaggagagccctggccagctgagtgactacagagtggagaacagcatgtacatcatcaacccctgggtgtacctggagaggatgggcatgtacaagatcatcctgaaccagacagcccgctactttgccaagtttgccccagacaatgagcagaacatcctgtggggcctgcccctgcagtatggctggcagtacagaacaggccgcctggccgaccccaccaggaggaccaactgtggctatgagagcggggaccacatgtgcatctctgtggacagctggtgggccgacctgaactacttcctgagcagcctgcccttcctggccgctgtggacagcggcgtgatgggcatcagcagtgaccaggtgcggctgctgcccccacccaagaatgaaaggaagttctgctatgatgtgagcagctgccgcagcagcttccctgagaccatgaacaagtggaacaccttctaccagtacctgcagagccccttcagcaagtttgatgacctgctgaagtacctgtgggccgcccacaccagcaccctggccgacaacatcaagagctttgaagatagatatgactactacagcaaggccgaggcccactttgagaggtcctgggtgctggccgtggaccacctggccgctgtgctcttccccaccaccctcatccgcagctacaagttccagaagggcatgccaccccgcatcctgctgaacacagatgtggcccccttcatcagtgacttcaccgccttccagaatgtggtgctggtgctgctgaacatgctggacaacgtggacaagagcatcggctacctgtgcacagagaagagcaatgtgtacagagaccacagcgagagcagcagccgctcctatggcaacaacagctag

SEQ ID NO: 7166 - DNA, 813 bp, synthetic construct
  misc_feature 1..813: note = source = /note="Description of Artificial Sequence: Synthetic coding sequence"
  source 1..813: mol_type = other DNA
atggacagcctggagtggaactgggccctggtgtatgagctgtctggagagcaccatgatgaggagtggagcgtgaagacctaccaggaggtggcccagaagtttgtggagacccaccctgagttcatcggcatcaagatcatctacagcgaccacaggagcaaggatgtggccgtgattgctgagagcatccgcatggccatgggcctgcgcatcaagttccccaccgtggtggccggctttgacctggtgggccacgaggacaccggccacagcctgcatgactacaaggaggccctgatgatcccagccaaggatggagtgaagctgccctacttcttccacgccggggagacagactggcagggcaccagcattgacaggaacatcctggatgccctgatgctgaacaccaccagaattggacatggctttgccctgagcaagcaccctgctgtgaggacctacagctggaagaaggacatccccatcgaggtgtgccccatcagcaaccaggtgctgaagctggtgtctgacctgaggaaccaccctgtggccaccctgatggccaccggccaccccatggtgatcagcagtgatgatcctgccatgtttggagccaagggcctgtcctatgacttctatgaggtgttcatgggcattggaggcatgaaggctgacctgcggaccctgaagcagctggccatgaacagcatcaagtacagcaccctgctggagagcgagaagaacaccttcatggagatctggaagaagcgctgggacaagttcatcgcagatgtggccaccaagtag

SEQ ID NO: 7167 - DNA, 939 bp, synthetic construct
  misc_feature 1..939: note = source = /note="Description of Artificial Sequence: Synthetic coding sequence"
  source 1..939: mol_type = other DNA
atgggcgtgatggccatgctgatgctgcccctgctgctgctgggcatcagcggcctgctcttcatctaccaggaggtgtcccggctgtggagcaagtctgctgtgcagaacaaggtggtggtgatcacagatgccatcagcggcctgggcaaggaatgtgcccgggtcttccacactggaggagcccggctggtgctgtgtgggaagaactgggagcggctggagaacctgtatgatgccctgatctctgtggccgaccccagcaagcagaccttcacccccaagctggtgctgctggacctgagtgacatcagctgtgtgcctgatgtggccaaggaggtgctggactgctacggctgtgtggacatcctgatcaacaatgcctctgtgaaggtgaagggccctgcccacaagatcagcctggagctggacaagaagatcatggatgccaactacttcggccccatcaccctgaccaaggccctgctgcccaacatgatcagcagaagaacaggccagatcgtgctggtgaacaacatccagggcaagtttggcatccccttccgcaccacctatgctgccagcaagcacgccgccctgggcttctttgactgcctgcgggcagaggtggaggagtatgatgtggtgatcagcacagtgagccccaccttcatccgcagctaccacgtgtacccagagcagggcaactgggaggccagcatctggaagttcttcttcaggaagctgacctatggagtgcaccctgtggaggtggccgaggaggtgatgaggacagtgcggaggaagaagcaggaggtgttcatggccaaccccatccccaaggctgctgtgtatgtgaggaccttcttccctgagttcttctttgctgtggtggcctgtggggtgaaggagaagctgaatgtgcctgaggagggctag

SEQ ID NO: 7168 - DNA, 738 bp, synthetic construct
  misc_feature 1..738: note = source = /note="Description of Artificial Sequence: Synthetic coding sequence"
  source 1..738: mol_type = other DNA
atggccagcacagccctgctggccctgtgcagcactggagccttcagcggcctggccgtggaggccggggccggcgtgtgccacgccacccccatctatgccggccacagctggcaccaggccaccttccggctgaatgtggccggcagcaccctgagccgctacctgcgggacctgctggtggccgccaacccagacctgctgcagcaggccctgcccaggaaggccatcacccacctgaagaagaggagctgctacgtgtccctggactttgaaggagacctgcgggaccctgcccggcaccacccagccagcttctctgtgggcaatggctgctgcgtgtgcctgagcagcgagcgcttccgctgcccagagcccatcttccagcccggcctgctgggccaggccgagcagggcctgcctgccctggccttccgggccctgcagaagatgcccaagaccctgcggacccggctggccgacacagtggtgctggccggcggcagcaccctcttccctggctttgctgagcggctggacaaggagctggaggcccagtgccgccgccacggctatgctgccctgcggccccacctggtggccaagcacggccggggcatggctgtgtggacaggaggctccatggtggccagcctgcacagcttccagaggcgctggatcacccgggccatgtaccaggagtgtggcagccggctgctgtatgatgtgttcaactag

SEQ ID NO: 7169 - DNA, 909 bp, synthetic construct
  misc_feature 1..909: note = source = /note="Description of Artificial Sequence: Synthetic coding sequence"
  source 1..909: mol_type = other DNA
atgaggcgctgggcctgggccgctgtggtggtgctgctgggcccccagctggtgctgctgggcggcgtgggcgcccggcgggaggcccagaggacccagcagcccggccagagagctgaccccccaaatgccacagccagcgccagcagccgggagggcctgcctgaggcccccaagcccagccaggccagcggccctgagttcagtgatgcccacatgacctggctgaactttgtgcggcggccagatgatggagccctgaggaagagatgtggcagccgggacaagaagccccgggacctgtttggccccccaggccccccaggagctgaggtgacagctgagaccctgctgcacgagttccaggagctgctgaaggaggccacagaaagacgcttcagcggcctgctggaccccctgctgccccagggcgccggcctgcggctggtgggggaggccttccactgccgcctgcagggcccccggcgggtggacaagaggaccctggtggagctgcacggcttccaggccccagctgcccagggcgccttcctgcggggcagcggcctgagcctggccagcggccgcttcaccgcccctgtgtctggcatcttccagttcagcgccagcctgcacgtggaccacagcgagctgcagggcaaggcccggctgcgggccagagatgtggtgtgtgtgctgatctgcatcgagagcctgtgccagaggcacacctgcctggaggccgtgtctggcctggagagcaacagcagggtcttcaccctgcaggtgcagggcctgctgcagctgcaggccggccagtatgcctctgtgtttgtggacaatggaagtggagctgtgctgaccatccaggccggcagcagcttcagcggcctgctgctgggcacctag

SEQ ID NO: 7170 - DNA, 1416 bp, synthetic construct
  misc_feature 1..1416: note = source = /note="Description of Artificial Sequence: Synthetic coding sequence"
  source 1..1416: mol_type = other DNA
atggattctgcccccctcttcccccggccccacctgttccagaacctgctgctcttcctgtgggccctgctgaactgtggcctgggcgtgtctgcccagggccctggagagtggaccccctgggtgtcctggacccgctgcagcagcagctgtggccggggcgtgtctgtgcgcagccgccgctgcctgcggctgcccggggaggagccctgctggggagacagccatgagtaccgcctgtgccagctgcctgactgccccccaggagctgtgcccttccgggacctgcagtgtgccctgtacaacggccggcctgtgctgggcacccagaagacctaccagtgggtgcccttccatggagcccccaaccagtgtgacctgaactgcctggccgagggccacgccttctaccacagctttggccgggtgctggatggaacagcctgcagccctggggcccagggcgtgtgtgtggccggccgctgcctgtctgctggctgtgatggcctgctgggcagcggggccctggaggacagatgtggccgctgtggcggggccaatgacagctgcctgtttgtgcagagggtcttcagagatgctggggcctttgctggctactggaatgtgaccctcatccctgagggcgcccggcacatccgggtggagcacaggagcaggaaccacctggccctgatgggaggagatggccgctacgtgctgaatggccactgggtggtgagccccccaggcacctatgaggccgccggcacccacgtggtgtacacccgggacaccggcccccaggagaccctgcaggccgccggccccaccagccatgacctgctgctgcaggtgctgctgcaggagcccaaccctggcatcgagtttgagttctggctgccccgggagcgctacagccccttccaggcccgggtgcaggccctgggctggcccctgcggcagccccagccccggggcgtggagccccagcccccagctgccccagctgtgaccccagcccagacccccaccctggccccagacccctgccccccctgcccagacacccggggccgggcccaccggctgctgcactactgcggcagtgactttgtgttccaggcccgggtgctgggccaccaccaccaggcccaggagaccaggtatgaggtgcgcatccagctggtgtacaagaacagaagccccctgcgggcccgggagtatgtgtgggcccctggccactgcccctgccccatgctggccccccaccgggactacctgatggctgtgcagaggctggtgtccccagatggcacccaggaccagctgctgctgccccacgccggctacgcccggccctggagccctgctgaggacagccgcatccggctgacagcccggcgctgccccggctag

SEQ ID NO: 7171 - DNA, 222 bp, synthetic construct
  misc_feature 1..222: note = source = /note="Description of Artificial Sequence: Synthetic coding sequence"
  source 1..222: mol_type = other DNA
atggccccccagaccctgctgctggtgctggtgctgtgtgtgctgctgctgcaggcccagggcggctacagagacaagatgaggatgcagaggatcaaggtgtgtgagaagaggcccagcattgacctgtgcatccaccactgcagctacttccagaagtgtgagaccaacaagatctgctgcagcgccttctgtggcaacatctgcatgagcatcctgtag

SEQ ID NO: 7172 - DNA, 2349 bp, synthetic construct
  misc_feature 1..2349: note = source = /note="Description of Artificial Sequence: Synthetic coding sequence"
  source 1..2349: mol_type = other DNA
atggcccgggcccgggccggggccctgctggccctgtgggtgctgggcgccgccgcccacccccagtgcctggacttccggccccccttccggcccacccagcccctgcggctgtgtgcccagtacagcgactttggctgctgtgatgagggcagagatgctgagctgacccggcgcttctgggccctggccagccgggtggatgctgctgagtgggccgcctgtgccggctacgcccgggacctgctgtgccaggagtgcagcccctatgctgcccacctgtatgatgctgaggaccccttcacccccctgaggacagtgcccggcctgtgccaggactactgcctggacatgtggcacaagtgccggggcctcttccgccacctgagcacagaccaggagctgtgggccctggagggcaacctggcccgcttctgccgctacctgagcctggatgacacagactactgcttcccctacctgctggtgaacaagaacctgaacagcaacctgggccacgtggtggctgatgccaagggctgcctgcagctgtgcctggaggaggtggccaacggcctgaggaaccctgtggccatggtgcacgccagagatggcacccaccgcttctttgtggccgagcaggtgggcctggtgtgggcctacctgcctgacaggagccggctgggcaagcccttcctgaacatcagccgggtggtgctgaccagcccctgggagggagatgagcggggcttcctgggcatcgccttccaccccagcttccagcacaacagaaggctgtatgtgtactacagcgtgggcatccgcagcagcgagtggatccgcatcagcgagttccgggtgtctgaagatgatgaaaatgctgtggaccacagcagcgagcgcatcatcctggaggtgaaggagcccgccagcaaccacaacggcggccagctgctgtttggagatgatggctacctgtacatcttcaccggagatggcggcatggccggggaccccttcggcacctttggaaatgcccagaacaagagcgccctgctgggcaaggtgctgagaattgatgtggacaggaaggagcggggcctgccctacggcatccccccagacaacccctttgtgggggaccctgctgcccagcctgaggtgtatgccctgggcgtgaggaacatgtggcgctgcagctttgacagaggagaccccagcagcggcaccggccggggccgcctcttctgtggagatgtgggccagaacaagtttgaggaggtggatgtggtggagcggggcggcaactacggctggagggcccgggagggctttgagtgctatgacaggagcctgtgtgccaacaccagcctgaatgacctgctgcccatctttgcctacccccacacagtgggcaagtctgtgactggaggctacgtgtaccggggctgtgagtaccccaacctgaatggcctgtacatctttggagacttcatgagcggccgcctgatgagcctgcaggagaaccctggcaccggccagtggcagtacagcgagatctgcatgggccacggccagacctgtgagttccctggcctcatcaacaactactacccctacatcatcagctttggagaagatgaagctggggagctgtacttcatgagcactggagagcccagcgccacagccccccggggcgtggtgtacaagatcattgatgccagcagaagagcccctcctgggaagtgccagatccagcctgcccaggtgaagatccgcagccgcctcatcccctttgtgcccaaggagaagttcatccccaagaccaggagcaccccccggcccacagcccgggcccccacccgggccccccggcggggccggcccacagctgcccccccagcccccacccccaggcctgcccggcccacccagcagcccggcagcagaagaggaggcggcagaagaagaggccgcctgaacagcgccagccgggccttcagagatggagaggtgcggctggtgcggcctgctggcctgagcagcggcagcggccgggtggaggtgtttgtgggcggccgctggggcaccgtgtgtgatgacagctggaacatctctggagctgctgtggtgtgccggcagctgggctttgcctatgctgtgcgggctgtgaagagagctgagtttggccagggcggcagcctgcccatcctgctggatgatgtgcgctgtgccggctgggagaggaacctgctggagtgccagcacaacggggtgggcacccacaactgtgaacatgatgaagatgctggggtggtgtgcagccaccagaacccagacctgtag

SEQ ID NO: 7173 - DNA, 1317 bp, synthetic construct
  misc_feature 1..1317: note = source = /note="Description of Artificial Sequence: Synthetic coding sequence"
  source 1..1317: mol_type = other DNA
atgcaccccctgcccggctactggagctgctactgcctgctgctgctcttcagcctgggcgtgcagggcagcctgggcgcccccagcgctgcccctgagcaggtgcacctgagctacccaggagagcccggctccatgacagtgacctggaccacctgggtgcccaccaggtctgaggtgcagtttggcctgcagcccagcggccccctgcccctgcgggcccagggcacctttgtgccctttgtggatggcggcatcctgcggaggaagctgtacatccaccgggtgaccctgaggaagctgctgcccggggtgcagtatgtgtaccgctgtggcagcgcccagggctggagccgccgcttccgcttccgggccctgaagaatggagcccactggagcccccggctggccgtgtttggagacctgggcgctgacaaccccaaggctgtgccccggctgcggcgggacacccagcagggcatgtatgatgctgtgctgcacgtgggggactttgcctacaacctggaccaggacaatgcccgggtgggggaccgcttcatgaggctcatcgagcctgtggccgccagcctgccctacatgacctgccccggcaaccacgaggagcgctacaacttcagcaactacaaggcccgcttctccatgcctggggacaatgaaggcctgtggtacagctgggacctgggccctgcccacatcatctccttcagcacagaggtgtacttcttcctgcactacggccgccacctggtgcagaggcagttccgctggctggagagtgacctgcagaaggccaacaagaacagagctgcccggccctggatcatcaccatgggccaccggcccatgtactgcagcaatgctgacctggatgactgcaccaggcatgagagcaaggtgaggaagggcctgcagggcaagctgtatggcctggaggacctcttctacaagtatggagtggacctgcagctgtgggcccacgagcacagctatgagcggctgtggcccatctacaactaccaggtgttcaacggcagccgggagatgccctacaccaacccccggggccctgtgcacatcatcaccggcagcgctggctgtgaggagcggctgaccccatttgctgtgttcccccggccctggagcgctgtgcgggtgaaggagtatggctacacccggctgcacatcctgaatggcacccacatccacatccagcaggtgtctgatgaccaggacggcaagatcgtggatgatgtgtgggtggtgcggcccctgtttggccgcaggatgtacctgtag

SEQ ID NO: 7174 - DNA, 411 bp, synthetic construct
  misc_feature 1..411: note = source = /note="Description of Artificial Sequence: Synthetic coding sequence"
  source 1..411: mol_type = other DNA
atggcccggaccaagcagacagccaggaagagcactggaggcaaggcccccaggaagcagctggccaccaaggccgccaggaagagcgccccagccactggaggagtgaagaagccccaccgctaccggcccggcaccgtggccctgcgggagatccgccgctaccagaagagcacagagctgctgatcaggaagctgcccttccagaggctggtgcgggagatcgcccaggacttcaagacagacctgcgcttccagagcagcgctgtgatggccctgcaggaggccagcgaggcctacctggtgggcctgtttgaggacaccaacctgtgtgccatccacgccaagagggtgaccatcatgcccaaggacatccagctggcccggcgcatccggggggagcgggcctag

SEQ ID NO: 7175 - DNA, 1209 bp, synthetic construct
  misc_feature 1..1209: note = source = /note="Description of Artificial Sequence: Synthetic coding sequence"
  source 1..1209: mol_type = other DNA
atggccgcccggcccggccccctgtggctgctgggcctgaccctgtgtgccctgggcggcggcggccctggcctgcggcccccacctggctgcccccagaggcggctgggcgcccgggagaggagagatgtgcagcgggagatcctggccgtgctgggcctgcccggccggccccggccccgggcccctcctgctgccagccggctgcctgccagcgcccccctcttcatgctggacctgtaccacgccatggctggagatgatgatgaagatggagccccagctgagcagaggctgggccgggctgacctggtgatgagctttgtgaacatggtggagcgggaccgggccctgggccaccaggagccccactggaaggagttccgctttgacctgacccagatcccagctggggaggccgtgacagctgctgagttccgcatctacaaggtgcccagcatccacctgctgaacagaaccctgcacgtgtccatgttccaggtggtgcaggagcagagcaaccgggagagtgacctcttcttcctggacctgcagaccctgcgggctggagatgagggctggctggtgctggatgtgacagctgccagtgactgctggctgctgaagaggcacaaggacctgggcctgcggctgtatgtggagacagaagatggccacagcgtggaccccggcctggccggcctgctgggccagagggcccccaggagccagcagccctttgtggtgaccttcttccgggccagccccagccccatccgcacccccagggctgtgcggcccctgcggcggcggcagcccaagaagagcaatgagctgccccaggccaaccggctgcccggcatctttgatgatgtgcggggcagccacggccggcaggtgtgcagaagacatgagctgtatgtgtccttccaggacctgggctggctggactgggtgattgccccccagggctacagcgcctactactgtgaaggagaatgttccttccccctggacagctgcatgaatgccaccaaccacgccatcctgcagagcctggtgcacctgatgaagcccaatgctgtgcccaaggcctgctgtgcccccaccaagctgagcgccacctctgtgctgtactatgacagcagcaacaacgtcatcctgaggaagcacaggaacatggtggtgaaggcctgtggctgccactag

SEQ ID NO: 7176 - DNA, 957 bp, synthetic construct
  misc_feature 1..957: note = source = /note="Description of Artificial Sequence: Synthetic coding sequence"
  source 1..957: mol_type = other DNA
atggctgctgctgccctgcccccccggcccctgctgctgctgcccctggtgctgctgctgagcggccggcccaccagggctgacagcaaggtgtttggagacctggaccaggtgaggatgaccagcgagggcagtgactgccgctgcaagtgcatcatgaggcccctgagcaaggatgcctgcagccgggtgcgcagcggccgggcccgggtggaggacttctacacagtggagaccgtgagcagcggcacagactgccgctgcagctgcacagccccacccagcagcctgaacccctgtgaaaatgagtggaagatggagaagctgaagaagcaggcccctgagctgctgaagagcatcaaggccaacctgagcagagaaaatgaggtggtgaaggacagcgtgcgccacctgtctgagcagctgcggcactatgagaaccacagcgccatcatgctgggcatcaagaaggagctgagccggctgggcctgcagctgctgcagaaggatgctgctgctgccccagccaccccagccaccggcaccggcagcaaggcccaggacacagcccggggcaagggcaaggacatcagcaaatatggctctgtgcagaagagctttgctgaccggggcctgcccaagccacccaaggagaagctgctgcaggtggagaagctgaggaaggagagcggcaagggcagcttcctgcagcccacagccaagccccgggccctggcccagcagcaggccgtcatccggggcttcacctactacaaggccggcaagcaggaggtgacagaggccgtggccgacaacaccctgcagggcacctcctggctggagcagctgccccccaaggtggagggccgcagcaacagcgctgagcccaacagcgctgagcaggatgaggccgagcccaggagcagcgagcgggtggacctggccagcggcacctag

SEQ ID NO: 7177 - DNA, 402 bp, synthetic construct
  misc_feature 1..402: note = source = /note="Description of Artificial Sequence: Synthetic coding sequence"
  source 1..402: mol_type = other DNA
atggccctgggcgtgcccatctctgtgtacctgctcttcaatgccatgacagccctgacagaggaggccgctgtgacagtgaccccacccatcacagcccagcaggccgacaacatcgagggccccatcgccctgaagttcagccacctgtgcctggaggaccacaacagctactgcatcaatggagcctgtgccttccaccacgagctggagaaggccatctgccgctgcttcaccggctacaccggggagcgctgtgagcacctgaccctgaccagctatgctgtggacagctatgagaagtacatcgccatcggcattggagtgggcctgctgctgagcggcttcctggtgatcttctactgctacatcaggaagagatatgagaaggacaagatctag

SEQ ID NO: 7178 - DNA, 651 bp, synthetic construct
  misc_feature 1..651: note = source = /note="Description of Artificial Sequence: Synthetic coding sequence"
  source 1..651: mol_type = other DNA
atgagcagcgaggccgagacccagcagcccccagctgcccccccagctgccccagccctgtctgctgctgacaccaagccaggcaccaccggcagcggggccggcagcggcggccctgggggcctgaccagcgctgccccagctggaggagacaagaaggtgattgccaccaaggtgctgggcaccgtgaagtggttcaacgtgagaaatggctacggcttcatcaacagaaatgacaccaaggaggatgtgtttgtgcaccagggcgctgaggccgccaacgtgacaggccctgggggcgtgcctgtgcagggcagcaaatatgctgctgacaggaaccactaccgccgctaccccaggagaagaggcccccccaggaactaccagcagaactaccagaacagcgagagcggggagaagaatgaaggcagcgagagcgcccctgagggccaggcccagcagaggcggccctacagaagaagacgcttccccccctactacatgagaagaccctacggccggcggccccagtacagcaacccccctgtgcagggcgaggtgatggagggcgctgacaaccagggcgctggggagcagggccggcctgtgcggcagaacatgtaccggggctaccggccccgcttcagatag

SEQ ID NO: 7179 - DNA, 756 bp, synthetic construct
  misc_feature 1..756: note = source = /note="Description of Artificial Sequence: Synthetic coding sequence"
  source 1..756: mol_type = other DNA
aatgactggagcgctgaccagctgtacctggagaccaccgggaagagcaggaccctgcagagcggcctggccctgctgtatggcttcctgcctgactttgactggaagaagatctacttccgccaccagcccagcgccctcttctgcagcggcagctgctactgccctgtgaggaaccagtacctggagaaggagcagaggcggcagtacctgctgcggctgaagaacagccagctggagaagacctatggagagatggccaagatcgtggatgtgcccaccaagcagctgcgggccgccaaccccatcgacagcatgctgtgccacttctgccacaacgtgtccttcccctgcaccagaaatggctgtgtggacatggagcacttcaaggtgatcaagacccaccagattgaagatgagcgggagcggcgggagaagaagctgtacttcggctacagcctgctgggcgcccaccccatcctgaaccagaccatcggccgcatgcagagggccacagagggcaggaaggaggagctgtttgccctgtacagcgcccatgatgtgaccctgagccctgtgctgagcgccctgggcctgtctgaggcccgcttccccaggtttgctgcccgggtgaacatccccagcggcttcttcaccatggcctccatgagccacagcacccccctgagcgccaagaccaccacctctgtgctgcccagcccctgtgcccggctgaagacctggagcgccctgtag

SEQ ID NO: 7180 - DNA, 576 bp, synthetic construct
  misc_feature 1..576: note = source = /note="Description of Artificial Sequence: Synthetic coding sequence"
  source 1..576: mol_type = other DNA
atggccgccccccggggccgggccgccccctggaccacagccctgctgctgctgctggccagccaggtgctgagccctggcagctgtgctgatgaggaggaggtgcctgaggagtgggtgctgctgcacgtggtgcagggccagattggagctggcaactacagctacctgcggctgaaccacgagggcaagatcgtgctgaggatgaggagcctgaagggagatgctgacctgtatgtgtctgccagcagcctgcaccccagctttgatgattatgagctgcagagcgccacctgtggcccagatgctgtgtccatcccagcccacttcagaagacctgtgggcatcggcgtgtatggccaccccagccacctggagagcgagtttgagatgaaggtgtactatgatggcaccgtggagcagcacccctttggagaggccgcctacccagcagatggagcagatgctggccagaagcatgctggggccccagaagatgccagccaggaggaggagagcgtgctgtggaccatcctgatcagcatcctgaagctggtgctggagatcctcttctag

SEQ ID NO: 7181 - DNA, 2301 bp, synthetic construct
  misc_feature 1..2301: note = source = /note="Description of Artificial Sequence: Synthetic coding sequence"
  source 1..2301: mol_type = other DNA
atgggcagaagaaggctgctggtgtggctgtgtgctgtggccgccctgctgagcggggcccaggcccggggcacccccctgctggcccggcctgcccctcctggggccagccgctacagcctgtacaccaccggctggaggccccggctgcggcccggcccccacaaggccctgtgtgcctacgtggtgcacagaaatgtgacctgcatcctgcaggagggcgctgagagctatgtgaaggccgagtaccggcagtgccgctggggccccaagtgccccggcaccgtgacctacagaacagtgctgcggcccaagtacaaggtgggctacaagacagtgacagacctggcctggcgctgctgccccggcttcaccgggaagcgctgcccagagcacctgacagaccacggggccgccagcccccagctggagcctgagccccagatccccagcggccagctggaccccggcccccggccccccagctacagccgggccgcccccagcccccacggcaggaagggccctggcctgtttggagagcggctggagcggctggagggagatgtgcagaggctggcccagacctacggcaccctgagcggcctggtggccagccatgaggaccccaacaggatgactggaggcccccgggccccagctgtgcctgtgggctttggagtcatccctgagggcctggtgggccctggggaccgggcccggggccccctgaccccacccctggatgagatcctgagcaaggtgacagaggtgagcaacaccctgcagaccaaggtgcagctgctggacaaggtgcacggcctggccctgggccacgaggcccacctgcagaggctgcgggaggccccacccagccccctgaccagcctggccctgctggaggagtatgtggaccggcggctgcaccggctgtggggcagcctgctggatggctttgagcagaagctgcagggcgtgcagagtgaatgtgacctgcgggtgcaggaggtgcggcggcagtgtgaggagggccaggccgccagccggcggctgcaccagagcctggatggccgggagctggccctgcggcaggagctgagccagctgggcagccagctgcagggcctgtctgtgtctggccggggcagctgctgcggccagctggccctgatcaatgccaggatggatggcctggagcgggccctgcaggccgtgacagagacccagaggggccctggggccccagctggagatgagctgacccggctgtctgctgccatgctggagggcggcgtggatggcctgctggagggcctggagaccctgaatggaacagaaggaggagcccggggctgctgcctgcggctggacatgggcggctggggcgtgggcggcttcggcaccatgctggaggagcgggtgcagagcctggaggagcggctggccaccctggccggggagctgagccatgacagcgccagccctggccgcagcgcccggcccctggtgcagacagagctggccgtgctggagcagaggctggtgtccctggagaccagctgcacccccagcaccaccagcgccatcctggacagcctggtggccgaggtgaaggcctggcagagccgctctgaggccctgctgcggcaggtggccagccatgctgccctgctgcagcagctgaatggcaccgtggccgaggtgcagggccagctggccgagggcaccggcagcagcctgcagggcgagatcaccctgctgaaggtgaacctgaacagcgtgtccaagagcctgaccggcctgagtgacagcgtgtcccagtacagtgatgccttcctggccgccaacaccagcctggatgagcgggagaggaaggtggaggccgaggtgcaggccatccaggagcaggtgagcagccagggcagccggctgcaggccggccaccggcaggtgctgaacctgcggggggagctggagcagctgaaggccggcgtggccaaggtggccagcggcctgagccgctgccaggacacagcccagaagctgcagcacacagtgggccactttgaccagagggtggcccaggtggagggcgcctgccggcggctgggcctgctggccgccggcctggacagcctgcccacagagcccctgcggccccgggagggcctgtggagccacgtggaccagctgaacagaaccctggcccagcacacccaggacatcgcccggctgagagatgacctgctggactgccaggcccagctggccgagcaggtgcggcccggccaggccaactag

SEQ ID NO: 7182 - DNA, 1251 bp, synthetic construct
  misc_feature 1..1251: note = source = /note="Description of Artificial Sequence: Synthetic coding sequence"
  source 1..1251: mol_type = other DNA
atgtaccgccacggcatcagcagccagaggtcctggcccctgtggaccaccatcttcatcttcctgggcgtggccgccatcctgggcgtgaccatcggcctgctggtgcacttcctggccgtggagaagacctactactaccagggcgacttccacatcagcggcgtgacctacaatgacaactgtgaaaatgctgccagccaggccagcaccaacctgagcaaggacatcgagaccaagatgctgaatgccttccagaacagcagcatctacaaggagtatgtgaagtctgaggtgatcaagctgctgcccaatgccaacggcagcaatgtgcagctgcagctgaagttcaagttccccccagctgagggcgtgtccatgaggaccaagatcaaggccaagctgcaccagatgctgaagaacaacatggcctcctggaatgctgtgcctgccagcatcaagctgatggagatcagcaaggccgccagcgagatgctgaccaacaactgctgcggccggcaggtggccaacagcatcatcactggaaacaagatcgtgaatggcaagagcagcctggagggcgcctggccctggcaggcctccatgcagtggaagggccgccactactgtggggccagcctcatcagcagccgctggctgctgtctgctgcccactgctttgccaagaagaacaacagcaaggactggacagtgaactttggcatcgtggtgaacaagccctacatgaccaggaaggtgcagaacatcatcttccacgagaactacagcagccctggcctgcatgatgacatcgccctggtgcagctggccgaggaggtgtccttcacagagtacatcaggaagatctgcctgcctgaggccaagatgaagctgtctgaaaatgacaacgtggtggtgacaggctggggcaccctgtacatgaatggcagcttccctgtgatcctgcaggaggacttcctgaagatcatcgacaacaagatctgcaatgccagctatgcctacagcggctttgtgacagacaccatgctgtgtgccggcttcatgtctggagaggctgatgcctgccagaatgacagcggcggccccctggcctacccagacagcaggaacatctggcacctggtgggcatcgtgtcctggggagatggctgcggcaagaagaacaagccaggagtgtacaccagggtgaccagctacagaaactggatcaccagcaagacaggcctgtag

SEQ ID NO: 7183 - DNA, 639 bp, synthetic construct
  misc_feature 1..639: note = source = /note="Description of Artificial Sequence: Synthetic coding sequence"
  source 1..639: mol_type = other DNA
atgctgagctctgtggtgttctggggcctgattgccctgattggcaccagccggggcagctaccccttcagccacagcatgaagccccacctgcacccccggctgtaccacggctgctacggggacatcatgaccatgaagaccagcggggccacctgtgatgccaacagcgtgatgaactgtggcatccggggcagcgagatgtttgctgagatggacctgcgggccatcaagccctaccagaccctcatcaaggaggtgggccagaggcactgtgtggaccctgctgtgattgctgccatcatcagccgggagagccatggaggctctgtgctgcaggacggctgggaccaccggggcctgaagtttggcctgatgcagctggacaagcagacctaccaccctgtgggcgcctgggacagcaaggagcacctgagccaggccaccggcatcctgacagagcgcatcaaggccatccagaagaagttccccacctggagcgtggcccagcacctgaagggcggcctgagcgccttcaagtctggaattgaggccatcgccacccccagcgacatcgacaatgactttgtgaatgacatcatcgcccgggccaagttctacaagaggcagagcttctag

SEQ ID NO: 7184 - DNA, 378 bp, synthetic construct
  misc_feature 1..378: note = source = /note="Description of Artificial Sequence: Synthetic coding sequence"
  source 1..378: mol_type = other DNA
atggcccggagcgccaccctggccgccgccgccctggccctgtgcctgctgctggcccctcctggcctggcctggtacaagccagctgctggccacagcagctacagcgtgggccgggctgctggcctgctgagcggcctgcggcgcagcccctatgcccggcgcagccagccctacagaggagctgagcccccaggaggagctggggccagccctgagctgcagctgcacccccggctgcggagcctggccgtgtgtgtgcaggatgtggcccccaacctgcagagatgtgagcggctgcctgatggccggggcacctaccagtgcaaggccaacgtgttcctgagcctgcgggctgctgactgcctggccgcctag

SEQ ID NO: 7185 - DNA, 867 bp, synthetic construct
  misc_feature 1..867: note = source = /note="Description of Artificial Sequence: Synthetic coding sequence"
  source 1..867: mol_type = other DNA
atgaacaacctgtccttcagcgagctgtgctgcctcttctgctgccccccctgccctgggaagatcgccagcaagctggccttcctgcccccagaccccacctacaccctgatgtgtgatgagagcggcagccgctggaccctgcacctgtctgaaagagctgactggcagtacagcagccgggagaaggatgccatcgagtgcttcatgaccaggaccagcaaaggaaacagaattgcctgcatgtttgtgcgctgcagccccaatgccaagtacaccctgctcttcagccacggcaatgctgtggacctgggccagatgagcagcttctacatcggcctgggcagccgcatcaactgcaacatcttctcctatgactacagcggctacggggccagcagcggcaagcccacagagaagaacctgtatgctgacatcgaggccgcctggctggccctgcggaccaggtatggcatccggccagaaaatgtcatcatctacggccagagcattggaacagtgcccagcgtggacctggccgcccgctatgaatctgctgctgtgatcctgcacagccccctgaccagcggcatgagggtggccttcccagacaccaagaagacctactgctttgatgccttccccaacatcgacaagatcagcaagatcaccagccctgtgctgatcatccatggaacagaagatgaagtcatcgacttcagccacggcctggccctgtttgagcgctgccagaggcctgtggagcccctgtgggtggagggcgccggccacaatgatgtggagctgtatggccagtacctggagcggctgaagcagtttgtgtcccaggagctggtgaacctgtag

SEQ ID NO: 7186 - DNA, 417 bp, synthetic construct
  misc_feature 1..417: note = source = /note="Description of Artificial Sequence: Synthetic coding sequence"
  source 1..417: mol_type = other DNA
atggtggccccagctgcccgggtcttcctgcgggctgtgcgggccgccctgaccagcacagtgcctgacctgctgtgcctgctggcccggggcagcccccggggcctggccagcggccgcctgcccctggccgtgcacagcgcccagcacggccctggcagcggggccccctggctgagaattgcccggcgggccctgcgctttgtgctgagcaagcactggggagatgactgctacctgaccaaccggctgtggcaggacctgaagccacccagccacgtggagaatggccaggagctgcggctggcccctcctgtgcagtgggccctgcaggtgcagggcaaccagctgcagacagctgtgctgtgcctgaggatggcccctcctgagcccgccggcagccggcagaggatctag

SEQ ID NO: 7187 - DNA, 1332 bp, synthetic construct
  misc_feature 1..1332: note = source = /note="Description of Artificial Sequence: Synthetic coding sequence"
  source 1..1332: mol_type = other DNA
atgggcggcccccgggcctgggccctgctgtgcctgggcctgctgctgcccggcggcggggccgcctggagcattggagctgcccccttctctggaagaagaaactggtgcagctatgtggtgaccaggaccatcagctgccacgtgcagaatggcacctacctgcagagggtgctgcagaactgcccctggcccatgagctgccccggcagcagctacagaacagtggtgcggcccacctacaaggtgatgtacaagatcgtgacagcccgggagtggcgctgctgccccggccacagcggcgtgtcctgtgaggaggtggccgccagcagcgccagcctggagcccatgtggagcggcagcaccatgaggaggatggccctgcggcccacagccttcagcggctgcctgaactgcagcaaggtgtctgagctgacagagcggctgaaggtgctggaggccaagatgaccatgctgaccgtcatcgagcagcctgtgccccccaccccagccaccccagaggaccctgcccccctgtggggccccccaccagcccagggcagccctggagatggcggcctgcaggaccaggtgggcgcctggggcctgcccggccccaccggccccaagggagatgctggcagccggggccccatgggcatgaggggccccccaggcccccagggccccccaggcagccctggccgggccggggctgtgggcaccccaggagagcggggccccccaggccccccaggccccccaggccccccaggccccccagcccctgtgggccccccccacgcccgcatcagccagcacggggaccccctgctgagcaacaccttcacagagaccaacaaccactggccccagggccccactggacctcctggccccccaggccccatgggccccccaggccccccaggccccactggagtgcccggcagccctggccacatcggccccccaggccccaccggccccaagggcatcagcggccaccctggagagaagggggagcggggcctgcggggggagcccggcccccagggcagcgctggccagagaggagagcccggccccaagggggaccctggagagaagagccactggggcgagggcctgcaccagctgcgggaggccctgaagatcctggccgagcgggtgctgatcctggagaccatgattggcctgtatgagcctgagctgggcagcggggccggccctgctggcaccggcacccccagcctgctgcggggcaagagaggaggccacgccaccaactacagaattgtggcccccaggagcagagatgagcggggctag

SEQ ID NO: 7188 - DNA, 717 bp, synthetic construct
  misc_feature 1..717: note = source = /note="Description of Artificial Sequence: Synthetic coding sequence"
  source 1..717: mol_type = other DNA
atggtgctgctgctgctggtggccatccccctgctggtgcacagcagccggggccctgcccactatgagatgctgggccgctgcaggatggtgtgtgacccccacggcccccggggccctggcccagatggagccccagcctctgtgccccccttccccccaggggccaagggggaggtgggccggcggggcaaggccggcctgcggggccccccaggccccccaggcccccggggccccccaggagagcccggccggcccggccccccaggccccccaggccctggccctggaggagtggccccagctgctggctacgtgccccgcatcgccttctacgccggcctgcggcggccccatgagggctatgaggtgctgcgctttgatgatgtggtgaccaacgtgggcaatgcctatgaagctgccagcggcaagttcacctgccccatgcctggggtgtacttctttgcctaccacgtgctgatgagaggaggagatggcacctccatgtgggccgacctgatgaagaatggccaggtgcgggccagcgccatcgcccaggatgctgaccagaactatgactatgccagcaacagcgtcatcctgcacctggatgtgggagatgaggtgttcatcaagctggatggcggcaaggtgcacggcggcaacaccaacaagtacagcaccttcagcggcttcatcatctacccagactag

SEQ ID NO: 7189 - DNA, 282 bp, synthetic construct
  misc_feature 1..282: note = source = /note="Description of Artificial Sequence: Synthetic coding sequence"
  source 1..282: mol_type = other DNA
atgaagctgttcctggtgctgatcatcctgctgtttgaggtgctgacagatggagcccggctgaagaagtgcttcaacaaggtgacaggctactgcaggaagaagtgcaaggtgggggagagatatgagatcggctgcctgagcggcaagctgtgctgtgccaatgatgaggaggagaagaagcacgtgtccttcaagaagccccaccagcacagcggggagaagctgtctgtgctgcaggactacatcatcctgcccaccatcaccatcttcaccgtgtag

SEQ ID NO: 7190 - DNA, 609 bp, synthetic construct
  misc_feature 1..609: note = source = /note="Description of Artificial Sequence: Synthetic coding sequence"
  source 1..609: mol_type = other DNA
atggtgcgcatctggaccaccatcatgattgtgctgatcctgctgctgcgcatcggccccaacaagcccagcctgagcggccggcaggccccagcccaggcccagaccagtgacctggtgcccagcctcttccccctgggcctgtgggcccctggcttctgcacctggagcagcccagatgaggacaaggtgtggaggcctgcctgggagcagggccccaagggggagccagacccccggggcctgcggcccaggaagcctgtgcccggcactggaaacagagacagcggcacccggcggcggctgcaggatgccacagagcaggaccccaggcctggaaatgatgtggccagcgctgagacagctggcccccccagccccagcggcatccgggcccaggaccgggcccccaggcaccggcgggcccccccagccaggatgcctgtggccccagcccccagcgcagatggagagcccctgcaggagcagggcggcggcctcttccacaggaccaggtctgtgtacaacggcctggagctgaacacctggatgaaggtggagcggctgtttgtggagaagttccaccagagcttcagcctggacaactag

SEQ ID NO: 7191 - DNA, 342 bp, synthetic construct
  misc_feature 1..342: note = source = /note="Description of Artificial Sequence: Synthetic coding sequence"
  source 1..342: mol_type = other DNA
atgctgccctgcctggccctgctgctgctgatggagctgtctgtgtgcaccgtggccggagatggaggagaggagcagaccctgagcacagaggccgagacctgggtgattgtggccctggaggagggcgccggccccagcatccagctgcagctgcaggaggtgaagacaggcaaggccagccagttcttcggcctgatgggcaagagggtgggcggccggcccctcatccagcccaggaggaagaaggcctaccagctggagcacaccttccagggcctgctgggcaagaggagcctcttcacagagggccgggaggatgaggcccagggcagcgagtag

SEQ ID NO: 7192 - DNA, 1269 bp, synthetic construct
  misc_feature 1..1269: note = source = /note="Description of Artificial Sequence: Synthetic coding sequence"
  source 1..1269: mol_type = other DNA
atgggccctgcctggctgtggctgctgggcaccggcatcctggcctctgtgcactgccagcccctgctggcccatggagacaagagcctgcagggcccccagcccccaagacaccagctgtctgagcccgccccagcctaccaccgcatcacccccaccatcaccaactttgccctgcggctgtacaaggagctggccgcagatgcccctggcaacatcttcttcagccctgtgtccatcagcaccaccctggccctgctgagcctgggcgcccaggccaacaccagcgccctgatcctggagggcctgggcttcaacctgacagagaccccagaggccgacatccaccagggcttccgcagcctgctgcacaccctggccctgcccagccccaagctggagctgaaggtgggcaacagcctcttcctggacaagaggctgaagccccggcagcactacctggacagcatcaaggagctgtatggagcctttgccttcagcgccaacttcacagattctgtgaccaccggccggcagatcaatgactacctgcggcggcagacctacggccaggtggtggactgcctgcctgagttcagccaggacaccttcatggtgctggccaactacatcttcttcaaggccaagtggaagcaccccttcagccgctaccagacccagaagcaggagagcttctttgtggatgagaggaccagcctgcaggtgcccatgatgcaccagaaggagatgcaccgcttcctgtatgaccaggacctggcctgcaccgtgctgcagatcgagtacagaggaaatgccctggccctgctggtgctgcctgaccccgggaagatgaagcaggtggaggccgccctgcagccccagaccctgaggaagtggggccagctgctgctgcccagcctgctggacctgcacctgccccgcttcagcatcagcggcacctacaacctggaggacatcctgccccagatcggcctgaccaacatcctgaacctggaggccgacttctctggagtgacaggccagctgaacaagaccatcagcaaggtgagccacaaggccatggtggacatgtctgagaagggcacagaagctggagctgccagcggcctgctgagccagccccccagcctgaacaccatgtctgacccccacgcccacttcaaccggcccttcctgctgctgctgtgggaggtgaccacccagagcctgctcttcctgggcaaggtggtgaaccctgtggccggctag

SEQ ID NO: 7193 - DNA, 237 bp, synthetic construct
  misc_feature 1..237: note = source = /note="Description of Artificial Sequence: Synthetic coding sequence"
  source 1..237: mol_type = other DNA
atggccctgatcaggaagaccttctacttcctgtttgccatgttcttcatcctggtgcagctgcccagcggctgccaggccggcctggacttcagccagcccttccccagcggggagtttgctgtgtgtgagagctgcaagctgggccggggcaagtgcaggaaggagtgcctggagaatgagaagccagatggcaactgccgcctgaacttcctgtgctgccggcagaggatctag

SEQ ID NO: 7194 - DNA, 2139 bp, synthetic construct
  misc_feature 1..2139: note = source = /note="Description of Artificial Sequence: Synthetic coding sequence"
  source 1..2139: mol_type = other DNA
atggctgctgctggcctggtggccgtggccgctgctgctgagtacagcggcaccgtggccagcggcggcaacctgcccggggtgcactgcggccccagcagcggggccggccctggcttcggccctggctcctggagccgcagcctggaccgggccctggaggaggccgctgtgactggagtgctgagcctgagcggcaggaagctgcgggagttccccaggggggccgccaaccacgacctgacagacaccaccagggctgacctgagcaggaaccggctgtctgagatccccatcgaggcctgccactttgtgtccctggagaacctgaacctgtaccagaactgcatccgctacatccctgaggccatcctgaacctgcaggccctgaccttcctgaacatcagcaggaaccagctgagcaccctgcctgtgcacctgtgcaacctgcccctgaaggtgctgattgccagcaacaacaagctggtgtccctgcctgaggagatcggccacctgcggcacctgatggagctggatgtgtcctgcaatgagatccagaccatccccagccagatcggcaacctggaggccctgcgggacctgaatgtgagaagaaaccacctggtgcacctgcctgaggagctggccgagctgcccctcatccggctggacttcagctgcaacaagatcaccaccatccctgtgtgctacagaaacctgcggcacctgcagaccatcaccctggacaacaaccccctgcagagccccccagcccagatctgcatcaagggcaaggtgcacatcttcaagtacctgaacatccaggcctgcaagatcgccccagacctgcctgactatgaccggcggcccctgggcttcggcagctgccacgaggagctgtacagcagccggccctacggggccctggacagcggcttcaacagcgtggacagcggggacaagcgctggagcggaaatgagcccacagatgagttcagtgacctgcccctgcgggtggccgagatcaccaaggagcagaggctgcggcgggagagccagtaccaggagaacagaggcagcctggtggtgaccaatggaggagtggagcatgacctggaccagattgactacatcgacagctgcacagctgaggaggaggaggccgaggtgcggcagcccaagggccctgaccctgacagcctgagcagccagttcatggcctacatcgagcagaggcgcatcagccatgagggcagccctgtgaagcctgtggccatccgggagttccagaagacagaggacatgaggcgctacctgcaccagaacagagtgcctgctgagcccagcagcctgctgagcctgagcgccagccacaaccagctgagccacacagacctggagctgcaccagaggcgggagcagctggtggagaggacccggcgggaggcccagctggccgccctgcagtatgaggaggagaagatccgcaccaagcagatccagagagatgctgtgctggactttgtgaagcagaaggccagccagagcccccagaagcagcaccccctgctggatggagtggatggagagtgccccttccccagccgccgcagccagcacacagatgacagcgccctgtgcatgagcctgagcggcctgaaccaggtgggctgtgccgccaccctgccccacagcagcgccttcacccccctgaagagtgatgaccggcccaatgccctgctgagcagccctgccacagagaccgtgcaccacagccctgcctacagcttccctgctgccatccagaggaaccagccccagaggcctgagagcttcctgttccgggccggcgtgcgggcagagaccaacaagggccacgccagccccctgcccccatctgctgcccccaccacagacagcacagacagcatcaccggccagaacagccggcagcgggaggaggagctggagctgattgaccagctgaggaagcacatcgagtaccgcctgaaggtgtccctgccctgtgacctgggcgccgccctgacagatggagtggtgctgtgccacctggccaaccacgtgcggcccaggtctgtgcccagcatccacgtgcccagccctgctgtggtgtcctag

SEQ ID NO: 7195 - DNA, 213 bp, synthetic construct
  misc_feature 1..213: note = source = /note="Description of Artificial Sequence: Synthetic coding sequence"
  source 1..213: mol_type = other DNA
atgagggtgctcttctttgtgtttggagtgctgagcctgatgttcaccgtgcccccagcccggagcttcatcagcaatgatgagtgccccagcgagtactaccactgccgcctgaagtgcaatgctgatgaacatgccatccgctactgtgccgacttcagcatctgctgcaagctgaagatcatcgagattgatggccagaagaagtggtag

SEQ ID NO: 7196 - DNA, 789 bp, synthetic construct
  misc_feature 1..789: note = source = /note="Description of Artificial Sequence: Synthetic coding sequence"
  source 1..789: mol_type = other DNA
atggctgctgccagcgctggggccacccggctgctgctgctgctgctgatggctgtggccgcccccagccgggcccggggcagcggctgccgggccggcaccggggcccggggagctggagctgagggccgggagggggaggcctgtggcaccgtgggcctgctgctggagcacagctttgaaattgatgattctgccaacttcaggaagaggggcagcctgctgtggaaccagcaggacggcaccctgagcctgagccagaggcagctgtctgaggaggagcggggccgcctgagagatgtggccgccctgaatggcctgtacagagtgcgcatcccccggcggcctggggccctggatggcctggaggccggcggctacgtgagcagctttgtgcctgcctgcagcctggtggagagccacctgagtgaccagctgaccctgcacgtggatgtggccggaaatgtggtgggcgtgtctgtggtgacccaccctgggggctgccggggccacgaggtggaggatgtggacctggagctgttcaacacctctgtgcagctgcagccccccaccacagcccctggccctgagacagctgccttcatcgagcggctggagatggagcaggcccagaaggccaagaacccccaggagcagaagagcttctttgccaagtactggatgtacatcatccctgtggtgctcttcctgatgatgtctggggccccagacacaggaggccagggcggcggcggcggcggcggcggcggcggcggcagcggccgctag

SEQ ID NO: 7197 - DNA, 150 bp, synthetic construct
  misc_feature 1..150: note = source = /note="Description of Artificial Sequence: Synthetic coding sequence"
  source 1..150: mol_type = other DNA
atggacagcagccgggagcccaccctgggccgcctggatgctgctggcttctggcaggtgtggcagagatttgatgctgatggccacggccacgagagcaagtttgcccagggcgagacagctgtgtatgactacccccgctgcctgtag

SEQ ID NO: 7198 - DNA, 213 bp, synthetic construct
  misc_feature 1..213: note = source = /note="Description of Artificial Sequence: Synthetic coding sequence"
  source 1..213: mol_type = other DNA
atgcctggggccatgaagatctttgtgttcatcctggccgccctgatcctgctggcccagatcttccaggccaggacagccatccaccgggccctgatcagcaagaggatggagggccactgtgaggccgagtgcctgacctttgaggtgaagattggaggctgcagagctgagctggcccccttctgctgcaagaacaggaagaagcactag

SEQ ID NO: 7199 - DNA, 711 bp, synthetic construct
  misc_feature 1..711: note = source = /note="Description of Artificial Sequence: Synthetic coding sequence"
  source 1..711: mol_type = other DNA
atgatgcctgctgagcggcggctgcccctgagctttgtgctggatgtgctggagggccgggcccagcaccctggggtgctgtatgtgcagaagcagtgcagcaacctgcccagcgagctgccccagctgctgcctgacctggagagccacgtgccctgggccagcgaggccctgggcaagatgccagatgctgtgaacttctggctgggggaggccgctgctgtgaccagcctgcacaaggaccactatgagaacctgtactgtgtggtgtctggagagaagcacttcctgttccacccccccagcgaccggcccttcatcccctacggcctgcgggtgcccggctgcctgcagttcccccacaccctgctgccctgggcccctgagctgtacaccccagccacctaccagctgacagaggagggcaccttcaaggtggtggatgaggaggccatggagaaggtgccctggatccccctggaccccctggccccagacctggcccgctaccccagctacagccaggcccaggccctgcgctgcaccgtgcgggccggggagatgctgtacctgcctgccctgtggttccaccacgtgcagcagagccagggctgcatcgctgtgaacttctggtatgacatggagtatgacctgaagtacagctacttccagctgctggacagcctgaccaaggccagcggcctggactag

SEQ ID NO: 7200 - DNA, 1098 bp, synthetic construct
  misc_feature 1..1098: note = source = /note="Description of Artificial Sequence: Synthetic coding sequence"
  source 1..1098: mol_type = other DNA
atggcccccaagctgatcaccgtgctgtgcctgggcttctgcctgaaccagaagatctgcccccatgctggggcccaggacaagttcagcctgagcgcctggcccagccctgtggtgcccctgggcggccgggtgaccctgagctgccacagccacctgcgctttgtgatctggaccatcttccagaccaccggcaccaggagccatgagctgcacacaggcctgagcaacaacatcaccatcagccctgtgaccccagagcacgccggcacctaccgctgtgtgggcatctacaagcacgccagcaagtggagcgctgagagcaacagcctgaagatcatcgtgacaggcctcttcaccaagcccagcatcagcgcccaccccagcagcctggtgcacgccggggcccgggtgtccctgcgctgccacagcgagctggcctttgatgagttcatcctgtacaaggagggccacatccagcacagccagcagctggaccagggcatggaggccggcatccactacgtggaggccgtgttctccatgggccctgtgaccccagcccacgccggggcctaccgctgctgcggctgcttcagccacagccgctatgagtggagcgcccccagcgaccccctggacatcgtcatcaccgggaagtacaagaagcccagcctgagcacccaggtggaccccatgatgaggctgggggagaagctgaccctcttctgcagcagcgagatcagctttgaccagtaccacctgttcagacatggagtggcccacggccagtggctgagcggcggccagaggcaccgggaggccttccaggccaacttctctgtgggccgggccacccctgtgcctgggggcacctaccgctgctacggcagcttcaatgacagcccctacaagccccctgtgacccgctgcaacttcaccccccaggagaccctgcgggtgctgctgtgccacagccagaacccccccctgaacctgaccccaccctggcagacccagagccccaggaaggccaacggccgcatgaagaggagcctgcagcagaagaggcacagaagaagctacatgcccagctag

SEQ ID NO: 7201 - DNA, 198 bp, synthetic construct
  misc_feature 1..198: note = source = /note="Description of Artificial Sequence: Synthetic coding sequence"
  source 1..198: mol_type = other DNA
atgaggaccttcctgttcctgtttgctgtgctcttcttcctgaccccagccaagaatgccttctttgatgagaagtgcaacaagctgaagggcacctgcaagaacaactgtgggaagaatgaggagctgattgccctgtgccagaagagcctgaagtgctgcaggaccatccagccctgtggcagcatcatcgactag

SEQ ID NO: 7202 - DNA, 198 bp, synthetic construct; identical to SEQ ID NO: 7201
  misc_feature 1..198: note = source = /note="Description of Artificial Sequence: Synthetic coding sequence"
  source 1..198: mol_type = other DNA

SEQ ID NO: 7203 - DNA, 237 bp, synthetic construct; identical to SEQ ID NO: 7193
  misc_feature 1..237: note = source = /note="Description of Artificial Sequence: Synthetic coding sequence"
  source 1..237: mol_type = other DNA

SEQ ID NO: 7204 - DNA, 2868 bp, synthetic construct
  misc_feature 1..2868: note = source = /note="Description of Artificial Sequence: Synthetic coding sequence"
  source 1..2868: mol_type = other DNA
atgtgggccggcctgctgctgcgggccgcctgtgtggccctgctgctgcccggggccccagcccggggctacacaggcaggaagcccccaggccactttgctgctgagcggcggcggctgggcccccacgtgtgcctgagcggctttggaagtggctgctgccccggctgggcccccagcatgggcggcggccactgcaccctgcccctgtgcagctttggctgcggcagcggcatctgcatcgcccccaacgtgtgcagctgccaggatggagagcagggcgccacctgcccagagacccacggcccctgtggggagtatggctgtgacctgacctgcaaccacggcggctgccaggaggtggcccgggtgtgccctgtgggcttctccatgacagaaacagctgtgggcatccgctgcacagacattgatgaatgtgtgaccagcagctgtgagggccactgtgtgaacacagagggcggctttgtgtgtgaatgtggccctggcatgcagctgtctgctgacagacacagctgccaggacacagatgagtgcctgggcaccccctgccagcagcgctgcaagaacagcatcggcagctacaagtgcagctgcaggacaggcttccacctgcacggcaacagacacagctgtgtggatgtgaatgaatgtagaagacccctggagcggcgggtgtgccaccacagctgccacaacacagtgggcagcttcctgtgcacctgccggcccggcttccggctgcgggctgacagagtgtcctgtgaggccttccccaaggctgtgctggcccccagcgccatcctgcagccccggcagcaccccagcaagatgctgctgctgctgcctgaggccggccggcctgccctgagccctggccacagcccccccagcggggcccctggccccccagctggggtgaggaccacccggctgcccagccccaccccccggctgcccaccagcagccccagcgcccctgtgtggctgctgagcaccctgctggccacccctgtgcccacagccagcctgctgggcaacctgcggccccccagcctgctgcagggcgaggtgatgggcacccccagcagcccccggggccctgagagcccccggctggccgccggccccagcccctgctggcacctgggcgccatgcatgagagccgcagccgctggacagagcccggctgcagccagtgctggtgtgaagatggcaaggtgacctgtgagaaggtgcgctgtgaggccgcctgcagccaccccatccccagcagagatggcggctgctgccccagctgcaccggctgcttccacagcggcgtggtgcgggcagaaggagatgtgttcagccccccaaatgaaaactgcaccgtgtgtgtgtgcctggccggaaatgtgtcctgcatcagcccagaatgtcccagcggcccctgccagaccccaccccagacagactgctgcacctgtgtgcctgtgcgctgctacttccacggccgctggtatgcagatggagctgtgttttctggaggaggagatgagtgcaccacctgtgtgtgccagaatggagaggtggagtgcagcttcatgccctgcccagagctggcctgcccccgggaggagtggaggctgggccctggccagtgctgcttcacctgccaggagcccacccccagcacaggctgcagcctggatgacaatggagtggagttccccatcggccagatctggagccctggggacccctgtgagctgtgcatctgccaggctgatggctctgtgtcctgcaagaggacagactgtgtggacagctgcccccaccccatccgcatccctggccagtgctgcccagactgcagcgctggctgcacctacacaggccgcatcttctacaacaatgagaccttccccagcgtgctggacccctgcctgagctgcatctgcctgctgggctctgtggcctgcagccctgtggactgccccatcacctgcacctaccccttccacccagatggagagtgctgccctgtgtgccgggactgcaactatgagggcaggaaggtggccaacggccaggtgttcaccctggatgatgagccctgcacccgctgcacctgccagctgggggaggtgtcctgtgagaaggtgccctgccagagggcctgtgccgaccctgccctgctgcccggggactgctgcagcagctgcccagacagcctgagccccctggaggagaagcagggcctgagcccccacggcaatgtggccttcagcaaggccggccgcagcctgcatggagacacagaggcccctgtgaactgcagcagctgccccggccccccaacagccagccccagcaggcctgtgctgcacctgctgcagctgctgctgcggaccaacctgatgaagacccagaccctgcccaccagccctgctggggcccacggcccccacagcctggccctgggcctgacagccaccttccctggagagcccggggccagcccccggctgagccctggccccagcaccccacctggggcccccaccctgcccctggccagccctggggccccccagcccccacctgtgaccccagagaggagcttcagcgccagcggggcccagatcgtgagccgctggccacccctgcccggcaccctgctgacagaggccagcgccctgtccatgatggaccccagccccagcaagacccccatcaccctgctgggcccccgggtgctgagccccaccaccagccggctgagcacagccctggccgccaccacccaccctggcccccagcagccccctgtgggcgccagcagaggagaggagagcaccatgtag

SEQ ID NO: 7205 - DNA, 270 bp, synthetic construct
  misc_feature 1..270: note = source = /note="Description of Artificial Sequence: Synthetic coding sequence"
  source 1..270: mol_type = other DNA
atggtgtcctgtgagcggcgggccagcaagtctgtgggccagatcctgctgtgggactttggctacacctgccgcctgagccacagaagaagaaacagcacagagatcctgagcaggaacctgcctgccctgtacacaggcatcaaggtgtgtgagaagaggcccagcattgacctgtgcatccaccactgcagctacttccagaagtgtgagaccaacaagatctgctgcagcgccttctgtggcaacatctgcatgagcatcctgtag

SEQ ID NO: 7206 - DNA, 600 bp, synthetic construct
  misc_feature 1..600: note = source = /note="Description of Artificial Sequence: Synthetic coding sequence"
  source 1..600: mol_type = other DNA
atggagaccttccccctgctgctgctgagcctgggcctggtgctggccgaggccagcgagagcaccatgaagatcatcaaggaggagttcacagatgaggagatgcagtatgacatggccaagagcggccaggagaagcagaccatcgagatcctgatgaaccccatcctgctggtgaagaacaccagcctgtccatgagcaaggatgacatgagcagcaccctgctgaccttccgcagcctgcactacaatgaccccaagggcaacagcagtggaaatgacaaggagtgctgcaatgacatgacagtgtggaggaaggtgtctgaggccaacggcagctgcaagtggagcaacaacttcatccgcagcagcacagaggtgatgagaagagtgcaccgggcccccagctgcaagtttgtgcagaaccctggcatcagctgctgtgagagcctggagctggagaacacagtgtgccagttcaccaccgggaagcagttcccccgctgccagtaccacagcgtgaccagcctggagaagatcctgactgtgctgaccggccacagcctgatgtcctggctggtgtgtggcagcaagctgtag

SEQ ID NO: 7207 - DNA, 729 bp, synthetic construct
  misc_feature 1..729: note = source = /note="Description of Artificial Sequence: Synthetic coding sequence"
  source 1..729: mol_type = other DNA
atggctgctgccacccggggctgccggccctggggcagcctgctgggcctgctgggcctggtgtctgctgctgctgctgcctgggacctggccagcctgcgctgcaccctgggcgccttctgtgaatgtgacttccggccagacctgcccggcctggagtgtgacctggcccagcacctggccggccagcacctggccaaggccctggtggtgaaggccctgaaggcctttgtgcgggaccctgcccccaccaagcccctggtgctgagcctgcacggctggacaggaacaggcaagagctatgtgagcagcctgctggcccactacctgttccagggcggcctgcggagcccccgggtgcaccacttcagccctgtgctgcacttcccccaccccagccacatcgagcgctacaagaaggacctgaagtcctgggtgcagggcaacctgacagcctgtggccgcagcctcttcctgtttgatgagatggacaagatgcctcctggcctgatggaggtgctgcggcccttcctgggcagctcctgggtggtgtatggcaccaactacaggaaggccatcttcatcttcatccgctggctgctgaagctgggccaccacggccgggccccaccccggcgcagcggggccctgcccccagccccagctgcccccaggcctgccctgcgggcccagagagctggccctgctggccctggggccaagggctag

SEQ ID NO: 7208 - DNA, 627 bp, synthetic construct
  misc_feature 1..627: note = source = /note="Description of Artificial Sequence: Synthetic coding sequence"
  source 1..627: mol_type = other DNA
atgctgggcctgctggtggccctgctggccctgggcctggccgtgtttgccctgctggatgtgtggtacctggtgcggctgccctgtgctgtgctgcgggcccggctgctgcagccccgggtgcgggacctgctggccgagcagcgcttccctggccgggtgctgcccagcgacctggacctgctgctgcacatgaacaatgcccgctacctgcgggaggccgactttgcccgggtggcccacctgacccgctgtggggtgctgggcgccctgcgggagctgcgggcccacacagtgctggccgccagctgtgcccggcaccggcgcagcctgcggctgctggagccctttgaggtgaggacccggctgctgggctgggatgaccgggccttctacctggaggccaggtttgtgtccctgagagatggctttgtgtgtgccctgctgcgcttccggcagcacctgctgggcaccagccctgagcgggtggtgcagcacctgtgccagaggagagtggagcccccagagctgcctgctgacctgcagcactggatctcctacaatgaggccagcagccagctgctgaggatggagagcggcctgagtgatgtgaccaaggaccagtag

SEQ ID NO: 7209 - DNA, 423 bp, synthetic construct
  misc_feature 1..423: note = source = /note="Description of Artificial Sequence: Synthetic coding sequence"
  source 1..423: mol_type = other DNA
atgctggtgaagctgaacagccaggcccggctgagctccatggtgaagaaggtgcggctgcccagccgctgtgagcccccaggcaccacctgcaccgtgtctggctggggcaccaccaccagcccagatgtgaccttccccagcgacctgatgtgtgtggatgtgaagctgatcagcccccaggactgcaccaaggtgtacaaggacctgctggagaacagcatgctgtgtgccggcatcccagacagcaagaagaatgcctgcaatggagacagcggcggccccctggtgtgccggggcaccctgcagggcctggtgtcctggggcaccttcccctgtggccagcccaatgaccccggggtgtacacccaggtgtgcaagttcaccaagtggatcaatgacaccatgaagaagcacaggtag

SEQ ID NO: 7210 - DNA, 354 bp, synthetic construct
  misc_feature 1..354: note = source = /note="Description of Artificial Sequence: Synthetic coding sequence"
  source 1..354: mol_type = other DNA
atgctgagcaaggcccacggctgcaagacagccctgagcctgggccgctgccccaagatccgggaggagtgtgagttccaggagagagatgtgtgcaccaaggaccggcagtgccaggacaacaagaagtgctgcgtgttcagctgtgggaagaagtgcctggacctgaagcaggatgtgtgtgagatgcccaaggagaccggcccctgcctggcctacttcctgcactggtggtatgacaagaaggacaacacctgcagcatgtttgtgtatggaggctgccagggcaacaacaacaacttccagagcaaggccaactgcctgaacacctgcaagaacaagcgcttcccctag

SEQ ID NO: 7211 - DNA, 2328 bp, synthetic construct
  misc_feature 1..2328: note = source = /note="Description of Artificial Sequence: Synthetic coding sequence"
  source 1..2328: mol_type = other DNA
atgcaccctggccctgaggaggccggcagcggccgctatggcccccgctacatcacagacatgggcgctggagaagatgatgagggctttgaagatgacctggacctggacatcagctttgaggaggtgaagcccctgcctgccaccaagggcggcaacaagaagttcctggtggagagcaagaagatgagcatcagcaaccccaagaccatcagccgcctcatcccccccaccagcgccagcctgcctgtgaccaccgtggccccccagcccatccccatccagaggaagggcaagaatggagtggccatcatgagccggctgtttgacatgccctgtgatgagaccctgtgcagcgctgacagcttctgtgtgaatgactacacctggggcggcagccgctgccagtgcaccctgggcaaaggaggagagagctgcagcgaggacatcgtcatccagtacccccagttcttcggccacagctatgtgacctttgagcccctgaagaacagctaccaggccttccagatcaccctggagttccgggcagaggccgaggatggcctgctgctgtactgtggagaaaatgagcacggccgcggggacttcatgagcctggccatcatccgccgcagcctgcagttccgcttcaactgtggcactggagtggccatcatcgtgtctgagaccaagatcaagctgggcggctggcacacagtgatgctgtacagagatggcctgaatggcctgctgcagctgaacaacggcacccctgtgacaggccagagccagggccagtacagcaagatcaccttccgcacccccctgtacctgggcggggcccccagcgcctactggctggtgcgggccaccggcaccaacagaggcttccagggctgtgtgcagagcctggccgtgaatggaagaagaattgacatgaggccctggcccctgggcaaggccctgtctggagcagatgtgggagaatgtagcagcggcatctgtgatgaggccagctgcatccacggcggcacctgcacagccatcaaggctgacagctacatctgcctgtgccccctgggcttcaagggccgccactgtgaagatgccttcaccctgaccatcccccagttccgggagagcctgcggagctatgctgccaccccctggcccctggagccccagcactacctgtccttcatggagtttgagatcaccttccggccagattctggagatggagtgctgctgtacagctatgacaccggcagcaaggacttcctgagcatcaacctggccggcggccacgtggagttccgctttgactgtggcagcggcactggagtgctgcggtctgaggaccccctgaccctgggcaactggcatgagctgcgggtgtccaggacagccaagaatggcatcctgcaggtggacaagcagaagatcgtggagggcatggccgagggcggcttcacccagatcaagtgcaacacagacatcttcatcggcggcgtgcccaactatgatgatgtgaagaagaacagcggcgtgctgaagcccttcagcggcagcatccagaagatcatcctgaatgacaggaccatccacgtgaagcatgacttcaccagcggcgtgaatgtggagaatgctgcccacccctgtgtgcgggccccctgtgcccatggaggcagctgccggcccaggaaggagggctatgactgtgactgccccctgggctttgagggcctgcactgccagaaggccatcatcgaggccatcgagatcccccagttcatcggccgcagctacctgacctatgacaacccagacatcctgaagagggtgtctggcagccgcagcaatgtgttcatgaggttcaagaccacagccaaggatggcctgctgctgtggaggggggacagccccatgaggcccaacagcgacttcatcagcctgggcctgagagatggagccctggtgttctcctacaacctgggcagcggcgtggccagcatcatggtgaatggcagcttcaatgatggccgctggcaccgggtgaaggctgtgagagatggccagagcggcaagatcaccgtggatgattatggagccaggacaggcaagagccctggcatgatgaggcagctgaacatcaatggagccctgtatgtgggcggcatgaaggagatcgccctgcacaccaaccggcagtacatgaggggcctggtgggctgcatcagccacttcaccctgagcacagactaccacatcagcctggtggaggatgctgtggatggcaagaacatcaacacctgtggggccaagtag

SEQ ID NO: 7212 - DNA, 1257 bp, synthetic construct
  misc_feature 1..1257: note = source = /note="Description of Artificial Sequence: Synthetic coding sequence"
  source 1..1257: mol_type = other DNA
atgaggaccctcttcaacctgctgtggctggccctggcctgcagccctgtgcacaccaccctgagcaagagtgatgccaagaaggccgccagcaagaccctgctggagaaggtgaagttctgcagctgctgccccggctggagcgccatggcccgctcctggctgacagccaccagcgccacccagagccagttcagtgacaagcctgtgcaggaccggggcctggtggtgacagacctgaaggccgagagcgtggtgctggagcacaggagctactgcagcgccaaggcccgggacagacactttgctggagatgtgctgggctacgtgaccccctggaacagccacggctatgatgtgaccaaggtgtttggcagcaagttcacccagatcagccctgtgtggctgcagctgaagaggcggggccgggagatgtttgaggtgacaggcctgcatgatgtggaccagggctggatgagagctgtgaggaagcacgccaagggcctgcacatcgtgccccggctgctgtttgaggactggacctatgatgacttcagaaatgtgctggacagtgaagatgaaattgaggagctgagcaagacagtggtgcaggtggccaagaaccagcactttgatggctttgtggtggaggtgtggaaccagctgctgagccagaagagggtgggcctcatccacatgctgacccacctggccgaggccctgcaccaggcccggctgctggccctgctggtgattcctccagccatcaccccaggcacagaccagctgggcatgttcacccacaaggagtttgagcagctggcccctgtgctggatggcttcagcctgatgacctatgactacagcacagcccaccagcccggccccaatgcccccctgtcctgggtgcgggcctgtgtgcaggtgctggaccccaagagcaagtggaggagcaagatcctgctgggcctgaacttctacggcatggactatgccaccagcaaggatgcccgggagcctgtggtgggcgcccgctacatccagaccctgaaggaccaccggcccaggatggtgtgggacagccaggccagcgagcacttctttgagtacaagaagagccgcagcggccgccacgtggtgttctaccccaccctgaagagcctgcaggtgcggctggagctggcccgggagctgggcgtgggcgtgtccatctgggagctgggccagggcctggactacttctatgacctgctgtag

SEQ ID NO: 7213 - DNA, 813 bp, synthetic construct
  misc_feature 1..813: note = source = /note="Description of Artificial Sequence: Synthetic coding sequence"
  source 1..813: mol_type = other DNA
atgatgctgcggctgctgagcagcctgctgctggtggccgtggccagcggctacggcccccccagcagccggcccagcagccgggtggtgaatggagaagatgctgtgccctacagctggccctggcaggtgtccctgcagtatgagaagagcggcagcttctaccacacctgtggcggcagcctgattgccccagactgggtggtgacagctggccactgcatcagcagcagcaggacctaccaggtggtgctgggggagtatgacagagctgtgaaggagggccctgagcaggtgatccccatcaacagcggggacctgtttgtgcaccccctgtggaacagaagctgtgtggcctgtggaaatgacatcgccctgatcaagctgagccgcagcgcccagctgggagatgctgtgcagctggccagcctgcccccagctggggacatcctgcccaatgagaccccctgctacatcaccggctggggccgcctgtacaccaacggccccctgcctgacaagctgcaggaggccctgctgcctgtggtggactatgagcactgcagccgctggaactggtggggcagctctgtgaagaagaccatggtgtgtgccggcggggacatccgcagcggctgcaatggagacagcggcggccccctgaactgccccacagaagatggcggctggcaggtgcatggagtgaccagctttgtgtctgccttcggctgcaacaccaggaggaagcccaccgtcttcaccagggtgtctgccttcatcgactggattgaggagaccatcgccagccactag

SEQ ID NO: 7214 - DNA, 585 bp, synthetic construct; identical to SEQ ID NO: 6927
  misc_feature 1..585: note = source = /note="Description of Artificial Sequence: Synthetic coding sequence"
  source 1..585: mol_type = other DNA

SEQ ID NO: 7215 - DNA, 1308 bp, synthetic construct
  misc_feature 1..1308: note = source = /note="Description of Artificial Sequence: Synthetic coding sequence"
  source 1..1308: mol_type = other DNA
atgcagggccagggcagaagaagaggcacctgcaaggacatcttctgcagcaagatggccagctacctgtatggagtgctgtttgctgtgggcctgtgtgcccccatctactgtgtgtccccagccaatgcccccagcgcctacccccggcccagcagcaccaagagcaccccagccagccaggtgtacagcctgaacacagactttgccttccggctgtacagaaggctggtgctggagacccccagccagaacatcttcttcagccctgtgtctgtgtccaccagcctggccatgctgagcctgggcgcccacagcgtgaccaagacccagatcctgcagggcctgggcttcaacctgacccacaccccagagagcgccatccaccagggcttccagcacctggtgcacagcctgactgtgcccagcaaggacctgaccctgaagatgggcagcgccctgtttgtgaagaaggagctgcagctgcaggccaacttcctgggcaatgtgaagaggctgtatgaggccgaggtgttcagcacagacttcagcaaccccagcatcgcccaggcccgcatcaacagccacgtgaagaagaagacccagggcaaggtggtggacatcatccagggcctggacctgctgacagccatggtgctggtgaaccacatcttcttcaaggccaagtgggagaagcccttccaccctgagtacaccaggaagaacttccccttcctggtgggggagcaggtgacagtgcacgtgcccatgatgcaccagaaggagcagtttgccttcggcgtggacacagagctgaactgctttgtgctgcagatggactacaagggagatgctgtggccttctttgtgctgcccagcaagggcaagatgaggcagctggagcaggccctgagcgcccggaccctgaggaagtggagccacagcctgcagaagcgctggattgaggtgttcatcccccgcttcagcatcagcgccagctacaacctggagaccatcctgcccaagatgggcatccagaatgtgtttgacaagaatgctgacttcagcggcatcgccaagagggacagcctgcaggtgtccaaggccacccacaaggctgtgctggatgtgtctgaggagggcacagaggccacagctgccaccaccaccaagttcatcgtgcgcagcaaggatggccccagctacttcaccgtgtccttcaacagaaccttcctgatgatgatcaccaacaaggccacagatggcatcctcttcctgggcaaggtggagaaccccaccaagagctag

SEQ ID NO: 7216 - DNA, 393 bp, synthetic construct
  misc_feature 1..393: note = source = /note="Description of Artificial Sequence: Synthetic coding sequence"
  source 1..393: mol_type = other DNA
atggccagtgacctgatccgcaccatcctggccgtggccctgatcagcaagctgggcacagctgtggatgctgagctgatgcccagcggggccatcctgcagaacaagcgggagaacctgccccgggtgtgccacgccctggccttcctgggcatggcccgctgccaggacctcttcctggtgcggctgcagggctggaagctgggcacccgcttccaggacggccccaggagcaccccccaggaggagggcggcagcccccagaggaagaggggcatgcctgtgcagatccacttcctgctgaagagcttcctgagcagccccatcacctttgccttcatcagcctggccaggacagtgtccctggccacagccatctgcaagatcgtgtag

SEQ ID NO: 7217 - DNA, 837 bp, synthetic construct
  misc_feature 1..837: note = source = /note="Description of Artificial Sequence: Synthetic coding sequence"
  source 1..837: mol_type = other DNA
atgcagtggctgcgggtgcgggagagccctggagaggccaccggccaccgggtgaccatgggcacagctgccctgggccctgtgtgggccgccctgctgctcttcctgctgatgtgtgagatccccatggtggagctgacctttgacagagctgtggccagcggctgccagcgctgctgtgacagcgaggaccccctggaccctgcccacgtgtcctctgccagcagcagcggccggccccacgccctgcctgagatccggccctacatcaacatcaccatcctgaagggggacaagggggaccccggccccatgggcctgcccggctacatgggccgggagggcccccagggcgagcccggcccccagggcagcaagggggacaagggggagatgggcagccctggggccccctgccagaagcgcttctttgccttctctgtgggcaggaagacagccctgcacagcggggaggacttccagaccctgctgtttgagcgggtgtttgtgaacctggatggctgctttgacatggccaccggccagtttgctgcccccctgcggggcatctacttcttcagcctgaatgtgcacagctggaactacaaggagacctacgtgcacatcatgcacaaccagaaggaggccgtcatcctgtatgcccagcccagcgagaggagcatcatgcagagccagagcgtgatgctggacctggcctacggggacagagtgtgggtgcggctcttcaagaggcagcgggagaatgccatctacagcaatgactttgacacctacatcaccttcagcggccacctgatcaaggccgaggatgactag

SEQ ID NO: 7218 - DNA, 1635 bp, synthetic construct
  misc_feature 1..1635: note = source = /note="Description of Artificial Sequence: Synthetic coding sequence"
  source 1..1635: mol_type = other DNA
atgtgcaccgtggtggaccccagaattgtgcggcgctacctgctgcggcggcagctgggccagggcgcctacggcatcgtgtggaaggctgtggacagaagaactggagaggtggtggccatcaagaagatctttgatgccttccgggacaagacagatgcccagaggaccttccgggagatcaccctgctgcaggagtttggagaccaccccaacatcatcagcctgctggatgtgatccgggcagaaaatgaccgggacatctacctggtgtttgagttcatggacacagacctgaatgctgtgatcagaaaaggaggcctgctgcaggatgtgcacgtgcgcagcatcttctaccagctgctgcgggccacccgcttcctgcacagcggccacgtggtgcaccgggaccagaagcccagcaatgtgctgctggatgccaactgcaccgtgaagctgtgtgactttggcctggcccggagcctgggggacctgcctgagggccctgaggaccaggccgtgacagaatatgtggccacccgctggtaccgggcccctgaggtgctgctgagcagccaccgctacaccctgggcgtggacatgtggagcctgggctgcatcctgggggagatgctgcggggccggcccctcttccctggcaccagcaccctgcaccagctggagctgatcctggagaccatccccccacccagcgaggaggacctgctggccctgggcagcggctgccgggcctctgtgctgcaccagctgggcagccggccccggcagaccctggatgccctgctgcccccagacaccagccctgaggccctggacctgctgcggcggctgctggtgtttgccccagacaagaggctgagcgccacccaggccctgcagcacccctacgtgcagcgcttccactgccccagtgatgagtgggcccgggaggctgatgtgcggccccgggcccatgaaggagtgcagctgtctgtgcctgagtaccgcagccgggtgtaccagatgatcctggagtgtggcggcagcagcggcaccagccgggagaagggccctgagggcgtgagccccagccaggcccacctgcacaagcccagggctgacccccagctgcccagcaggacccctgtgcagggcccccggccccggccccagagcagccctggccatgaccctgctgagcacgagagcccccgggccgccaagaatgtgccccggcagaacagcgcccccctgctgcagacagccctgctgggcaatggagagcggcccccaggggccaaggaggccccacccctgaccctgagcctggtgaagcccagcggcagaggagctgcccccagcctgaccagccaggccgccgcccaggtggccaaccaggccctgatccggggggactggaacagaggaggcggcgtgcgggtggcctctgtgcagcaggtgcccccccggctgcccccagaggcccggcctggaagaaggatgttcagcaccagcgccctgcagggcgcccagggcggggcccgggccctgctgggcggctacagccaggcctatggaacagtgtgccacagcgccctgggccacctgcccctgctggagggccaccacgtgtag

SEQ ID NO: 7219 - DNA, 399 bp, synthetic construct
  misc_feature 1..399: note = source = /note="Description of Artificial Sequence: Synthetic coding sequence"
  source 1..399: mol_type = other DNA
atgaagagcagcggcctcttccccttcctggtgctgctggccctgggcaccctggccccctgggccgtggagggcagcggcaagagcttcaaggccggcgtgtgcccccccaagaagagcgcccagtgcctgcgctacaagaagccagagtgccagagcgactggcagtgccctgggaagaagcgctgctgcccagacacctgtggcatcaagtgcctggaccctgtggacacccccaaccccaccaggaggaagccaggcaagtgccctgtgacctacggccagtgcctgatgctgaacccccccaacttctgtgagatggatggccagtgcaagagggacctgaagtgctgcatgggcatgtgtgggaagagctgtgtgtcccctgtgaaggcctag

SEQ ID NO: 7220 - DNA, 1401 bp, synthetic construct
  misc_feature 1..1401: note = source = /note="Description of Artificial Sequence: Synthetic coding sequence"
  source 1..1401: mol_type = other DNA
atgaagccacccctgctggtgttcatcgtgtgcctgctgtggctgaaggacagccactgtgcccccacctggaaggacaagacagccatcagcgagaacctgaagagcttcagcgaggtgggggagattgatgctgatgaggaggtgaagaaggccctgaccggcatcaagcagatgaagatcatgatggagaggaaggagaaggagcacaccaacctgatgagcaccctgaagaagtgccgggaggagaagcaggaggccctgaagctgctgaatgaggtgcaggagcacctggaggaggaggagcggctgtgccgggagagcctggccgacagctggggagaatgtcgcagctgcctggagaacaactgcatgaggatctacaccacctgccagcccagctggagctctgtgaagaacaagattgagcgcttcttcaggaagatctaccagttcctgttccccttccacgaggacaatgagaaggacctgcccatcagcgagaagctgattgaagaagatgcccagctgacccagatggaggatgtgttcagccagctgactgtggatgtgaacagcctcttcaacagaagcttcaacgtgttccggcagatgcagcaggagtttgaccagaccttccagagccacttcatcagtgacacagacctgacagagccctacttcttccctgccttcagcaaggagcccatgaccaaggctgacctggagcagtgctgggacatccccaacttcttccagctgttctgcaacttctctgtgtccatctatgaatctgtgtctgagaccatcaccaagatgctgaaggccatcgaggacctgcccaagcaggacaaggccccagaccatggaggcctcatcagcaagatgctgcccggccaggaccggggcctgtgtggggagctggaccagaacctgagccgctgcttcaagttccacgagaagtgccagaagtgccaggcccacctgtctgaggactgcccagatgtgcctgccctgcacacagagctggatgaggccatccggctggtgaatgtgagcaaccagcagtatggccagatcctgcagatgaccaggaagcacctggaggacacagcctacctggtggagaagatgaggggccagtttggctgggtgtctgagctggccaaccaggcccctgagacagagatcatcttcaacagcatccaggtggtgccccgcatccacgagggcaacatcagcaagcaggatgagaccatgatgacagacctgagcatcctgcccagcagcaacttcaccctgaagatccccctggaggagagcgctgagagcagcaacttcatcggctacgtggtggccaaggccctgcagcacttcaaggagcacttcaagacctggtag

SEQ ID NO: 7221 - DNA, 522 bp, synthetic construct
  misc_feature 1..522: note = source = /note="Description of Artificial Sequence: Synthetic coding sequence"
  source 1..522: mol_type = other DNA
atgcactggaagatgctgctgctgctgctgctgtactacaatgctgaggcctccatgtgccaccgctggagcagagctgtgctcttccctgctgcccaccggcccaagaggagcagcagcctgcccctgaaccctgtgctgcagaccagcctggaggaggtggagctgctgtatgagttcctgctggccgagctggagatcagcccagacctgcagatcagcatcaaggatgaggagctggccagcctgaggaaggccagtgacttcagaacagtgtgcaacaacgtcatccccaagagcatcccagacatccggcggctgagcgccagcctgagcagccaccctggcatcctgaagaaggaggactttgagaggacagtgctgaccctggcctacacagcctacagaacagccctgagccacggccaccagaaggacatctgggcccagagcctggtgtccctcttccaggccctgcggcatgacctgatgaggagcagccagcccggggtgcccccatag

SEQ ID NO: 7222 - DNA, 1473 bp, synthetic construct
  misc_feature 1..1473: note = source = /note="Description of Artificial Sequence: Synthetic coding sequence"
  source 1..1473: mol_type = other DNA
atggaggacagcgacagcgctgccaagcagctgggcctggccgaggccgctgctgtggccgctgctgctgctgtggccgctgctgctgctgctgctgctggaggagaggccgaggagcctgtgctgagcagagatgaggacagcgaggaggatgctgacagcgaggccgagcgggagaccccccgggtgacagctgtggccgtgatggctgctgagcccggccacatggacatgggcgctgaggccctgcccggcccagatgaagctgctgctgctgctgcctttgctgaggtgaccaccgtgacagtggccaacgtgggcgctgctgctgacaacgtgttcaccacctctgtggccaatgctgccagcatcagcggccacgtgctgagcggccgcacagccctgcagattggagacagcctgaacacagagaaggccaccctgattgtggtgcacacagatggcagcatcgtggagaccaccggcctgaagggccctgctgcccccctgaccccaggcccccagagcccccccacccccctggcccctggccaggagaagggcggcaccaagtacaactgggaccccagcgtgtatgattctgagctgcctgtgcgctgcaggaacatcagcggcaccctgtacaagaaccggctgggcagcggctgggacctgaagcccagccgctgcctgctgcacctgtgctgcctgctgcggagacatgacctgatcaccgtgaccccatctggccagatcaccaccagcggggccctgacctttgaccgggccagcacagtggaggccacagctgtgatcagcgagagccctgcccagggagatgtgtttgctggggccaccgtgcaggaggcctctgtgcagcccccctgccgggccagccaccctgagccccactacccaggctaccaggacagctgccagatcgcccccttccctgaggccgccctgcccaccagccaccccaagatcgtgctgaccagcctgcctgccctggccgtgcccccacccacccccaccaaggccgcccccccagccctggtgaatggcctggagctgtctgagcccaggtcctggctgtacctggaggagatggtgaacagcctgctgaacacagcccagcagctgaagaccctgtttgagcaggccaagcacgccagcacctaccgggaggccgccaccaaccaggccaagatccacgcagatgctgagaggaaggaggtgatccaccccccccggctgcccaaggtgctgggcctgcagcagagctgtgtgaactgtggccgggaggccatgtctgaatgtacaggctgccacaaggtgaactactgcagcaccttctgccagaggaaggactggaaggaccaccagcacatctgtggccagagcgctgctgtgacagtgcaggctgatgaggtgcacgtggccgagagcgtgatggagaaggtgacagtgtag

SEQ ID NO: 7223 - DNA, 1476 bp, synthetic construct
  misc_feature 1..1476: note = source = /note="Description of Artificial Sequence: Synthetic coding sequence"
  source 1..1476: mol_type = other DNA
atgcccagcacagtgctgcccagcacagtgctgcccagcctgctgcccacagctggggccggctggagcatgcgctggatcctgtgctggagcctgaccctgtgcctgatggcccagacagccctgggcgccctgcacaccaagaggccccaggtggtgaccaagtatggcaccctgcagggcaagcagatgcacgtgggcaagacccccatccaggtgttcctgggcgtgcccttcagccggccccccctgggcatcctgcgctttgcccctcctgagcccccagagccctggaagggcatcagagatgccaccacctacccacctggctgcctgcaggagagctggggccagctggcctccatgtatgtgtccacccgggagcgctacaagtggctgcgcttcagcgaggactgcctgtacctgaatgtgtatgccccagcccgggcccctggggacccccagctgcctgtgatggtgtggttccctggaggagccttcatcgtgggcgccgccagcagctatgagggcagtgacctggccgcccgggagaaggtggtgctggtgttcctgcagcaccggctgggcatcttcggcttcctgagcacagatgacagccacgcccggggcaactggggcctgctggaccagatggccgccctgcgctgggtgcaggagaacattgctgcctttggaggagaccctggaaatgtgaccctgtttggccagagcgctggggccatgagcatcagcggcctgatgatgagccccctggccagcggcctcttccaccgggccatcagccagagcggcacagccctcttccgcctcttcatcaccagcaaccccctgaaggtggccaagaaggtggcccacctggccggctgcaaccacaacagcacccagatcctggtgaactgcctgcgggccctgagcggcaccaaggtgatgagggtgagcaacaagatgaggttcctgcagctgaacttccagagggaccctgaggagatcatctggagcatgagccctgtggtggatggagtggtgatcccagatgaccccctggtgctgctgacccagggcaaggtgtcctctgtgccctacctgctgggcgtgaacaacctggagttcaactggctgctgccctacatcatgaagttccccctgaaccggcaggccatgaggaaggagaccatcaccaagatgctgtggagcaccaggaccctgctgaacatcaccaaggagcaggtgcccctggtggtggaggagtacctggacaacgtgaatgaacatgactggaagatgctgaggaacaggatgatggacatcgtgcaggatgccacctttgtgtatgccaccctgcagacagcccactaccaccgggagacccccatgatgggcatctgcccagctggccacgccaccaccaggatgaagagcacctgctcctggatcctgccccaggagtgggcctag

SEQ ID NO: 7224 - DNA, 753 bp, synthetic construct
  misc_feature 1..753: note = source = /note="Description of Artificial Sequence: Synthetic coding sequence"
  source 1..753: mol_type = other DNA
atgcctgccagcagccccttcctgctggcccccaagggccccccaggcaacatgggcggccctgtgcgggagcccgccctgtctgtggccctgtggctgtcctggggcgccgccctgggcgctgtggcctgtgccatggccctgctgacccagcagacagagctgcagagcctgcggcgggaggtgtcccggctgcagggcaccggcggccccagccagaatggagagggctacccctggcagagcctgcctgagcagagcagtgatgccctggaggcctgggagaatggagagaggagcaggaagagaagagctgtgctgacccagaagcagaagaagcagcacagcgtgctgcacctggtgcccatcaatgccaccagcaaggatgacagtgatgtgacagaggtgatgtggcagcctgccctgcggcggggccggggcctgcaggcccagggctatggagtgcgcatccaggatgctggggtgtacctgctgtacagccaggtgctcttccaggatgtgaccttcaccatgggccaggtggtgtcccgggagggccagggccggcaggagaccctcttccgctgcatccgctccatgcccagccacccagaccgggcctacaacagctgctacagcgctggggtcttccacctgcaccagggcgacatcctgagcgtcatcatcccccgggcccgggccaagctgaacctgagcccccacggcaccttcctgggctttgtgaagctgtag

SEQ ID NO: 7225 - DNA, 1437 bp, synthetic construct
  misc_feature 1..1437: note = source = /note="Description of Artificial Sequence: Synthetic coding sequence"
  source 1..1437: mol_type = other DNA
atgagcccccccctgctgaagctgggcgctgtgctgagcaccatggccatgatcagcaactggatgagccagaccctgcccagcctggtgggcctgaacaccacccggctgagcaccccagacaccctgacccagatcagccccaaggagggctggcaggtgtacagcagcgcccaggaccctgatggccgctgcatctgcaccgtggtggcccctgagcagaacctgtgcagcagagatgccaagagccggcagctgcggcagctgctggagaaggtgcagaacatgagccagagcattgaggtgctgaacctgcggacccagagggacttccagtatgtgctgaagatggagacccagatgaagggcctgaaggccaagttccggcagattgaagatgacaggaagaccctgatgaccaagcacttccaggagctgaaggagaagatggatgagctgctgcccctcatccctgtgctggagcagtacaagacagatgccaagctgatcacccagttcaaggaggagatccggaacctgtctgctgtgctgaccggcatccaggaggagattggagcctatgactatgaggagctgcaccagagggtgctgagcctggagacccggctgcgggactgcatgaagaagctgacctgtgggaagctgatgaagatcaccggccctgtgacagtgaagaccagcggcaccaggtttggagcctggatgacagaccccctggccagcgagaagaacaacagagtgtggtacatggacagctacaccaacaacaagatcgtgcgggagtacaagagcattgctgactttgtgtctggagctgagagcaggacctacaacctgcccttcaagtgggccggcaccaaccacgtggtgtacaacggcagcctgtacttcaacaagtaccagagcaacatcatcatcaagtacagctttgacatgggccgggtgctggcccagaggagcctggagtatgccggcttccacaacgtgtacccctacacctggggcggcttcagtgacatcgacctgatggctgatgagatcggcctgtgggccgtgtatgccaccaaccagaatgccggcaacatcgtcatcagccagctgaaccaggacaccctggaggtgatgaagtcctggagcacaggctaccccaagaggtctgctggggagagcttcatgatctgtggcaccctgtatgtgaccaacagccacctgaccggggccaaggtgtactacagctacagcaccaagaccagcacctatgagtacacagacatccccttccacaaccagtacttccacatctccatgctggactacaatgcccgggaccgggccctgtatgcctggaacaacggccaccaggtgctcttcaacgtgaccctcttccacatcatcaagacagaagatgacacctag

SEQ ID NO: 7226 - DNA, 1101 bp, synthetic construct
  misc_feature 1..1101: note = source = /note="Description of Artificial Sequence: Synthetic coding sequence"
  source 1..1101: mol_type = other DNA
atggcccgggagcggcccccaggccggggctgcggcgtgctgcggcgctgcctgctgggcgctgtgctgctgtttggcctgcggctgtgtgccgagctgcggcgggccggccctggcagccccaccaggtctgcccctcctggccctgcctggaggcctcctggcccccacctgcccccagcccctggccagcccaggggggccagccggcggcaggtgacctacgtgcgcagcggccggcgggcccctcctgggggcggcggcagcggcaccccagagcccggctgctgtgccccccggggccggcccaggaggaagggcccccgctggcacatcgacctgcagccctgggccggcagcgcccagagcctggatgaggaggcctggaggttcctgcgctacatcagcaccacccagatcgcctgcaaccacatgaacacagacagcctggccacagacagcagccccacccacaagccctggagcgtgtgcctggatgaccgcttcaacctggcccaccagatccggaacaagcagtgccgcctgtacagcctgggcctgggcagtgatgacacccactttgaggtgtccatggccaacaacggctgtgaggtgcacagatttgaccccagcgtgaagagcgcccacatcctggagagccagcacctgtggtaccaccggctgagcattgactggagggacccccaccctgctgtggccgcccagaagccccacagcaacaccaggaagctgggcagcatcctgaatgaatttggccaccacaagattgatgtgctgaaggctgacctggagagcgctgagtggaaggtgctggagaacctgatcctggaggatgtgctggagcagatcggccagctgatctttgagatccacctgcactggccaggctttgaggtgtctggcagtgacagctctgtggtgcgcttctggtacagcctgctgaaggagctggagcagaaggacttccgcctcttccacagctacaaggacctgagcaagccccagctgttcctgaagaaggacatcttcaatgccagcagctgctacaccctgtcctgggtgaacacccgctggaagtag

SEQ ID NO: 7227 - DNA, 300 bp, synthetic construct
  misc_feature 1..300: note = source = /note="Description of Artificial Sequence: Synthetic coding sequence"
  source 1..300: mol_type = other DNA
atgaagatccctgtgctgcctgctgtggtgctgctgagcctgctggtgctgcacagcgcccagggcgccaccctgggcggccctgaggaggagagcaccattgaaaattatgccagcaggcctgaggccttcaacacccccttcctgaacatcgacaagctgcggagcgccttcaaggcagatgagttcctgaactggcacgccctgtttgagagcatcaagaggaagctgcccttcctgaactgggatgccttccccaagctgaagggcctgcggagcgccaccccagatgcccagtag

SEQ ID NO: 7228 - DNA, 618 bp, synthetic construct
  misc_feature 1..618: note = source = /note="Description of Artificial Sequence: Synthetic coding sequence"
  source 1..618: mol_type = other DNA
atgatgaggaccctcatcaccacccaccccctgcccctgctgctgctgccccagcagctgctgcagctggtgcagttccaggaggtggacacagactttgacttccctgaggaggacaagaaggaggagtttgaggagtgcctggagaagttcttcagcacaggccctgcccggccccccaccaaggagaaggtgaagagaagagtgctgattgagcccggcatgcccctgaaccacatcgagtactgcaaccacgagatcatgggcaagaatgtgtactacaagcaccgctgggtggccgagcactacttcctgctgatgcagtatgatgagctgcagaagatctgctacaacagatttgtgccctgcaagaatggcatcaggaagtgcaacagaagcaagggcctggtggagggcgtgtactgcaacctgacagaggcctttgagatcccagcctgcaagtatgagagcctgtacaggaagggctacgtgctgatcacctgctcctggcagaatgagatgcagaagaggatcccccacaccatcaatgacctggtggagcccccagagcaccgctccttcctgtctgaagatggagtgtttgtgatcagcccctag

SEQ ID NO: 7229 - DNA, 402 bp, synthetic construct
  misc_feature 1..402: note = source = /note="Description of Artificial Sequence: Synthetic coding sequence"
  source 1..402: mol_type = other DNA
atgctggactggaggctggccagcgcccacttcatcctggccgtgaccctgaccctgtggagcagcggcaaggtgctgtctgtggatgtgaccaccacagaggcctttgacagcggcgtgattgatgtgcagagcacccccaccgtgcgggaggagaagagcgccacagacctgacagccaagctgctgctgctggatgagctggtgtccctggagaatgatgtgattgagaccaagaagaagaggagcttcagcggcttcggcagccccctggaccggctgtctgctggctctgtggaccacaagggcaagcagaggaaggtggtggaccaccccaagaggcgcttcggcatccccatggacagaattggaagaaaccggctgagcaacagccggggctag

SEQ ID NO: 7230 - DNA, 846 bp, synthetic construct
  misc_feature 1..846: note = source = /note="Description of Artificial Sequence: Synthetic coding sequence"
  source 1..846: mol_type = other DNA
atgggcagccggggccagggcctgctgctggcctactgcctgctgctggcctttgccagcggcctggtgctgagccgggtgccccacgtgcagggcgagcagcaggagtgggagggcacagaggagctgcccagccccccagaccacgccgagagagctgaggagcagcacgagaagtaccggcccagccaggaccagggcctgcctgccagccgctgcctgcgctgctgtgaccccggcacctccatgtacccagccacagctgtgccccagatcaacatcaccatcctgaagggggagaagggggacagaggagaccggggcctgcagggcaagtatggcaagacaggcagcgctggggcccggggccacacaggccccaagggccagaagggctccatgggcgcccctggagagcgctgcaagagccactacgccgccttctctgtgggcaggaagaagcccatgcacagcaaccactactaccagaccgtcatctttgacacagaatttgtgaacctgtatgaccacttcaacatgttcaccgggaagttctactgctacgtgcccggcctgtacttcttcagcctgaatgtgcacacctggaaccagaaggagacctacctgcacatcatgaagaatgaggaggaggtggtgatcctgtttgcccaggtgggggacaggagcatcatgcagagccagagcctgatgctggagctgcgggagcaggaccaggtgtgggtgcggctgtacaagggggagcgggagaatgccatcttcagcgaggagctggacacctacatcaccttcagcggctacctggtgaagcacgccacagagccctag

SEQ ID NO: 7231 - DNA, 132 bp, synthetic construct
  misc_feature 1..132: note = source = /note="Description of Artificial Sequence: Synthetic coding sequence"
  source 1..132: mol_type = other DNA
atgaagctgctgtacctgttcctggccatcctgctggccatcgaggagcctgtgatcagcgccctggtgaggacagtgggctgctgcctggacacagcccggcagaccccccaccccagcatgcacggctag

SEQ ID NO: 7232 - DNA, 861 bp, synthetic construct
  misc_feature 1..861: note = source = /note="Description of Artificial Sequence: Synthetic coding sequence"
  source 1..861: mol_type = other DNA
atgaaggtgctgctgctgaccggcctgggcgccctcttctttgcctactactgggatgacaactttgatcctgccagcctgcagggcgcccgggtgctgctgactggagccaatgccggcgtgggggaggagctggcctaccactacgcccggctgggcagccacctggtgctgacagcccacacagaggccctgctgcagaaggtggtgggcaactgcaggaagctgggcgcccccaaggtgttctacatcgctgctgacatggccagccctgaggcccctgagagcgtggtgcagtttgccctggacaagctgggcggcctggactacctggtgctgaaccacatcggcggggccccagctggcacccgggcccggagcccccaggccacccgctggctgatgcaggtgaactttgtgtcctatgtgcagctgaccagccgggccctgcccagcctgacagacagcaagggcagcctggtggtggtgagcagcctgctgggccgggtgcccaccagcttcagcaccccctacagcgctgccaagtttgccctggatggcttcttcggcagcctgcggcgggagctggatgtgcaggatgtgaatgtggccatcaccatgtgtgtgctgggcctgcgggaccgggccagcgctgctgaggccgtgcggggcgtgaccagggtgaaggccgcccctggccccaaggccgccctggccgtcatccggggcggggccaccagggctgctggggtcttctacccctggaggttccggctgctgtgcctgctgcggcgctggctgccccggccccgggcctggttcatccggcaggagctgaatgtgacagctgctgctgcctag

SEQ ID NO: 7233 - DNA, 1326 bp, synthetic construct
  misc_feature 1..1326: note = source = /note="Description of Artificial Sequence: Synthetic coding sequence"
  source 1..1326: mol_type = other DNA
atgagggtggtgaccatcgtcatcctgctgtgcttctgcaaggctgctgagctgaggaaggccagccctggctctgtgcgcagccgggtgaaccacggccgggccggcggcggcagaagaggcagcaaccctgtgaagagatatgcccctggcctgccctgtgatgtgtacacctacctgcacgagaagtacctggactgccaggagaggaagctggtgtatgtgctgcccggctggccccaggacctgctgcacatgctgctggccaggaacaagatccgcaccctgaagaacaacatgttcagcaagttcaagaagctgaagagcctggacctgcagcagaatgagatcagcaagattgagagcgaggccttcttcggcctgaacaagctgaccaccctgctgctgcagcacaaccagatcaaggtgctgacagaggaggtgttcatctacacccccctgctgagctacctgcggctgtatgacaacccctggcactgcacctgtgaaattgagaccctcatctccatgctgcagatccccaggaacagaaacctgggcaactatgccaagtgtgagagcccccaggagcagaagaacaagaagctgcggcagatcaagtctgagcagctgtgcaatgaggaggagaaggagcagctggaccccaagccccaggtgtctggccggccccctgtgatcaagccagaggtggacagcaccttctgccacaactacgtgttccccatccagaccctggactgcaagaggaaggagctgaagaaggtgcccaacaacatccccccagacatcgtgaagctggacctgagctacaacaagatcaaccagctgcggcccaaggagtttgaagatgtgcatgagctgaagaagctgaacctgagcagcaatggcatcgagttcattgatcctgctgccttcctgggcctgacccacctggaggagctggacctgagcaacaacagcctgcagaactttgattatggagtgctggaggacctgtacttcctgaagctgctgtggctgcgggacaacccctggaggtgtgactacaacatccactacctgtactactggctgaagcaccactacaacgtgcacttcaacggcctggagtgcaagaccccagaggagtacaagggctggagcgtgggcaagtacatccgcagctactatgaagaatgtcccaaggacaagctgcctgcctacccagagagctttgaccaggacacagaagatgatgagtgggagaagaagcaccgggaccacacagccaagaagcagagcgtcatcatcaccatcgtgggctag

SEQ ID NO: 7234 - DNA, 1539 bp, synthetic construct
  misc_feature 1..1539: note = source = /note="Description of Artificial Sequence: Synthetic coding sequence"
  source 1..1539: mol_type = other DNA
atggccgagagcggcctggccatgtggcccagcctgctgctgctgctgctgctgcccggccccccacctgtggccggcctggaggatgctgccttcccccacctgggggagagcctgcagcccctgccccgggcctgccccctgcgctgcagctgcccccgggtggacacagtggactgtgatggcctggacctgcgggtcttcccagacaacatcaccagggctgcccagcacctgagcctgcagaacaaccagctgcaggagctgccctacaatgagctgagccggctgagcggcctgcggaccctgaacctgcacaacaacctgatcagcagcgagggcctgcctgatgaggcctttgagagcctgacccagctgcagcacctgtgtgtggcccacaacaagctgtctgtggccccccagttcctgcccaggagcctgcgggtggccgacctggccgccaaccaggtgatggagatcttccccctgacctttggagagaagccagccctgcggtctgtgtacctgcacaacaaccagctgagcaatgccggcctgcccccagatgccttccggggcagcgaggccatcgccaccctgagcctgagcaacaaccagctgagctacctgccccccagcctgccccccagcctggagcggctgcacctgcagaacaacctgatcagcaaggtgcccaggggggccctgagccggcagacccagctgcgggagctgtacctgcagcacaaccagctgacagattctggcctggatgccaccaccttcagcaagctgcacagcctggagtacctggacctgagccacaaccagctgaccaccgtgcctgctggcctgcccaggaccctggccatcctgcacctgggcaggaaccgcatccggcaggtggaggccgcccggctgcacggggcccggggcctgcgctacctgctgctgcagcacaaccagctgggcagcagcggcctgcctgctggggccctgcggcccctgcggggcctgcacaccctgcacctgtatggaaatggcctggacagagtgcccccagccctgccccggcggctgcgggccctggtgctgccccacaaccacgtggccgccctgggcgcccgggacctggtggccaccccaggcctgacagagctgaacctggcctacaaccggctggccagcgcccgggtgcaccaccgggccttccggcggctgcgggccctgcggagcctggacctggccggcaaccagctgacccggctgcccatgggcctgcccaccggcctgcggaccctgcagctgcagaggaaccagctgaggatgctggagcctgagcccctggccggcctggaccagctgcgggagctgagcctggcccacaaccggctgcgggtgggggacatcggccctggcacctggcatgagctgcaggccctgcaggtgcgccaccggctggtgagccacacagtgccccgggccccacccagcccctgcctgccctgccacgtgcccaacatcctggtgtcctggtag

SEQ ID NO: 7235 - DNA, 2328 bp, synthetic construct
  misc_feature 1..2328: note = source = /note="Description of Artificial Sequence: Synthetic coding sequence"
  source 1..2328: mol_type = other DNA
atgaaggagggccctgaggaggccggcagcggccgctatggcccccgctacatcacagacatgggcgctggagaagatgatgagggctttgaagatgacctggacctggacatcagctttgaggaggtgaagcccctgcctgccaccaagggcggcaacaagaagttcctggtggagagcaagaagatgagcatcagcaaccccaagaccatcagccgcctcatcccccccaccagcgccagcctgcctgtgaccaccgtggccccccagcccatccccatccagaggaagggcaagaatggagtggccatcatgagccggctgtttgacatgccctgtgatgagaccctgtgcagcgctgacagcttctgtgtgaatgactacacctggggcggcagccgctgccagtgcaccctgggcaaaggaggagagagctgcagcgaggacatcgtcatccagtacccccagttcttcggccacagctatgtgacctttgagcccctgaagaacagctaccaggccttccagatcaccctggagttccgggcagaggccgaggatggcctgctgctgtactgtggagaaaatgagcacggccgcggggacttcatgagcctggccatcatccgccgcagcctgcagttccgcttcaactgtggcactggagtggccatcatcgtgtctgagaccaagatcaagctgggcggctggcacacagtgatgctgtacagagatggcctgaatggcctgctgcagctgaacaacggcacccctgtgacaggccagagccagggccagtacagcaagatcaccttccgcacccccctgtacctgggcggggcccccagcgcctactggctggtgcgggccaccggcaccaacagaggcttccagggctgtgtgcagagcctggccgtgaatggaagaagaattgacatgaggccctggcccctgggcaaggccctgtctggagcagatgtgggagaatgtagcagcggcatctgtgatgaggccagctgcatccacggcggcacctgcacagccatcaaggctgacagctacatctgcctgtgccccctgggcttcaagggccgccactgtgaagatgccttcaccctgaccatcccccagttccgggagagcctgcggagctatgctgccaccccctggcccctggagccccagcactacctgtccttcatggagtttgagatcaccttccggccagattctggagatggagtgctgctgtacagctatgacaccggcagcaaggacttcctgagcatcaacctggccggcggccacgtggagttccgctttgactgtggcagcggcactggagtgctgcggtctgaggaccccctgaccctgggcaactggcatgagctgcgggtgtccaggacagccaagaatggcatcctgcaggtggacaagcagaagatcgtggagggcatggccgagggcggcttcacccagatcaagtgcaacacagacatcttcatcggcggcgtgcccaactatgatgatgtgaagaagaacagcggcgtgctgaagcccttcagcggcagcatccagaagatcatcctgaatgacaggaccatccacgtgaagcatgacttcaccagcggcgtgaatgtggagaatgctgcccacccctgtgtgcgggccccctgtgcccatggaggcagctgccggcccaggaaggagggctatgactgtgactgccccctgggctttgagggcctgcactgccagaaggccatcatcgaggccatcgagatcccccagttcatcggccgcagctacctgacctatgacaacccagacatcctgaagagggtgtctggcagccgcagcaatgtgttcatgaggttcaagaccacagccaaggatggcctgctgctgtggaggggggacagccccatgaggcccaacagcgacttcatcagcctgggcctgagagatggagccctggtgttctcctacaacctgggcagcggcgtggccagcatcatggtgaatggcagcttcaatgatggccgctggcaccgggtgaaggctgtgagagatggccagagcggcaagatcaccgtggatgattatggagccaggacaggcaagagccctggcatgatgaggcagctgaacatcaatggagccctgtatgtgggcggcatgaaggagatcgccctgcacaccaaccggcagtacatgaggggcctggtgggctgcatcagccacttcaccctgagcacagactaccacatcagcctggtggaggatgctgtggatggcaagaacatcaacacctgtggggccaagtag

SEQ ID NO: 7236 - DNA, 1431 bp, synthetic construct
  misc_feature 1..1431: note = source = /note="Description of Artificial Sequence: Synthetic coding sequence"
  source 1..1431: mol_type = other DNA
atgaagttccagggccccctggcctgcctgctgctggccctgtgcctgggcagcggggaggccggccccctgcagagcggggaggagagcacaggcaccaacattggagaggccctgggccacggcctgggagatgccctgtctgagggcgtgggcaaggccatcggcaaggaggccggcggcgctgctggcagcaaggtgtctgaggccctgggccagggcacccgggaggccgtgggcactggagtgcggcaggtgcccggctttggagtggctgatgccctgggcaacagagtgggggaggccgcccacgccctgggcaacacaggccatgaaattggccggcaggccgaggatgtgatcagacatggagcagatgctgtgcggggctcctggcagggcgtgcccggccacaatggagcctgggagaccagcggcggccacggcatcttcggcagccagggcggcctgggcggccagggccagggcaaccctgggggcctgggcaccccctgggtgcacggctacccaggcaacagcgctggcagctttggcatgaacccccagggcgccccctggggccagggcggcaatggaggcccccccaactttggcaccaacacccagggcgctgtggcccagcccggctacggctctgtgcgggccagcaaccagaatgaaggctgcaccaaccccccaccttctggcagcggcggcggcagcagcaacagcggcggcggcagcggcagccagagcggcagcagcggcagcggcagcaatggagacaacaacaacggcagcagcagcggcggcagcagcagcggcagcagcagcggcggcagcagcggcggcagcagcggcggcagcagcggcaacagcggcggcagcagaggagacagcggcagcgagagctcctggggcagcagcacaggcagcagcagcggcaaccacggcggcagcggcggcggcaatggccacaagccaggctgtgagaagccaggaaatgaggcccggggcagcggggagagcggcatccagaacagcgagaccagccctggcatgttcaactttgacaccttctggaagaacttcaagagcaagctgggcttcatcaactgggatgccatcaacaagaaccaggtgcccccacccagcacccgggccctgctgtacttcagccggctgtgggaggacttcaagcagaacacccccttcctgaactggaaggccatcatcgagggcgcagatgccagcagcctgcagaagagagctggaagagatgaccagaactacaactacaaccagcacgcctaccccacagcctacggcggcaagtacagcgtgaagaccccagccaagggcggcgtgagccccagcagcagcgccagccgggtgcagcccggcctgctgcagtgggtgaagttctggtag

SEQ ID NO: 7237 - DNA, 1911 bp, synthetic construct
  misc_feature 1..1911: note = source = /note="Description of Artificial Sequence: Synthetic coding sequence"
  source 1..1911: mol_type = other DNA
atgaccacctggagcctgcggcggcggcctgcccggaccctgggcctgctgctgctggtggtgctgggcttcctggtgctgcggcggctggactggagcaccctggtgcccctgcggctgcggcaccggcagctgggcctgcaggccaagggctggaacttcatgctggaggacagcaccttctggatctttggaggcagcatccactacttccgggtgccccgggagtactggagggaccggctgctgaagatgaaggcctgtggcctgaacaccctgaccacctacgtgccctggaacctgcacgagcctgagcggggcaagtttgacttcagcggcaacctggacctggaggcctttgtgctgatggctgctgagatcggcctgtgggtgatcctgcggcccggcccctacatctgcagcgagatggacctgggcggcctgcccagctggctgctgcaggaccccggcatgaggctgcggaccacctacaagggcttcacagaggccgtggacctgtactttgaccacctgatgagccgggtggtgcccctgcagtacaagaggggcggccccatcatcgctgtgcaggtggagaatgaatatggcagctacaacaaggaccctgcctacatgccctacgtgaagaaggccctggaggaccggggcatcgtggagctgctgctgaccagtgacaacaaggatggcctgagcaaaggaattgtgcagggcgtgctggccaccatcaacctgcagagcacccatgagctgcagctgctgaccaccttcctgttcaacgtgcagggcacccagcccaagatggtgatggagtactggacaggctggtttgacagctggggcggcccccacaacatcctggacagcagcgaggtgctgaagacagtgtctgccatcgtggatgctggcagcagcatcaacctgtacatgttccacggcggcaccaactttggcttcatgaatggagccatgcacttccatgactacaagagtgatgtgaccagctatgactatgatgctgtgctgacagaagctggggactacacagccaagtacatgaagctgcgggacttcttcggcagcatcagcggcatccccctgcccccacctccagacctgctgcccaagatgccctatgagcccctgacccctgtgctgtacctgagcctgtgggatgccctgaagtacctgggggagcccatcaagtctgagaagcccatcaacatggagaacctgcctgtgaatggaggaaatggccagagctttggctacatcctgtatgagaccagcatcaccagcagcggcatcctgagcggccacgtgcatgaccggggccaggtgtttgtgaacacagtgtccatcggcttcctggactacaagaccaccaagattgctgtgcccctcatccagggctacacagtgctgcgcatcctggtggagaacagaggccgggtgaactatggagaaaatattgatgaccagaggaagggcctgattggcaacctgtacctgaatgacagccccctgaagaacttccgcatctacagcctggacatgaagaagagcttcttccagagatttggcctggacaagtggagcagcctgcctgagacccccaccctgcctgccttcttcctgggcagcctgagcatcagcagcaccccctgtgacaccttcctgaagctggagggctgggagaagggcgtggtgttcatcaatggccagaacctgggccgctactggaacatcggcccccagaagaccctgtacctgcccggcccctggctgagcagcggcatcaaccaggtgattgtgtttgaggagaccatggccggccctgccctgcagttcacagagaccccccacctgggcaggaaccagtacatcaagtag

SEQ ID NO: 7238 - DNA, 672 bp, synthetic construct
  misc_feature 1..672: note = source = /note="Description of Artificial Sequence: Synthetic coding sequence"
  source 1..672: mol_type = other DNA
atgacccgctggagcagctacctgctgggctggaccaccttcctgctgtacagctatgagagcagcggcggcatgcatgaggagtgtgtgttccccttcacctacaagggctctgtgtacttcacctgcacccacatccacagcctgagcccctggtgtgccaccagggctgtgtacaacggccagtggaagtactgccagagcgaggactacccccgctgcatcttccccttcatctaccggggcaaggcctacaacagctgcatcagccagggcagcttcctgggcagcctgtggtgcagcgtgacctctgtgtttgatgagaagcagcagtggaagttctgtgagaccaatgaatatggaggcaacagcctgaggaagccctgcatcttccccagcatctacagaaacaacgtggtgtctgactgcatggaggatgagagcaacaagctgtggtgccccaccacagagaacatggacaaggatggcaagtggagcttctgtgccgacacccgcatcagcgccctggtgcccggcttcccctgccacttccccttcaactacaagaacaagaactacttcaactgcaccaatgaaggcagcaaagaaaacctggtgtggtgtgccaccagctacaactatgaccaggaccacacctgggtgtactgctag

SEQ ID NO: 7239 - DNA, 1368 bp, synthetic construct
  misc_feature 1..1368: note = source = /note="Description of Artificial Sequence: Synthetic coding sequence"
  source 1..1368: mol_type = other DNA
atgctgcaccctgagaccagccctggccggggccacctgctggccgtgctgctggccctgctgggcaccacctgggccgaggtgtggccaccccagctgcaggagcaggcccccatggccggggccctgaacaggaaggagagcttcctgctgctgagcctgcacaaccggctgcgctcctgggtgcagcccccagctgctgacatgaggcggctggactggagcgacagcctggcccagctggcccaggcccgggccgccctgtgtggcatccccacccccagcctggccagcggcctgtggaggaccctgcaggtgggctggaacatgcagctgctgcctgctggcctggccagctttgtggaggtggtgtccctgtggtttgctgagggccagcgctacagccatgctgctggggagtgtgccagaaatgccacctgcacccactacacccagctggtgtgggccaccagcagccagctgggctgcggccgccacctgtgcagcgctggccagacagccatcgaggcctttgtgtgtgcctacagccctgggggcaactgggaggtgaatggcaagaccatcatcccctacaagaagggggcctggtgcagcctgtgcacagcctctgtgtctggctgcttcaaggcctgggaccatgctgggggcctgtgtgaggtgcccaggaacccctgcaggatgagctgccagaaccacggccgcctgaacatcagcacctgccactgccactgccccccaggctacacaggccgctactgccaggtgcgctgcagcctgcagtgtgtgcacggccgcttccgggaggaggagtgcagctgtgtgtgtgacatcggctacggcggggcccagtgtgccaccaaggtgcacttccccttccacacctgtgacctgagaattgatggagactgcttcatggtgtcctctgaggccgacacctactaccgggccaggatgaagtgccagaggaagggcggcgtgctggcccagatcaagagccagaaggtgcaggacatcctggccttctacctgggccgcctggagaccaccaatgaagtcatcgacagcgactttgagaccaggaacttctggattggcctgacctacaagacagccaaggacagcttccgctgggccaccggggagcaccaggccttcaccagctttgccttcggccagcctgacaaccacggcctggtgtggctgtctgctgccatgggcttcggcaactgtgtggagctgcaggccagcgctgccttcaactggaatgaccagcgctgcaagaccaggaaccgctacatctgccagtttgcccaggagcacatcagccgctggggccctggcagctag

SEQ ID NO: 7240 - DNA, 1425 bp, synthetic construct
  misc_feature 1..1425: note = source = /note="Description of Artificial Sequence: Synthetic coding sequence"
  source 1..1425: mol_type = other DNA
atggctgacatgcagaacctggtggagcggctggagagagctgtgggccgcctggaggccgtgagccacaccagtgacatgcaccggggctacgccgacagccccagcaaaggagctgccccctacgtgcaggcctttgacagcctgctggccggccctgtggccgagtacctgaagatcagcaaggagattggaggagatgtgcagaagcacgccgagatggtgcacacaggcctgaagctggagcgggccctgctggtgacagccagccagtgccagcagcctgctgagaacaagctgagtgacctgctggcccccatcagcgagcagatcaaggaggtgatcaccttccgggagaagaacagaggcagcaagctgttcaaccacctgtctgctgtgtctgagagcatccaggccctgggctgggtggccatggcccccaagccaggcccctacgtgaaggagatgaatgatgctgccatgttctacaccaacagagtgctgaaggagtacaaggatgtggacaagaagcacgtggactgggtgaaggcctacctgagcatctggacagagctgcaggcctacatcaaggagttccacaccaccggcctggcctggagcaagacaggccctgtggccaaggagctgagcggcctgcccagcggccccagcgctggcagctgccccccacctcctccaccctgccccccacctcctcctgtgtccaccatcagctgcagctatgagagcgccagccgcagcagcctgtttgcccagatcaaccagggcgagagcatcacccacgccctgaagcacgtgtctgatgacatgaagacccacaagaacccagccctgaaggcccagagcggccctgtgcgcagcggccccaagcccttcagcgcccccaagccccagaccagccccagccccaagagggccaccaagaaggagcctgctgtgctggagctggagggcaagaagtggagggtggagaaccaggagaatgtgagcaacctggtgattgaggacacagagctgaagcaggtggcctacatctacaagtgtgtgaacaccaccctgcagatcaagggcaagatcaacagcatcaccgtggacaactgcaagaagctgggcctggtgtttgatgatgtggtgggcatcgtggagatcatcaacagcaaggatgtgaaggtgcaggtgatgggcaaggtgcccaccatcagcatcaacaagacagatggctgccacgcctacctgagcaagaacagcctggactgtgagatcgtgtctgccaagagcagcgagatgaatgtgctgatccccacagagggcggggacttcaatgagttccctgtgcctgagcagttcaagaccctgtggaatggccagaagctggtgaccaccgtgacagaaattgctggatag

SEQ ID NO: 7241 - DNA, 360 bp, synthetic construct
  misc_feature 1..360: note = source = /note="Description of Artificial Sequence: Synthetic coding sequence"
  source 1..360: mol_type = other DNA
atgaacaagatcctgagcagcacagtgtgcttcggcctgctgaccctgctgtctgtgctgtccttcctgcagagcgtgcacggccggccctacctgacccagggcaatgagatcttcccagacaagaagtacaccaaccgggaggagctgctgctggccctgctgaacaagaactttgacttccagaggcccttcaacacagacctggccctgcccaacaagctggaggagctgaaccagctggagaagctgaaggagcagctggtggaggagaaggacagcgagaccagctatgctgtggatggcctcttcagcagccaccccagcaagagggcctgcttctggaagtactgtgtgtag

SEQ ID NO: 7242 - DNA, 3756 bp, synthetic construct
  misc_feature 1..3756: note = source = /note="Description of Artificial Sequence: Synthetic coding sequence"
  source 1..3756: mol_type = other DNA
atgaggctgctgctgctggtgcccctgctgctggccccagcccctggcagcagcgcccccaaggtgcggcggcagagcgacacctggggcccctggagccagtggagcccctgcagcaggacctgtggcggcggcgtgtccttccgggagcggccctgctacagccagaggagagatggcggcagcagctgtgtgggccctgcccggagccacaggagctgcaggacagagagctgcccagatggagcccgggacttccgggcagagcagtgtgccgagtttgatggagctgagttccagggccgccgctaccgctggctgccctactacagcgcccccaacaagtgtgagctgaactgcatccccaagggggagaacttctactacaagcaccgggaggccgtggtggatggcaccccctgtgagcccgggaagagagatgtgtgtgtggatggcagctgccgggtggtgggctgtgaccacgagctggacagcagcaagcaggaggacaagtgcctgcgctgtggaggagatggcaccacctgctaccctgtggccggcacctttgatgccaatgacctgagcagagctgtgaagaatgtgcggggggagtactacctgaatggccactggaccattgaagctgcccgggccctgcctgctgccagcaccatcctgcactatgaaagaggagctgagggggacctggcccctgagcggctgcacgcccggggccccaccagcgagcccctggtgattgagctgatcagccaggagcccaaccctggggtgcactatgagtaccacctgcccctgcggcggcccagccctggcttctcctggagccacggctcctggagcgactgcagcgcagaatgtggcggcggccaccagagccggctggtgttctgcaccatcgaccacgaggcctacccagaccacatgtgccagaggcagcccaggcctgctgacagaagaagctgcaacctgcacccctgcccagagaccaagcgctggaaggccggcccctgggccccctgcagcgccagctgtggcggcggcagccagagccgctctgtgtactgcatcagcagtgatggagctggcatccaggaggccgtggaggaggccgagtgtgccggcctgcccgggaagcccccagccatccaggcctgcaacctgcagagatgtgccgcctggagccctgagccctggggagaatgttctgtgtcctgtggggtgggcgtgaggaagaggtctgtgacctgccgcggggagcggggcagcctgctgcacacagctgcctgcagcctggaggaccggccccccctgacagagccctgtgtgcatgaggactgccccctgctgagtgaccaggcctggcacgtgggcacctggggcctgtgcagcaagagctgcagcagcggcacccggcggcggcaggtgatctgtgccatcggcccccccagccactgcggcagcctgcagcacagcaagcctgtggatgtggagccctgcaacacccagccctgccacctgccccaggaggtgcccagcatgcaggatgtgcacaccccagccagcaacccctggatgcccctgggcccccaggagagccctgccagtgacagccggggccagtggtgggccgcccaggagcaccccagcgcccggggggaccacagaggagagcggggggaccccaggggggaccagggcacccacctgagcgccctgggccctgcccccagcctgcagcagcccccctaccagcagcccctgcggagcggcagcggcccccatgactgccgccacagcccccacggctgctgcccagatggccacacagccagcctgggcccccagtggcagggctgccctggggccccctgccagcagagccgctatggctgctgcccagacagagtgtctgtggccgagggcccccaccacgccggctgcaccaagagctatggaggagacagcactggaggcatgcccaggagcagagctgtggccagcacagtgcacaacacccaccagccccaggcccagcagaatgagcccagtgaatgtcggggcagccagtttggctgctgctatgacaacgtggccacagctgctggccccctgggggagggctgtgtgggccagcccagccacgcctaccctgtgcgctgcctgctgcccagcgcccacggcagctgtgccgactgggccgcccgctggtactttgtggcctctgtgggccagtgcaaccgcttctggtatggaggctgccacggcaatgccaacaactttgccagcgagcaggagtgcatgagcagctgccagggcagcctgcacggcccccggcggccccagcccggggccagcggccgcagcacccacacagatggcggcggcagcagccctgctggggagcaggagcccagccagcacaggactggagctgctgtgcagaggaagccctggcccagcggcggcctgtggaggcaggaccagcagcccggccctggagaggccccccacacccaggccttcggggagtggccctggggccaggagctgggcagccgggcccctggcctgggcggagatgctggcagccctgccccacccttccacagcagcagctaccgcatcagcctggccggcgtggagcccagcctggtgcaggccgccctgggccagctggtgcggctgagctgcagtgatgacacagcccctgagagccaggccgcctggcagaaggatggccagcccatcagcagtgacagacaccggctgcagtttgatggcagcctcatcatccaccccctgcaggccgaggatgctggcacctacagctgtggcagcacccggcccggccgggacagccagaagatccagctgcgcatcatcggcggggacatggctgtgctgtctgaggccgagctgagccgcttcccccagccccgggaccctgcccaggactttggccaggccggggctgctggccccctgggcgccatccccagcagccacccccagcctgccaaccggctgcggctggaccagaaccagccccgggtggtggatgccagccctggccagaggatccgcatgacctgcagagctgagggcttccccccaccagccatcgagtggcagagagatggccagcctgtgagcagccccaggcaccagctgcagccagatggcagcctggtgatcagccgggtggccgtggaggatggcggcttctacacctgtgtggccttcaacggccaggaccgggaccagcgctgggtgcagctgcgggtgctgggggagctgaccatcagcggcctgccccccaccgtgacagtgcctgagggggacacagcccggctgctgtgtgtggtggccggggagagcgtgaacatccgctggagcagaaatggcctgcctgtgcaggctgatggccaccgggtgcaccagagcccagatggcaccctgctgatctacaacctgcgggccagagatgagggcagctacacctgcagcgcctaccagggcagccaggccgtgagccgcagcacagaggtgaaggtggtgtccccagcccccacagcccagccccgggaccccggccgggactgtgtggaccagcctgagctggccaactgtgacctgatcctgcaggcccagctgtgtggaaatgagtactacagcagcttctgctgtgccagctgcagccgcttccagccccacgcccagcccatctggcagtag

SEQ ID NO: 7243 - DNA, 1731 bp, synthetic construct
  misc_feature 1..1731: note = source = /note="Description of Artificial Sequence: Synthetic coding sequence"
  source 1..1731: mol_type = other DNA
atggcccagggcgtgctgtggatcctgctgggcctgctgctgtggagcgaccccggcacagccagcctgcccctgctgatggattctgtcatccaggccctggccgagctggagcagaaggtgcctgctgccaagaccaggcacacagccagcgcctggctgatgtctgcccccaacagcggcccccacaaccggctgtaccacttcctgctgggcgcctggagcctgaatgccacagagctggacccctgccccctgagccctgagctgctgggcctgaccaaggaggtggcccggcatgatgtgcgggagggcaaggagtatggagtggtgctggccccagatggcagcacagtggccgtggagcccctgctggccggcctggaggccggcctgcagggcagaagagtcatcaacctgcccctggacagcatggccgccccctgggagactggagacaccttcccagatgtggtggccatcgccccagatgtgcgggccaccagcagccctggcctgagagatggcagcccagatgtgaccacagctgacattggagccaacaccccagatgccaccaagggctgcccagatgtgcaggccagcctgcctgatgccaaggccaagagcccccccaccatggtggacagcctgctggccgtgaccctggccggcaacctgggcctgaccttcctgcggggcagccagacccagagccacccagacctgggcacagagggctgctgggaccagctgagcgcccccaggaccttcaccctgctggaccccaaggccagcctgctgaccatggccttcctgaatggagccctggatggagtcatcctgggggactacctgagcaggaccccagagccccggcccagcctgagccacctgctgagccagtactacggggccggcgtggcccgggaccccggcttccgcagcaacttccggcggcagaatggagctgccctgaccagcgccagcatcctggcccagcaggtgtggggcaccctggtgctgctgcagaggctggagcctgtgcacctgcagctgcagtgcatgagccaggagcagctggcccaggtggccgccaatgccaccaaggagttcacagaggccttcctgggctgcccagccatccacccccgctgccgctggggcgccgccccctaccggggccggcccaagctgctgcagctgcccctgggcttcctgtatgtgcaccacacctacgtgcctgccccaccctgcacagacttcacccgctgtgccgccaacatgaggtccatgcagcgctaccaccaggacacccagggctggggagacatcggctacagctttgtggtgggcagtgatggctacgtgtatgagggccggggctggcactgggtgggcgcccacaccctgggccacaacagccggggcttcggcgtggccatcgtgggcaactacacagctgccctgcccacagaggccgccctgaggacagtgcgggacaccctgcccagctgtgctgtgcgggccggcctgctgcggccagactatgccctgctgggccaccggcagctggtgaggacagactgccctggagatgccctgtttgacctgctgcggacctggccccacttcaccgccaccgtgaagcccaggcctgcccggtctgtgtccaagaggagccggcgggagcccccacccaggaccctgcctgccacagacctgcagtag

SEQ ID NO: 7244 - DNA, 846 bp, synthetic construct
  misc_feature 1..846: note = source = /note="Description of Artificial Sequence: Synthetic coding sequence"
  source 1..846: mol_type = other DNA
atgctgcccaagagccggcgggccctgaccatccaggagattgctgccctggcccggagcagcctgcacggcatcagccaggtggtgaaggaccacgtgaccaagcccacagccatggcccagggccgggtggcccacctgattgagtggaagggctggagcaagcccagcgacagccctgctgccctggagagcgccttcagcagctacagcgacctgtctgagggggagcaggaggccaggtttgctgctggggtggccgagcagtttgccatcgccgaggccaagctgcgggcctggagctctgtggatggagaggacagcacagatgacagctatgatgaagattttgctgggggcatggacacagacatggccggccagctgcccctgggcccccacctgcaggacctcttcaccggccaccgcttcagcaggcctgtgcggcagggctctgtggagcctgagagtgactgcagccagacagtgtccccagacaccctgtgcagcagcctgtgcagcctggaggatggcctgctgggcagccctgcccggctggccagccagctgctgggagatgagctgctgctggccaagctgccccccagccgggagagcgccttccgcagcctgggccccctggaggcccaggacagcctgtacaacagccccctgacagagagctgcctgagccctgctgaggaggagcccgccccctgcaaggactgccagcccctgtgcccccccctgaccggctcctgggagcggcagaggcaggccagtgacctggccagcagcggcgtggtgtccctggatgaagatgaggccgagcctgaggagcagtag

SEQ ID NO: 7245 - DNA, 2619 bp, synthetic construct
  misc_feature 1..2619: note = source = /note="Description of Artificial Sequence: Synthetic coding sequence"
  source 1..2619: mol_type = other DNA
atgggcatcgtgtggatcctgatgtctgtgctgccctggtggggccgctgtgccgacctggccatcgccagcacccagctggtgcccagcacagccagcgccaggatggccctgagcagccagctgatgggccgcacagtgtggacccccatgtctgccagcgccctgcaggagcccgcctacccagccctggcccggaccagccgggcccccagcgctgcctctgtgcccctggccagccgctgccgggtgaccacagccctgatcagcaccagcgcccagaggagccccaccagcgccagcctggcccctgtgcccacagccctgggcgccagcagcgccagcgcccacctggccctgagcagcctgaccatgggcaccgtggccctgacccacggccgggtgtctgccagccctgtgctgcggctgggcagcgcccgctgccccaagctgagcaccccacccaggcctgctgctgctgctgtgcggggcctgggccgggccggggagaccccagccaactgtgtgccccggcgggctgtgcccggcccagatgacagcagagaagatgtgaatgaatgtgccgagaaccctggggtgtgcaccaatggagtgtgtgtgaacacagatggcagcttccgctgtgagtgccccttcggctacagcctggacttcaccggcatcaactgtgtggacacagatgaatgttctgtgggccacccctgtggccagggcacctgcaccaacgtgattggaggctttgaatgtgcctgtgctgatggctttgagcccggcctgatgatgacctgtgaagatattgatgaatgttccctgaaccccctgctgtgtgccttccgctgccacaacacagagggcagctacctgtgcacctgcccagctggctacaccctgcgggaggatggagccatgtgcagagatgtggatgaatgtgctgatggccagcaggactgccacgcccggggcatggagtgcaagaacctgattggcacctttgcctgtgtgtgccccccaggcatgaggcccctgcccggcagcggggagggctgcacagatgacaatgaatgtcatgcccagcctgacctgtgtgtgaatggccgctgtgtgaacacagctggcagcttccgctgtgactgtgatgagggcttccagcccagccccaccctgacagaatgtcatgacatccggcagggcccctgctttgctgaggtgctgcagaccatgtgccgcagcctgagcagcagcagcgaggccgtgaccagggctgagtgctgctgcggcggcggccggggctggggcccccgctgtgagctgtgccccctgcccggcaccagcgcctacaggaagctgtgcccccacggcagcggctacacagctgagggcagagatgtggatgagtgcaggatgctggcccacctgtgtgcccacggggagtgcatcaacagcctgggcagcttccgctgccactgccaggccggctacaccccagatgccacagccaccacctgcctggacatggatgagtgcagccaggtgcccaagccctgcaccttcctgtgcaagaacaccaagggcagcttcctgtgcagctgcccccggggctacctgctggaggaggatggccgcacctgcaaggacctggatgaatgtaccagccggcagcacaactgccagttcctgtgtgtgaacacagtgggcgccttcacctgccgctgccccccaggcttcacccagcaccaccaggcctgctttgatgtgaatgaatgtgatggcccccaccgctgccagcacggctgccagaaccagctgggcggctaccgctgcagctgcccccagggcttcacccagcacagccagtgggcccagtgtgtggatgaaaatgaatgtgccctgagcccccccacctgtggcagcgccagctgcaggaacaccctgggcggcttccgctgtgtgtgccccagcggctttgattttgaccaggccctgggcggctgccaggaggtggatgaatgtgccggccggcggggcccctgcagctacagctgtgccaacacccctgggggcttcctgtgtggctgcccccagggctacttccgggccggccagggccactgtgtgtctggcctgggcttcagccctggcccccaggacaccccagacaaggaggagctgctgagcagcgaggcctgctatgagtgcaagatcaatggcctgagcccccgggaccggcccaggagaagtgcccaccgggaccaccaggtgaacctggccaccctggacagcgaggccctgctgaccctgggcctgaacctgagccacctgggccgggcagagcgcatcctggagctgcggcctgccctggagggcctggagggccgcatccgctacgtgattgtgagaggaaatgagcagggcttcttcaggatgcaccacctgcggggcgtgagcagcctgcagctgggcagaagaagacctggccctggcacctaccgcctggaggtggtgagccacatggccggcccctggggcgtgcagcctgagggccagcccggcccctggggccaggccctgcggctgaaggtgcagctgcagctgctgtag

SEQ ID NO: 7246 - DNA, 1368 bp, synthetic construct
  misc_feature 1..1368: note = source = /note="Description of Artificial Sequence: Synthetic coding sequence"
  source 1..1368: mol_type = other DNA
atggccaggaaggccctgaagctggcctcctggacctccatggccctggccgccagcggcatctacttctacagcaacaagtacctggaccccaatgactttggagctgtgcgggtgggccgggctgtggccaccacagctgtgatctcctatgactacctgaccagcctgaagtctgtgccctacggcagcgaggagtacctgcagctgcggagcaagatccatgacctcttccagagctttgatgacacccccctgggcacagccagcctggcccaggtgcacaaggctgtgctgcatgatggccgcacagtggccgtgaaggtgcagcaccccaaggtgcgggcccagagcagcaaggacatcctgctgatggaggtgctggtgctggccgtgaagcagctgtttcctgagtttgagttcatgtggctggtggatgaggccaagaagaacctgcccctggagctggacttcctgaatgaaggaagaaatgctgagaaggtgtcccagatgctgcggcactttgacttcctgaaggtgccccgcatccactgggacctgagcacagagcgggtgctgctgatggagtttgtggatggcggccaggtgaatgaccgggactacatggagaggaacaagattgatgtgaatgagatcagccgccacctgggcaagatgtacagcgagatgatctttgtgaatggatttgtgcactgtgacccccaccctggaaatgtgctggtgaggaagcaccctggcaccgggaaggccgagatcgtgctgctggaccacggcctgtaccagatgctgacagaggagttccggctgaactactgccacctgtggcagagcctcatctggacagacatgaagagggtgaaggagtacagccagaggctgggcgctggggacctgtaccccctgtttgcctgcatgctgacagcccgctcctgggacagcgtgaacagaggcatcagccaggcccctgtgacagccacagaggacctggagatcagaaataatgctgccaactacctgccccagatcagccacctgctgaaccacgtgccccggcagatgctgctgatcctgaagaccaatgacctgctgcggggcattgaagctgccctgggcacccgggccagcgccagcagcttcctgaacatgagccgctgctgcatccgggccctggccgagcacaagaagaagaacacctgcagcttcttccggaggacccagatctccttcagcgaggccttcaacctgtggcagatcaacctgcacgagctgatcctgcgggtgaagggcctgaagctggccgacagagtgctggccctgatctgctggctgtttcctgcccccctgtag

SEQ ID NO: 7247 - DNA, 1245 bp, synthetic construct
  misc_feature 1..1245: note = source = /note="Description of Artificial Sequence: Synthetic coding sequence"
  source 1..1245: mol_type = other DNA
atgaaccccaccctgggcctggccatcttcctggccgtgctgctgactgtgaagggcctgctgaagcccagcttcagccccaggaactacaaggccctgtctgaggtgcagggctggaagcagaggatggccgccaaggagctggcccggcagaacatggacctgggcttcaagctgctgaagaagctggccttctacaaccctggcaggaacatcttcctgagccccctgagcatcagcacagccttctccatgctgtgcctgggcgcccaggacagcaccctggatgagatcaagcagggcttcaacttcaggaagatgcctgagaaggacctgcacgagggcttccactacatcatccacgagctgacccagaagacccaggacctgaagctgagcatcggcaacaccctcttcatcgaccagaggctgcagccccagaggaagttcctggaggatgccaagaacttctacagcgctgagaccatcctgaccaacttccagaacctggagatggcccagaagcagatcaatgacttcatcagccagaagacccacggcaagatcaacaacctgattgagaacatcgaccccggcaccgtgatgctgctggccaactacatcttcttccgggcccgctggaagcatgaatttgaccccaacgtgaccaaggaggaggacttcttcctggagaagaacagctctgtgaaggtgcccatgatgttccgcagcggcatctaccaggtgggctatgatgacaagctgagctgcaccatcctggagatcccctaccagaagaacatcacagccatcttcatcctgcctgatgagggcaagctgaagcacctggagaagggcctgcaggtggacaccttcagccgctggaagaccctgctgagcagaagagtggtggatgtgtctgtgccccggctgcacatgacaggcacctttgacctgaagaagaccctgagctacatcggcgtgtccaagatctttgaggagcacggggacctgaccaagatcgccccccacaggagcctgaaggtgggggaggccgtgcacaaggccgagctgaagatggatgagcggggcacagaaggagctgctggcactggagcccagaccctgcccatggagacccccctggtggtgaagattgacaagccctacctgctgctgatctacagcgagaagatccccagcgtgctcttcctgggcaagatcgtgaaccccatcggcaagtag

SEQ ID NO: 7248 - DNA, 942 bp, synthetic construct
  misc_feature 1..942: note = source = /note="Description of Artificial Sequence: Synthetic coding sequence"
  source 1..942: mol_type = other DNA
atgtctgacctgctgctgctgggcctcatcggcggcctgaccctgctgctgctgctgaccctgctggcctttgctggctacagcggcctgctggccggcgtggaggtgtctgctggcagcccccccatcagaaatgtgacagtggcctacaagttccacatgggcctgtatggagagaccggccgcctcttcacagagagctgcagcatcagccccaagctgcggagcattgctgtgtactatgacaacccccacatggtgcccccagacaagtgccgctgtgctgtgggcagcatcctgtctgagggggaggagagccccagccctgagctgattgacctgtaccagaagtttggcttcaaggtgttctccttccctgcccccagccacgtggtgacagccaccttcccctacaccaccatcctgagcatctggctggccaccaggagagtgcacccagccctggacacctacatcaaggagaggaagctgtgtgcctacccccggctggagatctaccaggaggaccagatccacttcatgtgccccctggcccggcagggcgacttctacgtgcctgagatgaaggagacagagtggaagtggaggggcctggtggaggccatcgacacccaggtggatggcaccggggctgacaccatgtctgacaccagctctgtgtccctggaggtgtccccaggcagccgggagaccagcgctgccaccctgagccctggggccagcagccggggctgggatgatggagacaccaggtctgagcacagctacagcgagagcggggccagcggcagcagctttgaggagctggacctggagggggagggccccctgggggagagccggctggaccctggaacagagcccctgggcaccaccaagtggctgtgggagcccacagcccctgagaagggcaaggagtag

SEQ ID NO: 7249 - DNA, 603 bp, synthetic construct
  misc_feature 1..603: note = source = /note="Description of Artificial Sequence: Synthetic coding sequence"
  source 1..603: mol_type = other DNA
atggcctggggcggcgtgcacacctgctgcttccacctgtgctgctgctgctcctggccccagggcgctgtgcctgaggagctgcacaagcaccctggccagaccctgctgctgcagtgccagtacagccccaagaggggcccctaccagcccaagtcctggtgccagcagaccagccccagccgctgcaccctgctggtgaccagcagcaagccctggacagctgtgcagaagagccactacaccatctgggacaagcccaatgccggcttcttcaacatcaccatgatccagctgacccagaatgacagcggcttctactggtgtggcatctacaatgccagcgagaacatcatcaccgtgctgaggaacatcagcctggtggtgtccccagcccccaccaccagccccatgtggaccctgccctggctgcccaccagcacagtgctgatcaccagccctgagggcaccagcggccaccccagcatcaatggcagcgagaccaggaagagccgggccccagcctgcctgggcagcggcggcccccgcttcctggtgctggtgctgtgtggcctgctgctggccaagggcctgatgctgtag

SEQ ID NO: 7250 - DNA, 1035 bp, synthetic construct
  misc_feature 1..1035: note = source = /note="Description of Artificial Sequence: Synthetic coding sequence"
  source 1..1035: mol_type = other DNA
accacccccagccgggccctgcccggctggagcaactgccggccccgctggagggctggccccaccccccagagccccaccccccagagcaggatgaggctgagccctggcccccccagcgagtggacctggctgctgccccacttcaacccctgccaccaccaccaccgccaccaccaccccaaccccaccaccagcctgctgcccacagagccccccagcggccctgaggtgagcagccagggccgggaggccagctgtgagggcaccctgcgggctgtggacccccctgtgcgccaccacagctatggaagacatgagggcgcctggatgaaggaccctgctgccagagatgaccgcatctacgtgaccaactactactacggcaacagcctggtggagttcaggaacctggagaacttcaagcagggccgctggagcaacatgtacaagctgccctacaactggattggaactggacatgtggtgtaccagggcgccttctactacaacagagccttcaccaagaacatcatcaagtatgacctgcggcagagatttgtggcctcctgggccctgctgcctgatgtggtgtatgaggacaccaccccctggaagtggaggggccacagcgacatcgactttgctgtggatgagagcggcctgtgggtgatctacccagctgtggatgacagagatgaggcccagcctgaggtgattgtgctgagccggctggaccccggggacctgtctgtgcaccgggagaccacctggaagacccggctgcggaggaacagctatggcaactgcttcctggtgtgtggcatcctgtatgctgtggacacctacaaccagcaggagggccaggtggcctatgcctttgacacccacactggaacagatgcccggccccagctgcccttcctgaatgagcacgcctacaccacccagattgactacaaccccaaggagcgggtgctgtatgcctgggacaatggccaccagctgacctacaccctgcactttgtggtgtag

SEQ ID NO: 7251 - DNA, 2682 bp, synthetic construct
  misc_feature 1..2682: note = source = /note="Description of Artificial Sequence: Synthetic coding sequence"
  source 1..2682: mol_type = other DNA
atggccgaggccgccctggaggccgtgcgctctgagctgcgggagttccctgctgctgcccgggagctgtgtgtgcccctggccgtgccctacctggacaagccacccacccccctgcacttctacagagactgggtgtgccccaaccggccctgcatcatcagaaatgccctgcagcactggccagccctgcagaagtggagcctgccctacttccgggccaccgtgggcagcacagaggtgtctgtggccgtgaccccagatggctatgcagatgctgtgcggggggaccgcttcatgatgcctgctgagcggcggctgcccctgagctttgtgctggatgtgctggagggccgggcccagcaccctggggtgctgtatgtgcagaagcagtgcagcaacctgcccagcgagctgccccagctgctgcctgacctggagagccacgtgccctgggccagcgaggccctgggcaagatgccagatgctgtgaacttctggctgggggaggccgctgctgtgaccagcctgcacaaggaccactatgaaaatctctactgtgtggtgtctggagagaagcacttcctgttccaccccccaagtgaccggcccttcatcccctatgagctgtacaccccagccacctaccagctgacagaggagggcaccttcaaggtggtggatgaggaggccatggagaaggccgaggtgtccaggacctgcctgctgactgtgcgggtgctgcaggcccaccggctgcccagcaaggacctggtgacccccagcgactgctacgtgaccctgtggctgcccacagcctgcagccaccggctgcagaccaggacagtgaagaacagcagcagccctgtgtggaaccagagcttccacttccgcatccaccggcagctgaagaatgtgatggagctgaaggtgtttgaccaggacctggtgactggagatgatcctgtgctgtctgtgctgtttgatgctggcaccctgcgggccggggagttcagaagagagagcttcagcctgagcccccagggcgagggccgcctggaggtggagttccggctgcagagcctggccgacagaggagagtggctggtgtccaatggagtgctggtggcccgggagctgagctgcctgcacgtgcagctggaggagaccggggaccagaagagcagcgagcaccgggtgcagctggtggtgcccggcagctgtgagggcccccaggaggcctctgtgggcaccggcaccttccgcttccactgcccagcctgctgggagcaggagctgagcatccggctgcaggatgcccctgaggagcagctgaaggcccccctgagcgccctgcccagcggccaggtggtgcggctggtgttccccaccagccaggagcccctgatgagggtggagctgaagaaggaggccggcctgcgggagctggccgtgcggctgggcttcggcccctgtgccgaggagcaggccttcctgagcaggaggaagcaggtggtggccgccgccctgcggcaggccctgcagctggatggagacctgcaggaggatgagatccctgtggtggccatcatggccactggaggcggcatccgggccatgaccagcctgtatggccagctggccggcctgaaggagctgggcctgctggactgtgtgtcctacatcactggagccagcggcagcacctgggccctggccaacctgtatgaagatcctgagtggagccagaaggacctggccggccccacagagctgctgaagacccaggtgaccaagaacaagctgggcgtgctggcccccagccagctgcagcgctaccggcaggagctggccgagcgggcccggctgggctaccccagctgcttcaccaacctgtgggccctgatcaatgaggccctgctgcatgatgagccccatgaccacaagctgagtgaccagcgggaggccctgagccacggccagaaccccctgcccatctactgtgccctgaacaccaagggccagagcctgaccacctttgaatttggagagtggtgtgagttcagcccctatgaggtgggcttccccaagtacggggccttcatccccagcgagctgtttggaagtgagttcttcatgggccagctgatgaagaggctgcctgagagccgcatctgcttcctggagggcatctggagcaacctgtatgctgccaacctgcaggacagcctgtactgggccagcgagcccagccagttctgggaccgctgggtgaggaaccaggccaacctggacaaggagcaggtgcccctgctgaagattgaggagccccccagcacagctggaagaattgctgagttcttcacagacctgctgacctggaggcccctggcccaggccacccacaacttcctgcggggcctgcacttccacaaggactacttccagcacccccacttcagcacctggaaggccaccaccctggatggcctgcccaaccagctgacccccagcgagccccacctgtgcctgctggatgtgggctacctgatcaacaccagctgcctgcccctgctgcagcccaccagagatgtggacctgatcctgagcctggactacaacctgcacggggccttccagggcagcggcggccacccccggcggcggcagctgggccgctag

SEQ ID NO: 7252 - DNA, 354 bp, synthetic construct
  misc_feature 1..354: note = source = /note="Description of Artificial Sequence: Synthetic coding sequence"
  source 1..354: mol_type = other DNA
atgatcatcgacagcagccgcatccccagcttcacccagctgcacagcaccatgacccgggcccccctgctgctgctgtgtgtggccctggtgctgctgggccacgtgaatggagccaccgtgagaaatgaagacaagtggaagcccctgaacaaccccaggaacagagacctcttcttccggcggctgcaggcctacttcaagggccggggcctggacctgggcaccttccccaaccccttccccaccaatgaaaacccccggcccctgtccttccagagcgagctgacagccagcgccagcgctgactatgaggagcagaagaacagcttccacaactacctgaagggctag

SEQ ID NO: 7253 - DNA, 4143 bp, synthetic construct
  misc_feature 1..4143: note = source = /note="Description of Artificial Sequence: Synthetic coding sequence"
  source 1..4143: mol_type = other DNA
atgagacatggagtggcctgggccctgctggtggccgccgccctgggcctgggcgcccggggcgtgagaggagctgtggccctggccgacttctacccctttggagctgagagaggagatgctgtgacccccaagcaggatgatggcggcagcggcctgcggcccctgtctgtgcccttccccttctttggagctgagcacagcggcctgtatgtgaacaacaacggcatcatctccttcctgaaggaggtgtcccagttcacccctgtggccttccccatcgccaaggacagatgtgtggtggccgccttctgggcagatgtggacaacagaagagctggagatgtgtactaccgggaggccacagatcctgccatgctgcggcgggccacagaagatgtgcgccactacttccctgagctgctggacttcaatgccacctgggtgtttgtggccacctggtacagagtgaccttcttcggcggcagcagcagcagccctgtgaacaccttccagacagtgctgatcacagatggcaagctgtccttcaccatcttcaactatgagagcatcgtgtggaccaccggcacccacgccagcagcggcggcaatgccaccggcctgggcggcattgctgcccaggccggcttcaatgctggagatggccagcgctacttcagcatccctggcagcaggacagctgacatggccgaggtggagaccaccaccaacgtgggcgtgcccggccgctgggccttcagaattgatgatgcccaggtgcgggtgggcggctgcggccacaccacctctgtgtgcctggccctgcggccctgcctgaatggaggaaaatgtattgatgactgtgtgacaggcaaccccagctacacctgcagctgcctgagcggcttcaccggccgccgctgccacctggatgtgaatgaatgtgccagccagccctgccagaatggaggcacctgcacccacggcatcaacagcttccgctgccagtgcccagctggctttggaggccccacctgtgaaacagcccagagcccctgtgacaccaaggagtgccagcacggcggccagtgccaggtggagaatggcagcgctgtgtgtgtgtgccaggccggctacaccggggccgcctgtgagatggatgtggatgactgcagcccagacccctgcctgaatggaggcagctgtgtggacctggtgggcaactacacctgcctgtgtgccgagcccttcaagggcctgcgctgtgagaccggggaccaccctgtgcctgatgcctgcctgagcgccccctgccacaacggcggcacctgtgtggatgctgaccagggctacgtgtgtgagtgcccagagggcttcatgggcctggactgccgggagcgggtgcctgatgactgtgaatgtagaaatggaggccgctgcctgggcgccaacaccaccctgtgccagtgccccctgggcttcttcggcctgctgtgtgaatttgagatcacagccatgccctgcaacatgaacacccagtgcccagatggcggctactgcatggagcacggcggcagctacctgtgtgtgtgccacacagaccacaatgccagccacagcctgcccagcccctgtgacagcgacccctgcttcaacggcggcagctgtgatgcccatgatgacagctacacctgtgagtgcccccggggcttccacggcaagcactgtgagaaggcccggccccacctgtgcagcagcggcccctgcagaaatggaggcacctgcaaggaggccggcggggagtaccactgcagctgcccctaccgcttcaccggccgccactgtgaaattggcaagccagacagctgtgccagcggcccctgccacaacggcggcacctgcttccactacatcggcaagtacaagtgtgactgccccccaggcttcagcggccgccactgtgagatcgcccccagcccctgcttccgcagcccctgtgtgaatggaggcacctgtgaagatcgggacacagacttcttctgccactgccaggccggctacatgggccgccgctgccaggccgaggtggactgtggccccccagaggaggtgaagcacgccaccctgcgcttcaacggcacccggctgggcgctgtggccctgtatgcctgtgaccggggctacagcctgagcgcccccagccgcatccgggtgtgccagccccacggcgtgtggagcgagcccccccagtgcctggagattgatgagtgccgcagccagccctgcctgcacggcggcagctgccaggacagagtggccggctacctgtgcctgtgcagcacaggctatgaaggagcccactgtgagctggagagagatgagtgccgggcccacccctgcagaaatggaggcagctgcaggaacctgcccggggcctacgtgtgccgctgcccagctggctttgtgggcgtgcactgtgaaacagaggtggatgcctgtgacagcagcccctgccagcacggcggccgctgtgagagcggcggcggggcctacctgtgtgtgtgcccagagagcttcttcggctaccactgtgagaccgtgtctgacccctgcttcagcagcccctgtggcggccggggctactgcctggccagcaatggcagccacagctgcacctgcaaggtgggctacaccggggaggactgtgccaaggagctgttccccccaacagccctgaagatggagcgggtggaggagagcggcgtgtccatctcctggaacccccccaacggccctgctgcccggcagatgctggatggctatgctgtgacctacgtgtccagtgatggcagctacagaagaacagactttgtggacaggaccaggagcagccaccagctgcaggccctggccgccggccgggcctacaacatctctgtgttttctgtgaagaggaacagcaacaacaagaatgacatcagcaggcctgctgtgctgctggcccggacccggcccaggcctgtggagggctttgaggtgaccaacgtgacagccagcaccatctctgtgcagtgggccctgcaccgcatcagacatgccaccgtgtctggagtgcgggtgtccatccgccaccctgaggccctgcgggaccaggccacagatgtggacagatctgtggaccgcttcaccttccgggccctgctgcccgggaagcgctacaccatccagctgaccaccctgagcggcctgcggggggaggagcaccccacagagagcctggccacagcccccacccacgtgtggacccggcccctgcccccagccaacctgacagctgcccgggtgacagccaccagcgcccacgtggtgtgggatgcccccaccccaggcagcctgctggaggcctacgtgatcaacgtgaccaccagccagagcaccaagagccgctacgtgcccaacgggaagctggccagctacacagtgcgggacctgctgcccggccgccgctaccagctgtctgtgattgctgtgcagagcacagagctgggcccccagcacagcgagcccgcccacctgtacatcatcaccagccccagagatggagctgaccggcgctggcaccagggcggccaccacccccgggtgctgaagaaccggcccccaccagcccggctgcctgagctgcggctgctgaatgaccacagcgcccctgagacccccacccagcccccacgcttcagcgagctggtggatggccggggccgggtgtctgccaggtttggaggcagccccagcaaggccgccaccgtgcgcagccacgtgcccggcaactgcagcgagaacccctgccagaatggaggcacctgtgtgcctggagcagatgcccacagctgtgactgtggccctggcttcaagggcagaagatgtgagctggcctgcatcaaggtgtcccggccctgcaccaggctcttcagcgagaccaaggccttccctgtgtgggagggcggcgtgtgccaccacgtgtacaagagggtgtacagagtgcaccaggacatctgcttcaaggagagctgtgagagcaccagcctgaagaagacccccaacaggaagcagagcaagagccagaccctggagaagagctag

SEQ ID NO: 7254 - DNA, 474 bp, synthetic construct
  misc_feature 1..474: note = source = /note="Description of Artificial Sequence: Synthetic coding sequence"
  source 1..474: mol_type = other DNA
atggaggccctgcggcgggcccacgaggtggccctgcggctgctgctgtgccggccctgggccagcagagctgctgcccggcccaagcccagcgccagcgaggtgctgaccaggcacctgctgcagaggcggctgccccactggaccagcttctgtgtgccctacagcgctgtgagaaatgaccagtttggcctgagccacttcaactggcctgtgcagggcgccaactaccacgtgctgaggacaggctgcttccccttcatcaagtaccactgcagcaaggccccctggcaggacctggcccggcagaaccgcttcttcaccgccctgaaggtggtgaacctgggcatccccaccctgctgtatggcctgggctcctggctgtttgcccgggtgacagaaacagtgcacaccagctatggccccatcaccgtgtacttcctgaacaaggaggatgagggcgccatgtactag

SEQ ID NO: 7255 - DNA, 288 bp, synthetic construct
  misc_feature 1..288: note = source = /note="Description of Artificial Sequence: Synthetic coding sequence"
  source 1..288: mol_type = other DNA
atgaagggcagccgggccctgctgctggtggccctgaccctcttctgcatctgcaggatggccaccggggaggacaatgatgagttcttcatggacttcctgcagaccctgctggtgggcaccccagaggagctgtatgagggcaccctgggcaagtacaacgtgaatgaagatgccaaggccgccatgacagagctgaagagctgcattgatggcctgcagcccatgcacaaggccgagctggtgaagctgctggtgcaggtgctgggcagccaggatggagcctag

SEQ ID NO: 7256 - DNA, 1053 bp, synthetic construct
  misc_feature 1..1053: note = source = /note="Description of Artificial Sequence: Synthetic coding sequence"
  source 1..1053: mol_type = other DNA
atgaagtgcagcctgcgggtgtggttcctgtctgtggccttcctgctggtgttcatcatgagcctgctcttcacctacagccaccacagcatggccaccctgccctacctggacagcggggccctggatggcacccaccgggtgaagctggtgcccggctacgccggcctgcagaggctgagcaaggagcggctgagcggcaagagctgtgcctgccgccgctgcatgggagatgctggggccagtgactggtttgacagccactttgatggcaacatcagccctgtgtggacccgggagaacatggacctgcccccagatgtgcagcgctggtggatgatgctgcagccccagttcaagagccacaacaccaatgaggtgctggagaagctgttccagatcgtgcctggagagaacccctaccgcttccgggacccccaccagtgccgccgctgtgctgtggtgggcaacagcggcaacctgcggggcagcggctacggccaggatgtggatggccacaacttcatcatgaggatgaaccaggcccccaccgtgggctttgagcaggatgtgggcagcaggaccacccaccacttcatgtacccagagagcgccaagaacctgcctgccaacgtgtcctttgtgctggtgcccttcaaggtgctggacctgctgtggatcgccagcgccctgagcacaggccagatccgcttcacctacgcccctgtgaagagcttcctgcgggtggacaaggagaaggtgcagatctacaacccagccttcttcaagtacatccatgaccgctggacagagcaccacggccgctaccccagcacaggcatgctggtgctcttctttgccctgcacgtgtgtgatgaggtgaatgtgtatggctttggagctgacagccggggcaactggcaccactactgggagaacaacagatatgctggggagttcaggaagacaggagtgcatgatgctgactttgaggcccacatcatcgacatgctggccaaggccagcaagattgaggtgtaccggggcaactag

SEQ ID NO: 7257 - DNA, 600 bp, synthetic construct
  misc_feature 1..600: note = source = /note="Description of Artificial Sequence: Synthetic coding sequence"
  source 1..600: mol_type = other DNA
atggccagccctgaggcccctgagagcgtggtgcagtttgccctggacaagctgggcggcctggactacctggtgctgaaccacatcggcggggccccagctggcacccgggcccggagcccccaggccacccgctggctgatgcaggtgaactttgtgtcctatgtgcagctgaccagccgggccctgcccagcctgacagacagcaagggcagcctggtggtggtgagcagcctgctgggccgggtgcccaccagcttcagcaccccctacagcgctgccaagtttgccctggatggcttcttcggcagcctgcggcgggagctggatgtgcaggatgtgaatgtggccatcaccatgtgtgtgctgggcctgcgggaccgggccagcgctgctgaggccgtgcggggcgtgaccagggtgaaggccgcccctggccccaaggccgccctggccgtcatccggggcggggccaccagggctgctggggtcttctacccctggaggttccggctgctgtgcctgctgcggcgctggctgccccggccccgggcctggttcatccggcaggagctgaatgtgacagctgctgctgcctag

SEQ ID NO: 7258 - DNA, 411 bp, synthetic construct
  misc_feature 1..411: note = source = /note="Description of Artificial Sequence: Synthetic coding sequence"
  source 1..411: mol_type = other DNA
atggtgcggccctaccccctcatctacttcctgttcctgcccctgggcgcctgcttccccctgctggaccggcgggagcccacagatgccatgggcggcctgggcgctggggagcgctgggccgacctggccatgggcccccggccccacagcgtgtggggcagcagccgctggctgcgggccagccagccccaggccctgctggtgattgcccggggcctgcagaccagcggccgggagcacgccggctgccgcttccgcttcggccggcaggatgagggcagcgaggccaccggcttcctgcctgctgctggggagaagaccagcggccccctgggcaacctggccgaggagctgaatggctacagcaggaagaagggcggcttctccttccgctttggaagaagatag

SEQ ID NO: 7259 - DNA, 663 bp, synthetic construct
  misc_feature 1..663: note = source = /note="Description of Artificial Sequence: Synthetic coding sequence"
  source 1..663: mol_type = other DNA
atgaggggccagggcaggaaggagagcctgagtgacagccgggacctggatggcagctatgaccagctgacagacagcgtggatgatgaatttgagctgagcacagtgtgccacaggcctgagggcctggagcagctgcaggagcagaccaagttcaccaggaaggagctgcaggtgctgtaccggggcttcaagaatgaatgtcccagcggcatcgtgaatgaggagaacttcaagcagatctacagccagttcttcccccagggcgacagcagcacctacgccaccttcctgttcaatgcctttgacaccaaccatgatggctctgtgtcctttgaagattttgtggccggcctgagcgtcatcctgcggggcaccgtggatgaccggctgaactgggccttcaacctgtatgacctgaacaaggatggctgcatcaccaaggaggagatgctggacatcatgaagagcatctatgacatgatgggcaagtacacctacccagccctgcgggaggaggccccccgggagcacgtggagagcttcttccagaagatggacaggaacaaggatggagtggtgaccatcgaggagttcatcgagagctgccagaaggatgagaacatcatgaggtccatgcagctgtttgacaacgtcatctag

SEQ ID NO: 7260 - DNA, 2175 bp, synthetic construct
  misc_feature 1..2175: note = source = /note="Description of Artificial Sequence: Synthetic coding sequence"
  source 1..2175: mol_type = other DNA
atgctgcggaccagcacccccaacctgtgtggcggcctgcactgccgggccccctggctgagcagcggcatcctgtgcctgtgcctgatcttcctgctgggccaggtgggcctgctgcagggccacccccagtgcctggactatggcccccccttccagccccccctgcacctggagttctgcagcgactatgagagctttggctgctgtgaccagcacaaggacagaagaattgctgcccgctactgggacatcatggagtactttgacctgaagagacatgagctgtgtggggactacatcaaggacatcctgtgccaggagtgcagcccctatgctgcccacctgtatgatgctgagaacacccagacccccctgaggaacctgcccggcctgtgcagcgactactgcagcgccttccacagcaactgccacagcgccatcagcctgctgaccaatgaccggggcctgcaggagagccacggcagagatggcacccgcttctgccacctgctggacctgcctgacaaggactactgcttccccaacgtgctgagaaatgactacctgaacagacacctgggcatggtggcccaggacccccagggctgcctgcagctgtgcctgtctgaggtggccaacggcctgagaaatcctgtgtccatggtgcatgctggagatggcacccaccgcttctttgtggccgagcaggtgggcgtggtgtgggtgtacctgcctgatggcagccggctggagcagcccttcctggacctgaagaacatcgtgctgaccaccccctggattggagatgagcggggcttcctgggcctggccttccaccccaagttccgccacaacaggaagttctacatctactacagctgcctggacaagaagaaggtggagaagatccgcatcagcgagatgaaggtgtccagagctgaccccaacaaggctgacctgaagtctgagagggtcatcctggagattgaggagcccgccagcaaccacaacggcggccagctgctgtttggcctggatggctacatgtacatcttcaccggagatggcggccaggccggggaccccttcggcctgtttggaaatgcccagaacaagagcagcctgctgggcaaggtgctgagaattgatgtgaacagagctggcagccacggcaagcgctacagagtgcccagcgacaacccctttgtgtctgagcccggggcccacccagccatctatgcctacggcatccggaacatgtggaggtgtgctgtggacagaggagaccccatcacccggcagggccggggccgcatcttctgtggagatgtgggccagaacagatttgaggaggtggacctgatcctgaagggcggcaactacggctggagggccaaggagggctttgcctgctatgacaagaagctgtgccacaatgccagcctggatgatgtgctgcccatctatgcctacggccatgctgtgggcaagtctgtgactggaggctacgtgtaccggggctgtgagagccccaacctgaatggcctgtacatctttggagacttcatgagcggccgcctgatggccctgcaggaggacaggaagaacaagaagtggaagaagcaggacctgtgcctgggcagcaccaccagctgtgccttccctggcctcatcagcacccacagcaagttcatcatcagctttgctgaagatgaggccggggagctgtacttcctggccaccagctaccccagcgcctatgccccccggggcagcatctacaagtttgtggaccccagccggcgggcccctcctgggaagtgcaagtacaagcctgtgcctgtgaggaccaagagcaagaggatccccttccggcccctggccaagacagtgctggacctgctgaaggagcagagcgagaaggccgccaggaagagcagcagcgccaccctggccagcggccctgcccagggcctgtctgagaagggcagcagcaagaagctggccagccccaccagcagcaagaacaccctgcggggccctggcaccaagaagaaggcccgggtgggcccccacgtgcggcagggcaagaggaggaagagcctgaagagccacagcggccgcatgaggccttctgctgagcagaagagagctggccgcagcctgccctag

SEQ ID NO: 7261 - DNA, 1218 bp, synthetic construct
  misc_feature 1..1218: note = source = /note="Description of Artificial Sequence: Synthetic coding sequence"
  source 1..1218: mol_type = other DNA
atgtggtacgtgtccacccggggcgtggccccccgggtgaactttgaaggagccctcttcagcggctacgccccagatggcggcctcttcatgcctgaggagctgccccagctggaccggggcaccctgtgccagtggagcaccctgagctacccaggcctggtgaaggagctgtgtgccctcttcatcggcagcgagctgctgcccaaggatgagctgaatgacctgattgaccgggccttcagccgcttccgccaccgggaggtggtgcacctgagccggctgagaaatggcctgaatgtgctggagctgtggcacggcgtgacctacgccttcaaggacctgagcctgagctgcaccacccagttcctgcagtacttcctggagaagcgggagaagcacgtgacagtggtggtgggcaccagcggggacaccggcagcgctgccatcgagagcgtgcagggcgccaagaacatggacatcatcgtgctgctgcccaagggccactgcaccaagatccaggagctgcagatgaccaccgtgctgaagcagaatgtgcacgtgtttggagtggagggcaacagtgatgagctggatgagcccatcaagacagtgtttgctgatgtggcctttgtgaagaagcacaacctgatgagcctgaacagcatcaactggagccgggtgctggtgcagatggcccaccacttctttgcctacttccagtgcacccccagcctggacacccaccccctgcccctggtggaggtggtggtgcccaccggggctgctggcaacctggccgccggctacatcgcccagaagattggcctgcccatccggctggtggtggccgtgaacagaaatgacatcatccacaggacagtgcagcagggcgacttcagcctgtctgaggccgtgaagagcaccctggccagcgccatggacatccaggtgccctacaacatggagagggtcttctggctgctgagcggcagtgacagccaggtgacccgggccctgatggagcagtttgagaggacccagagcgtgaacctgcccaaggagctgcacagcaagtgggagcggcaggactatgagaagatggctgtgatggagtgtgatggctgctgcgtggagctgtgcctgggcaactgtggcccccggcggggctctgtgacagacatccctggaacagccatggtgcggggcggcggctag

SEQ ID NO: 7262 - DNA, 492 bp, synthetic construct
  misc_feature 1..492: note = source = /note="Description of Artificial Sequence: Synthetic coding sequence"
  source 1..492: mol_type = other DNA
atgaccatgaggcacaactggaccccagacctgagccccctgtgggtgctgctgctgtgtgcccacgtggtgaccctgctggtgcgggccacccctgtgtcccagaccaccacagctgccacagcctctgtgcgcagcaccaaggacccctgccccagccagccccctgtgtttcctgctgccaagcagtgcccagccctggaggtgacctggccagaggtggaggtgcccctgaatggcaccctgagcctgagctgtgtggcctgcagccgcttccccaacttcagcatcctgtactggctgggcaatggcagcttcatcgagcacctgcccggccgcctgtgggagggcagcaccagccgggagcggggcagcacaggctgggccgagggcaacctggccccccaccccaggagccctgccctgcagccccagcagagcacagctgctggcctgcggctgagcacaggccctgctgctgcccagccctag

SEQ ID NO: 7263 - DNA, 1590 bp, synthetic construct
  misc_feature 1..1590: note = source = /note="Description of Artificial Sequence: Synthetic coding sequence"
  source 1..1590: mol_type = other DNA
atggccccagcccggaccatggcccgggcccggctggccccagctggcatcccagctgtggccctgtggctgctgtgcaccctgggcctgcagggcacccaggccggccccccaccagcccctcctggcctgcctgctggagctgactgcctgaacagcttcaccgctggggtgcccggctttgtgctggacaccaatgcctctgtgtccaatggagccaccttcctggagagccccaccgtgcggcggggctgggactgtgtgcgggcctgctgcaccacccagaactgcaacctggccctggtggagctgcagcctgacagaggagaagatgccatcgccgcctgcttcctgatcaactgcctgtatgagcagaactttgtgtgcaagtttgccccccgggagggcttcatcaactacctgacccgggaggtgtaccgcagctaccggcagctgcggacccagggctttggaggcagcggcatccccaaggcctgggccggcatcgacctgaaggtgcagccccaggagcccctggtgctgaaggatgtggagaacacagactggaggctgctgcggggggacacagatgtgcgggtggagaggaaggaccccaaccaggtggagctgtggggcctgaaggagggcacctacctgttccagctgactgtgaccagcagtgaccaccctgaggacacagccaacgtgacagtgacagtgctgagcaccaagcagacagaggactactgcctggccagcaacaaggtgggccgctgccggggcagcttcccccgctggtactatgaccccacagagcagatctgcaagagctttgtgtatggaggctgcctgggcaacaagaacaactacctgcgggaggaggagtgcatcctggcctgccggggcgtgcagggcggccccctgcggggcagcagcggggcccaggccaccttcccccagggccccagcatggagcggcggcaccctgtgtgcagcggcacctgccagcccacccagttccgctgcagcaatggctgctgcatcgacagcttcctggagtgtgatgacacccccaactgcccagatgccagtgatgaagctgcctgtgagaagtacaccagcggctttgatgagctgcagaggatccacttccccagcgacaagggccactgtgtggacctgcctgacaccggcctgtgcaaggagagcatcccccgctggtactacaaccccttcagcgagcactgtgcccgcttcacctatggaggctgctacggcaacaagaacaactttgaggaggagcagcagtgcctggagagctgccggggcatcagcaagaaggatgtgtttggcctgcggcgggagatccccatccccagcactggatctgtggagatggctgtggccgtgttcctggtgatctgcatcgtggtggtggtggccatcctgggctactgcttcttcaagaaccagaggaaggacttccacggccaccaccaccaccccccacccaccccagccagcagcacagtgtccaccacagaggacacagagcacctggtgtacaaccacaccacccggcccctgtag

SEQ ID NO: 7264 - DNA, 1803 bp, synthetic construct
  misc_feature 1..1803: note = source = /note="Description of Artificial Sequence: Synthetic coding sequence"
  source 1..1803: mol_type = other DNA
atgcagggccccctgctgctgcccggcctgtgcttcctgctgagcctgtttggagctgtgacccagaagaccaagaccagctgtgccaagtgccccccaaatgccagctgtgtgaacaacacccactgcacctgcaaccacggctacaccagcggcagcggccagaagctgttcaccttccccctggagacctgcaatgacaccaccagcagcaagaccacagagggcaggaaggagctgcagaagatcgtggacaagtttgagagcctgctgaccaaccagaccctgtggaggacagagggccggcaggagatcagcagcacagccaccaccatcctgagagatgtggagagcaaggtgctggagacagccctgaaggaccctgagcagaaggtgctgaagatccagaatgattctgtggccatcgagacccaggccatcacagacaactgcagcgaggagaggaagaccttcaacctgaatgtgcagatgaacagcatggacatccgctgcagcgacatcatccagggcgacacccagggccccagcgccatcgccttcatctcctacagcagcctgggcaacatcatcaatgccaccttctttgaggagatggacaagaaggaccaggtgtacctgaacagccaggtggtgtctgctgccatcggccccaagagaaatgtgtccctgagcaagtctgtgaccctgaccttccagcacgtgaagatgacccccagcaccaagaaggtgttctgtgtgtactggaagagcacaggccagggcagccagtggagcagagatggctgcttcctgattcatgtgaacaagagccacaccatgtgcaactgcagccacctgagcagctttgctgtgctgatggccctgaccagccaggaggaggaccctgtgctgaccgtcatcacctacgtgggcctgtctgtgtccctgctgtgcctgctgctggccgccctgaccttcctgctgtgcaaggccatccggaacaccagcaccagcctgcacctgcagctgagcctgtgcctcttcctggcccacctgctcttcctggtgggcatcgacagaacagagcccaaggtgctgtgcagcatcatcgccggggccctgcactacctgtacctggccgccttcacctggatgctgctggagggcgtgcacctgttcctgacagccaggaacctgactgtggtgaactacagcagcatcaaccggctgatgaagtggatcatgtttcctgtgggctacggcgtgcctgctgtgacagtggccatctctgctgcctcctggccccacctgtatggaacagctgaccgctgctggctgcacctggaccagggcttcatgtggagcttcctgggccctgtgtgtgccatcttcagcgccaacctggtgctcttcatcctggtgttctggatcctgaagaggaagctgagcagcctgaacagcgaggtgtccaccatccagaacaccaggatgctggccttcaaggccacagcccagctgttcatcctgggctgcacctggtgcctgggcctgctgcaggtgggccctgctgcccaggtgatggcctacctgttcaccatcatcaacagcctgcagggcttcttcatcttcctggtgtactgcctgctgagccagcaggtgcagaagcagtaccagaagtggttccgggagatcgtgaagagcaagtctgagagcgagacctacaccctgagcagcaagatgggccctgacagcaagcccagtgaaggagatgtgtttcctggccaggtgaagaggaagtactag

SEQ ID NO: 7265 - DNA, 660 bp, synthetic construct
  misc_feature 1..660: note = source = /note="Description of Artificial Sequence: Synthetic coding sequence"
  source 1..660: mol_type = other DNA
atgaagctgctgctgtgggcctgcatcgtgtgtgtggcctttgccaggaagaggcgcttccccttcatcggagaagatgacaatgatgatggccaccccctgcaccccagcctgaacatcccctacggcatccggaacctgcccccacccctgtactacagacctgtgaacacagtgcccagctacccaggcaacacctacacagacaccggcctgcccagctacccctggatcctgaccagccctggcttcccctacgtgtaccacatccggggcttccccctggccacccagctgaatgtgccccccctgcccccccggggcttcccctttgtgccccccagccgcttcttctctgctgctgctgccccagctgccccacccatcgctgctgagcctgctgctgctgcccccctgacagccacccctgtggccgctgagcctgctgctggggcccctgtggccgctgagcctgctgctgaggcccctgtgggcgctgagcctgctgctgaggcccctgtggccgctgagcctgctgctgaggcccctgtgggcgtggagcctgctgctgaggagcccagccctgctgagcccgccacagccaagccagctgcccctgagccccaccccagccccagcctggagcaggccaaccagtag

SEQ ID NO: 7266 - DNA, 1743 bp, synthetic construct
  misc_feature 1..1743: note = source = /note="Description of Artificial Sequence: Synthetic coding sequence"
  source 1..1743: mol_type = other DNA
atgcacctgtctgctgtgttcaatgccctgctggtgtctgtgctggccgctgtgctgtggaagcacgtgcggctgcgggagcacgccgccaccctggaggaggagctggccctgagccggcaggccacagagcccgccccagccctgagaattgactaccccaaggccctgcagatcctgatggagggcggcacccacatggtgtgcaccggccgcacccacacagaccgcatctgccgcttcaagtggctgtgctacagcaatgaggccgaggagttcatcttcttccacggcaacacctctgtgatgctgcccaacctgggcagccgccgcttccagcctgccctgctggacctgagcacagtggaggaccacaacacccagtacttcaactttgtggagctgcctgctgctgccctgcgcttcatgcccaagcctgtgtttgtgcctgatgtggccctgattgccaaccgcttcaacccagacaacctgatgcacgtgttccatgatgacctgctgcccctcttctacaccctgcggcagtttcctggcctggcccacgaggcccggctcttcttcatggagggctggggcgagggcgcccactttgacctgtacaagctgctgagccccaagcagcccctgctgcgggcccagctgaagaccctgggccgcctgctgtgcttcagccacgcctttgtgggcctgagcaagatcaccacctggtaccagtatggctttgtgcagccccagggccccaaggccaacatcctggtgtctggaaatgagatccggcagtttgcccgcttcatgacagagaagctgaatgtgagccacactggagtgcccctgggggaggagtacatcctggtgttcagcaggacccagaacagactcatcctgaatgaggccgagctgctgctggccctggcccaggagttccagatgaagacagtgacagtgtccctggaggaccacacctttgctgatgtggtgcggctggtgtccaatgcctccatgctggtgtccatgcatggagcccagctggtgaccaccctcttcctgcccaggggggccaccgtggtggagctgttcccctatgctgtgaacccagaccactacaccccctacaagaccctggccatgctgcccggcatggacctgcagtatgtggcctggaggaacatgatgccagaaaatacagtgacccaccctgagcggccctgggaccagggcggcatcacccacctggacagagctgagcaggcccgcatcctgcagagccgggaggtgcccaggcacctgtgctgcaggaaccctgagtggctgttccgcatctaccaggacaccaaggtggacatccccagcctcatccagaccatccggcgggtggtgaagggccggcccggccccaggaagcagaagtggacagtgggcctgtacccaggcaaggtgcgggaggcccgctgccaggcctctgtgcatggagccagcgaggcccggctgactgtgtcctggcagatcccctggaacctgaagtacctgaaggtgcgggaggtgaagtatgaggtgtggctgcaggagcagggcgagaacacctacgtgccctacatcctggccctgcagaaccacaccttcacagagaacatcaagcccttcaccacctacctggtgtgggtgcgctgcatcttcaacaagatcctgctgggcccctttgctgatgtgctggtgtgcaacacctag

SEQ ID NO: 7267 - DNA, 5130 bp, synthetic construct
  misc_feature 1..5130: note = source = /note="Description of Artificial Sequence: Synthetic coding sequence"
  source 1..5130: mol_type = other DNA
atgggcttcctgcccaagctgctgctgctggccagcttcttccctgctggccaggcctcctggggcgtgagcagcccccaggatgtgcagggcgtgaagggcagctgcctgctgatcccctgcatcttctccttcccagcagatgtggaggtgcctgatggcatcacagccatctggtactatgactacagcggccagaggcaggtggtgagccacagcgctgaccccaagctggtggaggcccgcttccggggccgcacagagttcatgggcaaccctgagcaccgggtgtgcaacctgctgctgaaggacctgcagcctgaggacagcggcagctacaacttccgctttgagatcagcgaggtgaaccgctggagcgatgtgaagggcaccctggtgacagtgacagaggagccccgggtgcccaccatcgccagccctgtggagctgctggagggcacagaggtggacttcaactgcagcaccccctacgtgtgcctgcaggagcaggtgcggctgcagtggcagggccaggaccctgcccggtctgtgaccttcaacagccagaagtttgagcccaccggggtgggccacctggagaccctgcacatggccatgtcctggcaggaccacggccgcatcctgcgctgccagctgtctgtggccaaccaccgggcccagagcgagatccacctgcaggtgaagtatgcccccaagggcgtgaagatcctgctgagccccagcggcaggaacatcctgcccggggagctggtgaccctgacctgccaggtgaacagcagctacccagctgtgagcagcatcaagtggctgaaggatggagtgcggctgcagaccaagacaggagtgctgcacctgccccaggccgcctggagcgatgctggggtgtacacctgccaggccgagaatggagtgggcagcctggtgtccccacccatcagcctgcacatcttcatggccgaggtgcaggtgtccccagctggccccatcctggagaaccagacagtgaccctggtgtgcaacaccccaaatgaggcccccagcgacctgcgctacagctggtacaagaaccacgtgctgctggaggatgcccacagccacaccctgcggctgcacctggccaccagggctgacaccggcttctacttctgtgaggtgcagaatgtgcacggcagcgagaggagcggccctgtgtctgtggtggtgaaccacccccccctgacccctgtgctgacagccttcctggagacccaggccggcctggtgggcatcctgcactgcagcgtggtgtctgagcccctggccaccctggtgctgagccatggaggccacatcctggccagcaccagcggggacagcgaccacagcccccgcttcagcggcaccagcggccccaacagcctgcggctggagatccgggacctggaggagacagacagcggggagtacaagtgcagcgccaccaacagcctgggcaatgccaccagcaccctggacttccacgccaatgctgcccggctgctgatcagccctgctgctgaggtggtggagggccaggccgtgaccctgagctgccgcagcggcctgagccccaccccagatgcccgcttctcctggtacctgaatggagccctgctgcacgagggccctggcagcagcctgctgctgcctgctgccagcagcacagatgctggcagctaccactgccgggccagagatggccacagcgccagcggccccagcagccctgctgtgctgactgtgctgtacccaccccggcagcccaccttcaccacccggctggacctggatgctgctggggccggggccggccggcggggcctgctgctgtgccgggtggacagcgaccccccagcccggctgcagctgctgcacaaggacagagtggtggccaccagcctgcccagcggcggcggctgcagcacctgtggcggctgcagccccaggatgaaggtgaccaaggcccccaacctgctgcgggtggagatccacaaccccctgctggaggaggagggcctgtacctgtgtgaggccagcaatgccctgggcaatgccagcaccagcgccaccttcaacggccaggccaccgtgctggccatcgcccccagccacaccctgcaggagggcacagaggccaacctgacctgcaatgtgtcccgggaggccgccggcagccctgccaacttctcctggttcagaaatggagtgctgtgggcccagggccccctggagaccgtgaccctgctgcctgtggccaggacagatgctgccctgtatgcctgccgcatcctgacagaggccggggcccagctgagcacccctgtgctgctgtctgtgctgtaccccccagaccggcccaagctgagcgccctgctggacatgggccagggccacatggccctcttcatctgcaccgtggacagccggcccctggccctgctggccctcttccatggagagcacctgctggccaccagcctgggcccccaggtgcccagccacggccgcttccaggccaaggccgaggccaacagcctgaagctggaggtgcgggagctgggcctgggggacagcggcagctaccgctgtgaggccaccaacgtgctgggcagcagcaacaccagcctcttcttccaggtgcggggggcctgggtgcaggtgagccccagccctgagctgcaggagggccaggccgtggtgctgagctgccaggtgcacactggagtgcctgagggcaccagctaccgctggtacagagatggccagcccctgcaggagagcaccagcgccaccctgcgctttgctgccatcaccctgacccaggccggggcctaccactgccaggcccaggcccctggcagcgccaccaccagcctggccgcccccatcagcctgcacgtgtcctatgcccccaggcatgtgaccctgaccaccctgatggacaccggccctggccgcctgggcctgctgctgtgccgggtggacagcgaccccccagcccagctgcggctgctgcatggagaccggctggtggccagcaccctgcagggcgtgggcggccctgagggcagcagcccccggctgcacgtggccgtggcccccaacaccctgcggctggagatccatggagccatgctggaggatgaaggagtgtacatctgtgaggccagcaacaccctgggccaggccagcgccagcgctgactttgatgcccaggccgtgaatgtgcaggtgtggccaggggccaccgtgcgggagggccagctggtgaacctgacctgcctggtgtggaccacccacccagcccagctgacctacacctggtaccaggacggccagcagaggctggatgcccacagcatccccctgcccaacgtgacagtgagagatgccaccagctaccgctgtggggtgggccccccaggccgggccccccggctgagccggcccatcaccctggatgtgctgtatgcccccaggaacctgcggctgacctacctgctggagagccacggcggccagctggccctggtgctgtgcaccgtggacagccggcccccagcccagctggccctgagccacgccggccgcctgctggccagcagcacagctgcctctgtgcccaacaccctgcggctggagctgcggggcccccagcccagagatgagggcttctacagctgcagcgcccggagccccctgggccaggccaacaccagcctggagctgcggctggagggcgtgcgggtcatcctggcccctgaggccgctgtgcctgagggcgcccccatcaccgtgacctgtgccgaccctgctgcccacgcccccaccctgtacacctggtaccacaacggccgctggctgcaggagggccctgctgccagcctgtccttcctggtggccacccgggcccatgctggggcctacagctgccaggcccaggatgcccagggcaccaggagcagcaggcctgctgccctgcaggtgctgtatgccccccaggatgctgtgctgagcagcttccgggacagccgggcccgctccatggctgtgatccagtgcaccgtggacagcgagcccccagctgagctggccctgagccatgatggcaaggtgctggccaccagcagcggcgtgcacagcctggccagcggcactggacatgtgcaggtggccagaaatgccctgcggctgcaggtgcaggatgtgcctgctggagatgacacctacgtgtgcacagcccagaacctgctgggcagcatcagcaccatcggccgcctgcaggtggagggcgcccgggtggtggccgagcccggcctggatgtgcctgagggcgccgccctgaacctgagctgccgcctgctgggcggccctggccctgtgggcaacagcacctttgcctggttctggaatgaccggcggctgcacgccgagcctgtgcccaccctggccttcacccacgtggcccgggcccaggccggcatgtaccactgcctggccgagctgcccactggagctgctgccagcgcccctgtgatgctgcgggtgctgtacccacccaagacccccaccatgatggtgtttgtggagcctgagggcggcctgcggggcatcctggactgccgggtggacagcgagcccctggccagcctgaccctgcacctgggcagccggctggtggccagcagccagccccagggcgccccagctgagccccacatccacgtgctggccagccccaatgccctgcgggtggacatcgaggccctgcggcccagcgaccagggcgagtacatctgcagcgccagcaatgtgctgggcagcgccagcaccagcacctactttggagtgcgggccctgcaccggctgcaccagttccagcagctgctgtgggtgctgggcctgctggtgggcctgctgctgctgctgctgggcctgggcgcctgctacacctggaggagaagaagagtgtgcaagcagagcatgggagaaaattctgtggagatggccttccagaaggagaccacccagctgattgatcctgatgctgccacctgtgagaccagcacctgtgccccacccctgggctag

SEQ ID NO: 7268 - DNA, 693 bp, synthetic construct
  misc_feature 1..693: note = source = /note="Description of Artificial Sequence: Synthetic coding sequence"
  source 1..693: mol_type = other DNA
atgtgtgtgacctaccacaatggaacaggctactgcaagtgcccagagggcttcctgggggagtactgccagcaccgggacccctgtgagaagaaccgctgccagaatggaggcacctgtgtggcccaggccatgctgggcaaggccacctgccgctgtgccagcggcttcaccggggaggactgccagtacagcaccagccacccctgctttgtgtcccggccctgcctgaatggaggcacctgccacatgctgagccgggacacctatgaatgtacctgccaggtgggcttcaccgggaaggagtgccagtggacagatgcctgcctgagccacccctgtgccaacggcagcacctgcaccaccgtggccaaccagttcagctgcaagtgcctgaccggcttcaccggccagaagtgtgaaacagatgtgaatgaatgtgacatccctggccactgccagcacggcggcacctgcctgaacctgcccggcagctaccagtgccagtgcctgcagggcttcaccggccagtactgtgacagcctgtatgtgccctgtgcccccagcccctgtgtgaatggaggcacctgccggcagacaggagacttcacctttgagtgcaactgcctgcctgccacctggcccatcttccccaagctgctgagcctgcaggagaaggagagctactgctag

SEQ ID NO: 7269 - DNA, 660 bp, synthetic construct
  misc_feature 1..660: note = source = /note="Description of Artificial Sequence: Synthetic coding sequence"
  source 1..660: mol_type = other DNA
atgtttgtgtcctacctgatcctgaccctgctgcacgtgcagacagctgtgctggcccggcctggaggagagagcatcggctgtgatgactacctgggcagtgacaaggtggtggacaagtgtggggtgtgtggcggggacaacacaggctgccaggtggtgtctggagtcttcaagcacgccctgaccagcctgggctaccaccgggtggtggagatccctgagggcgccaccaagatcaacatcacagagatgtacaagagcaacaagaagaagagccacctgaagccagccacccggggcagccagttcagctctgtgaaggtgtgcagcgtgcctgctgcctgcaagctgctgggcaccccaggccgggcccggcagcctgtgcctgccccccgggagctggagcatgacaagaacagcccccactgtgcctacctgagcctgtacctgaccagcctggcccagagctcctggagggtcttcagcctcttctcctatgtgctgatctacctgttcagcaagtacctggccttcaacaccctgtttgccctgaagaggatggccctgcagagggacaggaaggagaagacccgggcctggtgcatcttcatcaagctgtgtggccgggagatccagatcctgcccggccctgtgtag

SEQ ID NO: 7270 - DNA, 363 bp, synthetic construct
  misc_feature 1..363: note = source = /note="Description of Artificial Sequence: Synthetic coding sequence"
  source 1..363: mol_type = other DNA
atggacaacgtgcagcccaagatcaagcaccggcccttctgcttctctgtgaagggccacgtgaagatgctgcggctggccctgactgtgacctccatgaccttcttcatcatcgcccaggcccctgagccctacatcgtcatcactggatttgaggtgaccgtcatcctcttcttcatcctgctgtatgtgctgcggctggaccggctgatgaagtggctgttctggcccctgctggtgtttgccctggtgacagctgtgtgctgcctggctgatggagccctgatctacaggaagctgctcttcaaccccagcggcccctaccagaagaagcctgtgcatgagaagaaggaggtgctgtag

SEQ ID NO: 7271 - DNA, 864 bp, synthetic construct
  misc_feature 1..864: note = source = /note="Description of Artificial Sequence: Synthetic coding sequence"
  source 1..864: mol_type = other DNA
atggccccctggagccaccccagcgcccagctgcagcctgtgggcggagatgctgtgtccccagccctgatggtgctgctgtgcctgggcaacctgagcaaggccaccctgtgggccgagcccggcagcgtcatcagccggggcaacagcgtgaccatccgctgccagggcaccctggaggcccaggagtaccgcctggtgaaggagggcagccctgagccctgggacacccagaaccccctggagcccaagaacaaggcccgcttcagcatccccagcatgacagagcaccacgccggccgctaccgctgctactactacagccctgctggctggagcgagcccagcgaccccctggagctggtggtgacaggcttctacaacaagcccaccctgagcgccctgcccagccctgtggtgaccagcggggagaatgtgaccctgcagtgtggcagccggctgcgctttgaccgcttcatcctgacagaggagggggaccacaagctgtcctggaccctggacagccagctgacccccagcggccagttccaggccctcttccctgtgggccctgtgacccccagccaccgctggatgctgcgctgctacggcagccgccgccacatcctgcaggtgtggagcgagcccagcgacctgctggagatccctgtgtctggagctgctgacaacctgagccccagccagaacaagagtgacagcggcacagccagccacctgcaggactatgctgtggagaacctgatccgcatgggcatggccggcctcatcctggtggtgctgggcatcctgatcttccaggactggcacagccagaggagcccccaggccgctgctggaagatag

SEQ ID NO: 7272 - DNA, 438 bp, synthetic construct; identical to SEQ ID NO: 6893
  misc_feature 1..438: note = source = /note="Description of Artificial Sequence: Synthetic coding sequence"
  source 1..438: mol_type = other DNA

SEQ ID NO: 7273 - DNA, 1776 bp, synthetic construct
  misc_feature 1..1776: note = source = /note="Description of Artificial Sequence: Synthetic coding sequence"
  source 1..1776: mol_type = other DNA
atgcagcaggacggcctgggcgtgggcaccagaaatggcagcggcaagggccgctctgtgcaccccagctggccctggtgtgccccccggcccctgcgctacttcggcagagatgcccgggcccggcgggcccagacagctgccatggccctggccatccaggtgacagtgagcaacccctaccacgtggtgatcctcttccagcctgtgaccctgccctgcacctaccagatgaccagcacccccacccagcccatcgtcatctggaagtacaagagcttctgccgggacagaattgctgatgccttctccccagcctctgtggacaaccagctgaatgcccagctggccgccggcaaccctggctacaacccctacgtggagtgccaggacagcgtgaggacagtgcgggtggtggccaccaagcagggcaatgctgtgaccctgggggactactaccagggccgccgcatcaccatcactggaaatgctgacctgacctttgaccagacagcctggggagacagcggcgtgtactactgcagcgtggtgtctgcccaggacctgcagggcaacaatgaggcctatgcagagctgattgtgctgggccgcaccagcggcgtggccgagctgctgcccggcttccaggccggccccatcgaggactggctgtttgtggtggtggtgtgcctggccgccttcctgatcttcctgctgctgggcatctgctggtgccagtgctgcccccacacctgctgctgctacgtgcgctgcccctgctgcccagacaagtgctgctgcccagaggccctgtatgctgctgggaaggccgccaccagcggcgtgcccagcatctatgcccccagcacctacgcccacctgagccctgccaagaccccacctcctccagccatgatccccatgggccctgcctacaacggctacccaggcggctacccaggagatgtggacaggagcagctctgtgcgcagcggctaccgcatccaggccagccagcaggatgacagcatgagggtgctgtactacatggagaaggagctggccaactttgaccccagccggcccggcccccccagcggccgggtggagcgggccatgtctgaggtgaccagcctgcatgaagatgactggaggagccggcccagccggggccctgccctgacccccatcagagatgaggagtggggcggccacagccccaggagcccccggggctgggaccaggagcccgcccgggagcaggccggcggcggctggagggcccggcggccccgggcccggtctgtggatgccctggatgacctgaccccacccagcacagctgagagcggcagccgcagccccaccagcaatggaggccgcagccgggcctacatgccacccaggagccgcagcagagatgacctgtatgaccaggatgacagccgggacttccccaggagccgggacccccactatgatgacttccgcagccgggagcggcccccagctgaccccaggagccaccaccacaggacccgggacccccgggacaatggcagccgcagcggggacctgccctatgatggccgcctgctggaggaggccgtgaggaagaagggcagcgaggagcggcggcggccccacaaggaggaggaggaggaggcctactaccccccagcccccccaccctacagcgagacagacagccaggccagccgggagcggcggctgaagaagaacctggccctgagccgggagagcctggtggtgtag

SEQ ID NO: 7274 - DNA, 678 bp, synthetic construct
  misc_feature 1..678: note = source = /note="Description of Artificial Sequence: Synthetic coding sequence"
  source 1..678: mol_type = other DNA
atgaaccgctgcccccggcgctgccgcagccccctgggccaggccgcccggagcctgtaccagctggtgacaggcagcctgagcccagattctgtggatgatgaatttgagctgagcacagtgtgccacaggcctgagggcctggagcagctgcaggagcagaccaagttcaccaggaaggagctgcaggtgctgtaccggggcttcaagaatgaatgtccttctggaattgtgaatgaggagaacttcaagcagatctacagccagttcttcccccagggcgacagcagcacctacgccaccttcctgttcaatgcctttgacaccaaccatgatggctctgtgtcctttgaggactttgtggccggcctgagcgtcatcctgcggggcaccgtggatgaccggctgaactgggccttcaacctgtatgacctgaacaaggatggctgcatcaccaaggaggagatgctggacatcatgaagagcatctatgacatgatgggcaagtacacctacccagccctgcgggaggaggccccccgggagcacgtggagagcttcttccagaagatggacaggaacaaggatggagtggtgaccatcgaggagttcatcgagagctgccagaaggatgagaacatcatgaggtccatgcagctgtttgacaacgtcatctag

SEQ ID NO: 7275 - DNA, 705 bp, synthetic construct
  misc_feature 1..705: note = source = /note="Description of Artificial Sequence: Synthetic coding sequence"
  source 1..705: mol_type = other DNA
atgcctgccagcagccccttcctgctggcccccaagggccccccaggcaacatgggcggccctgtgcgggagcccgccctgtctgtggccctgtggctgtcctggggcgccgccctgggcgctgtggcctgtgccatggccctgctgacccagcagacagagctgcagagcctgcggcgggaggtgtcccggctgcagggcaccggcggccccagccagaatggagagggctacccctggcagagcctgcctgagcagagcagtgatgccctggaggcctgggagaatggagagaggagcaggaagagaagagctgtgctgacccagaagcagaagaatgacagtgatgtgacagaggtgatgtggcagcctgccctgcggcggggccggggcctgcaggcccagggctatggagtgcgcatccaggatgctggggtgtacctgctgtacagccaggtgctcttccaggatgtgaccttcaccatgggccaggtggtgtcccgggagggccagggccggcaggagaccctcttccgctgcatccgctccatgcccagccacccagaccgggcctacaacagctgctacagcgctggggtcttccacctgcaccagggcgacatcctgagcgtcatcatcccccgggcccgggccaagctgaacctgagcccccacggcaccttcctgggctttgtgaagctgtag

SEQ ID NO: 7276 - DNA, 2400 bp, synthetic construct
  misc_feature 1..2400: note = source = /note="Description of Artificial Sequence: Synthetic coding sequence"
  source 1..2400: mol_type = other DNA
atgaagcccatgctgaaggacttcagcaacctgctgctggtggtgctgtgtgactatgtgctgggggaggccgagtacctgctgctgcgggagcccggccacgtggccctgagcaatgacacagtgtatgtggacttccagtactttgatggagccaacggcaccctgagaaatgtgtctgtgctgctgctggaggccaacaccaaccagacagtgaccaccaagtacctgctgaccaaccagagccagggcaccctgaagtttgagtgcttctacttcaaggaggccggggactactggttcaccatgaccccagaggccacagacaacagcacccccttcccctggtgggagaagagcgccttcctgaaggtggagtggcctgtgttccacgtggacctgaacagaagtgccaaggctgctgagggcaccttccaggtgggcctcttcaccagccagcccctgtgccccttccctgtggacaagcccaacatcgtggtggatgtgatcttcaccaacagcctgcctgaggcccggaggaacagccggcagcccctggagatccgcaccagcaagaggacagagctggcccagggccagtgggtggagtttggctgtgcccccctgggccctgaggcctacgtgacagtggtgctgaagctgctgggccgggacagcgtcatcaccagcacaggccccatcgacctggcccagaagtttggctacaagctggtgatggtgcctgagctgacctgtgagagcggcgtggaggtgacagtgctgcccccaccctgcacctttgtgcagggcgtggtgacagtgttcaaggaggccccccgctacccaggcaagaggaccatccacctggccgagaacagcctgcccctgggggagaggaggaccatcttcaactgcaccctgtttgacatgggcaagaacaagtactgctttgattttggcatcagcagccgcagccacttcagcgccaaggaggagtgcatgctgatccagaggaacacagccttccagcccagcagccccagccccctgcagccccagggccctgtgaagagcaacaacatcgtgacagtgacaggcatcagcctgtgcctcttcatcatcatcgccaccgtgctgatcaccctgtggaggcgcttcggccgcccagccaagtgcagcaccccagcccggcacaacagcatccacagccccagcttcaggaagaacagtgatgaggagaacatctgtgagctgtctgagcagaggggcagcttcagtgatggaggagatggccccaccggcagccctggggacaccggcatccccctgacctaccgccgcagcggccctgtgcccccagaagatgatgccagcggcagcgagagcttccagagcaatgcccagaagatcatccccccactcttctcctaccgcctggcccagcagcagctgaaggagatgaagaagaagggcctgacagagaccaccaaggtgtaccacgtgtcccagagccccctgacagacacagccattgatgctgcccccagcgcccccctggacctggagagccctgaggaggccgccgccaacaagttccgcatcaagagccccttccctgagcagcctgctgtgtctgctggggagcggccccccagccggctggacctgaatgtgacccaggccagctgtgccatcagccccagccagaccctcatcaggaagagccaggcccggcacgtgggcagccggggcggccccagcgagaggagccacgccagaaatgcccacttccggaggacagccagcttccacgaggcccggcaggcccggcccttccgggagaggtccatgagcaccctgaccccccggcaggccccagcctacagcagcaggaccaggacctgtgagcaggctgaagatcgcttccggccccagagcagaggagcccacctgtttcctgagaagctggagcacttccaggaggccagcggcacccggggccccctgaaccccctgcccaagagctacaccctgggccagcccctgaggaagccagacctgggggaccaccaggccggcctggtggccggcatcgagaggacagagccccaccgggcccggcggggccccagccccagccacaagtctgtgtccaggaagcagagcagccccatcagccccaaggacaactaccagagggtgagcagcctgagccccagccagtgcaggaaggacaagtgccagagcttccccacccaccctgagtttgccttctatgacaacaccagctttggcctgacagaagctgagcagaggatgctggacctgcccggctacttcggcagcaatgaagaagatgagaccaccagcaccctgtctgtggagaagctggtgatctag

SEQ ID NO: 7277 - DNA, 927 bp, synthetic construct
  misc_feature 1..927: note = source = /note="Description of Artificial Sequence: Synthetic coding sequence"
  source 1..927: mol_type = other DNA
atgaggctgctgcctgagtggttcctgctgctgtttggcccctggctgctgaggaaggctgtgtctgcccagatccctgagagcggccggccccagtacctgggcctgcggcctgctgctgctggagctggggcccctggccagcagctgcctgagcccaggagcagtgatggcctgggcgtgggccgggcctggagctgggcctggcccaccaaccacactggagccctggcccgggccggggctgctggggccctgcctgcccagaggaccaagaggaagcccagcatcaaggccgcccgggccaagaagatcttcggctggggagacttctacttccgggtgcacaccctgaagttcagcctgctggtgacaggcaagatcgtggaccacgtgaatggcaccttctctgtgtacttccgccacaacagcagcagcctgggcaacctgtctgtgtccatcgtgccccccagcaagagggtggagtttggaggagtgtggctgcccggccctgtgccccaccccctgcagagcaccctggccctggagggcgtgctgcccggcctgggcccccccctgggcatggctgctgctgctgctggccctggcctgggcggcagcctgggcggggccctggccggccccctgggcggggccctgggcgtgcctggggccaaggagagccgggccttcaactgccacgtggagtatgagaagaccaacagagccaggaagcaccggccctgcctgtatgaccccagccaggtgtgcttcacagagcacacccagagccaggccgcctggctgtgtgccaagcccttcaaggtgatctgcatctttgtgtccttcctgagctttgactacaagctggtgcagaaggtgtgcccagactacaacttccagagcgagcacccctactttggatag

SEQ ID NO: 7278 - DNA, 795 bp, synthetic construct
  misc_feature 1..795: note = source = /note="Description of Artificial Sequence: Synthetic coding sequence"
  source 1..795: mol_type = other DNA
atgaagctgggctgtgtgctgatggcctgggccctgtacctgagcctgggcgtgctgtgggtggcccagatgctgctggccgccagctttgagaccctgcagtgtgagggccctgtgtgcacagaggagagcagctgccacacagaagatgacctgacagatgcccgggaggccggcttccaggtgaaggcctacaccttcagcgagcccttccacctgattgtgtcctatgactggctgatcctgcagggccctgccaagcctgtgtttgaaggagacctgctggtgctgcgctgccaggcctggcaggactggcccctgacccaggtgaccttctacagagatggcagcgccctgggccccccaggccccaaccgggagttcagcatcaccgtggtgcagaaggctgacagcggccactaccactgcagcggcatcttccagagccctggccctggcatccctgagacagcctctgtggtggccatcaccgtgcagggcgccagcagcagcgctgccccacccaccctgaacccagccccccagaagtctgctgcccctggaacagcccctgaggaggcccctggccccctgcccccaccacccacccccagcagtgaagatcctggcttcagcagccccctgggcatgccagacccccacctgtaccaccagatgggcctgctgctgaagcacatgcaggatgtgcgggtgctgctgggccacctgctgatggagctgcgggagctgagcggccacaggaagccaggcaccaccaaggccacagctgagtag

SEQ ID NO: 7279 - DNA, 1362 bp, synthetic construct
  misc_feature 1..1362: note = source = /note="Description of Artificial Sequence: Synthetic coding sequence"
  source 1..1362: mol_type = other DNA
atgctgcgcatcctgtgcctggccctgtgcagcctgctgaccggcaccagggctgaccccggggccctgctgcggctgggcatggacatcatgaaccaggtgcagagcgccatggatgagagccacatcctggagaagatggctgctgaggccggcaagaagcagcccggcatgaagcccatcaagggcatcaccaacctgaaggtgaaggatgtgcagctgcctgtgatcaccctgaactttgtgcctggggtgggcatcttccagtgtgtgtccacaggcatgacagtgacaggcaagagcttcatgggcggcaacatggagatcatcgtggccctgaacatcacagccaccaaccggctgctgagagatgaggagaccggcctgcccgtcttcaagtctgagggctgtgaggtgatcctggtgaatgtgaagaccaacctgcccagcaacatgctgcccaagatggtgaacaagttcctggacagcaccctgcacaaggtgctgcccggcctgatgtgcccagccattgatgctgtgctggtgtatgtgaacaggaagtggaccaacctgagtgaccccatgcctgtgggccagatgggcaccgtgaagtatgtgctgatgtctgccccagccaccacagccagctacatccagctggacttcagccctgtggtgcagcagcagaagggcaagaccatcaagctggctgatgctggggaggccctgaccttccctgagggctacgccaagggcagcagccagctgctgctgcctgccaccttcctgtctgctgagctggccctgctgcagaagagcttccacgtgaacatccaggacaccatgattggagagctgcccccccagaccaccaagaccctggcccgcttcatccctgaggtggccgtggcctaccccaagagcaagcccctgaccacccagatcaagatcaagaagccacccaaggtgaccatgaagacaggcaagagcctgctgcacctgcacagcaccctggagatgtttgctgcccgctggaggagcaaggcccccatgagcctcttcctgctggaggtgcacttcaacctgaaggtgcagtacagcgtgcatgagaaccagctgcagatggccaccagcctggaccggctgctgagcctgagcaggaagagcagcagcatcggcaacttcaatgaaagagagctgaccggcttcatcaccagctacctggaggaggcctacatccctgtggtgaatgatgtgctgcaggtgggcctgcccctgcctgacttcctggccatgaactacaacctggccgagctggacatcgtggagaatgccctgatgctggacctgaagctgggctag

SEQ ID NO: 7280 - DNA, 1323 bp, synthetic construct
  misc_feature 1..1323: note = source = /note="Description of Artificial Sequence: Synthetic coding sequence"
  source 1..1323: mol_type = other DNA
atgtctgcccggggccgctgggagggcggcggccggcgggcctgccggggcagcctgggcctggcccgggcccagggcgctgagcgggtgaccagcagcgagcagaggcctgccatggccagcctgggcctgctgctgctgctgctgctgacagccctgccccccctgtggagcagcagcctgcccggcctggacacagctgagagcaaggccaccatcgctgacctgatcctgagcgccctggagcgggccaccgtcttcctggagcagaggctgcctgagatcaacctggatggcatggtgggcgtgcgggtgctggaggagcagctgaagtctgtgcgggagaagtgggcccaggagcccctgctgcagcccctgagcctgcgggtgggcatgctgggggagaagctggaggccgccatccagaggagcctgcactacctgaagctgagtgaccccaagtacctgcgggagttccagctgaccctgcagcccggcttctggaagctgccccacgcctggatccacacagatgccagcctggtgtaccccaccttcggcccccaggacagcttcagcgaggagaggagtgatgtgtgcctggtgcagctgctgggcactggaacagacagcagcgagccctgtggcctgagtgacctgtgccgcagcctgatgaccaagccaggctgcagcggctactgcctgagccaccagctgctcttcttcctgtgggccaggatgaggggctgcacccagggccccctgcagcagagccaggactacatcaacctcttctgtgccaacatgatggacctgaacagaagagctgaggccatcggctacgcctaccccacccgggacatcttcatggagaacatcatgttctgtggcatgggcggcttcagtgacttctacaagctgcgctggctggaggccatcctgtcctggcagaagcagcaggagggctgcttcggggagccagatgctgaagatgaggagctgagcaaggccatccagtaccagcagcacttcagccggcgggtgaagaggcgggagaagcagttcccagacagccgctctgtggcccaggccggcgtgcagtggaggaacctgggcagcctgcagcccctgcccccaggcttcaagcagttcagctgcctgatcctgcccagctcctgggactacagatctgtgcccccctacctggccaacttctacatcttcctggtggagaccggcttccaccacgtggcccacgccggcctggagctgctgatcagccgggacccccccaccagcggcagccagagcgtgggcctgtag

SEQ ID NO: 7281 - DNA, 708 bp, synthetic construct
  misc_feature 1..708: note = source = /note="Description of Artificial Sequence: Synthetic coding sequence"
  source 1..708: mol_type = other DNA
atgaagtatgtgttctacctgggcgtgctggccggcaccttcttctttgctgacagctctgtgcagaaggaggaccctgccccctacctggtgtacctgaagagccacttcaacccctgtgtgggcgtgctgatcaagcccagctgggtgctggccccagcccactgctacctgcccaacctgaaggtgatgctgggcaacttcaagagccgggtgagagatggaacagagcagaccatcaaccccatccagatcgtgcgctactggaactacagccacagcgccccccaggatgacctgatgctgatcaagctggccaagccagccatgctgaaccccaaggtgcagcccctgaccctggccaccaccaacgtgcggcccggcaccgtgtgcctgctgagcggcctggactggagccaggagaacagcggccgccacccagacctgcggcagaacctggaggcccctgtgatgtctgaccgggagtgccagaagacagagcagggcaagagccacaggaacagcctgtgtgtgaagtttgtgaaggtgttcagccgcatctttggagaggtggccgtggccaccgtcatctgcaaggacaagctgcagggcatcgaggtgggccacttcatgggaggagatgtgggcatctacaccaacgtgtacaagtatgtgtcctggattgaaaatacagccaaggacaagtag

SEQ ID NO: 7282 - DNA, 426 bp, synthetic construct
  misc_feature 1..426: note = source = /note="Description of Artificial Sequence: Synthetic coding sequence"
  source 1..426: mol_type = other DNA
atgctgaagaagatctctgtgggcgtggccggggacctgaacacagtgaccatgaagctgggctgtgtgctgatggcctgggccctgtacctgagcctgggcgtgctgtgggtggcccagatgctgctgggcgccagcagcagcgctgccccacccaccctgaacccagccccccagaagtctgctgcccctggaacagcccctgaggaggcccctggccccctgcccccaccacccacccccagcagcgaggaccccggcttcagcagccccctgggcatgccagacccccacctgtaccaccagatgggcctgctgctgaagcacatgcaggatgtgcgggtgctgctgggccacctgctgatggagctgcgggagctgagcggccacaggaagccaggcaccaccaaggccacagctgagtag

SEQ ID NO: 7283 - DNA, 2886 bp, synthetic construct
  misc_feature 1..2886: note = source = /note="Description of Artificial Sequence: Synthetic coding sequence"
  source 1..2886: mol_type = other DNA
atgctggcccccagaggagctgctgtgctgctgctgcacctggtgctgcagcgctggctggccgccggggcccaggccaccccccaggtgtttgacctgctgcccagcagcagccagaggctgaaccctggggccctgctgcctgtgctgacagatcctgccctgaatgacctgtatgtgatcagcaccttcaagctgcagaccaagagcagcgccaccatcttcggcctgtacagcagcacagacaacagcaagtactttgagttcaccgtgatgggccgcctgaacaaggccatcctgcgctacctgaagaatgatggcaaggtgcacctggtggtgttcaacaacctgcagctggctgatggaagaagacaccgcatcctgctgcggctgagcaacctgcagagaggagctggcagcctggagctgtacctggactgcatccaggtggacagcgtgcacaacctgccccgggcctttgctggccccagccagaagccagagaccatcgagctgcggaccttccagaggaagccccaggacttcctggaggagctgaagctggtggtgcggggcagcctcttccaggtggccagcctgcaggactgcttcctgcagcagagcgagcccctggccgccaccggcaccggggacttcaaccggcagttcctgggccagatgacccagctgaaccagctgctgggggaggtgaaggacctgctgcggcagcaggtgaaggagaccagcttcctgaggaacaccatcgccgagtgccaggcctgtggccccctgaagttccagagccccacccccagcacagtggtgcccccagcccccccagccccacccacccggcccccccggcgctgtgacagcaacccctgcttccggggcgtgcagtgcacagacagcagagatggcttccagtgtggcccctgcccagagggctacacaggaaatggcatcacctgcattgatgtggatgagtgcaagtaccacccctgctacccaggagtgcactgcatcaacctgagccctggcttccgctgtgatgcctgccctgtgggcttcaccggccccatggtgcagggcgtgggcatcagctttgccaagagcaacaagcaggtgtgcacagacattgatgagtgcagaaatggagcctgtgtgcccaacagcatctgtgtgaacaccctgggcagctaccgctgtggcccctgcaagccaggctacacaggagaccagatccggggctgcaaggccgagaggaactgcagaaatcctgagctgaacccctgcagcgtgaatgcccagtgcatcgaggagcggcagggagatgtgacctgtgtgtgtggggtgggctgggccggagatggctacatctgtgggaaggatgtggacatcgacagctacccagatgaggagctgccctgcagcgccaggaactgcaagaaggacaactgcaagtatgtgcccaacagcggccaggaggatgctgacagagatggcattggagatgcctgtgatgaagatgctgatggagatggcatcctgaatgagcaggacaactgtgtgctgatccacaacgtggaccagaggaacagcgacaaggacatctttggagatgcctgtgacaactgcctgtctgtgctgaacaatgaccagaaggacacagatggagatggaagaggagatgcctgtgatgatgacatggatggagatggcatcaagaacatcctggacaactgccccaagttccccaacagagaccagagggacaaggatggagatggagtgggagatgcctgtgacagctgcccagatgtgagcaaccccaaccagagtgatgtggacaatgacctggtgggggacagctgtgacaccaaccaggacagtgatggagatggccaccaggacagcacagacaactgccccaccgtcatcaacagcgcccagctggacacagacaaggatggcattggagatgaatgtgatgatgatgatgacaatgatggcatcccagacctggtgcccccaggccctgacaactgccgcctggtgcccaacccagcccaggaggacagcaacagtgatggagtgggggacatctgtgagagtgactttgaccaggaccaggtgattgacagaattgatgtgtgcccagaaaatgctgaggtgaccctgacagacttccgggcctaccagacagtggtgctggaccctgaaggagatgcccagattgaccccaactgggtggtgctgaaccagggcatggagatcgtgcagaccatgaacagcgaccccggcctggccgtgggctacacagccttcaatggagtggactttgagggcaccttccacgtgaacacccagacagatgatgattatgccggcttcatcttcggctaccaggacagcagcagcttctacgtggtgatgtggaagcagacagagcagacctactggcaggccacccccttccgggctgtggccgagcccggcatccagctgaaggctgtgaagagcaagacaggccctggagagcacctgaggaacagcctgtggcacactggagacaccagtgaccaggtgcggctgctgtggaaggacagcagaaatgtgggctggaaggacaaggtgtcctaccgctggttcctgcagcaccggccccaggtgggctacatccgggtgcgcttctatgagggcagcgagctggtggccgacagcggcgtgaccatcgacaccaccatgaggggcggccgcctgggcgtcttctgcttcagccaggagaacatcatctggagcaacctgaagtaccgctgcaatgacaccatccctgaggacttccaggagttccagacccagaactttgacagatttgacaactag

SEQ ID NO: 7284 - DNA, 300 bp, synthetic construct
  misc_feature 1..300: note = source = /note="Description of Artificial Sequence: Synthetic coding sequence"
  source 1..300: mol_type = other DNA
atggacaacgtgcagcccaagatcaagcaccggcccttctgcttctctgtgaagggccacgtgaagatgctgcggctggacatcatcaacagcctggtgaccaccgtcttcatgctgattgtgtctgtgctggccctgatccctgagaccaccaccctgactgtgggcggcggcgtgtttgccctggtgacagctgtgtgctgcctggctgatggagccctgatctacaggaagctgctcttcaaccccagcggcccctaccagaagaagcctgtgcatgagaagaaggaggtgctgtag

SEQ ID NO: 7285 - DNA, 408 bp, synthetic construct
  misc_feature 1..408: note = source = /note="Description of Artificial Sequence: Synthetic coding sequence"
  source 1..408: mol_type = other DNA
atgagcccccacctgacagccctgctgggcctggtgctgtgcctggcccagaccatccacacccaggagggcgccctgccccggcccagcatctctgctgagcccggcaccgtcatcagccctggcagccacgtgaccttcatgtgccggggccctgtgggcgtgcagaccttccggctggagagagaagatcgggccaagtacaaggacagctacaacgtgttccggctgggccccagcgagagcgaggcccgcttccacatcgacagcgtgtctgagggcaatgccggcctgtaccgctgcctgtactacaagcccccaggctggagcgagcacagcgacttcctggagctgctggtgaagggcaccgtgcctggaacagaggccagcggctttgatgccccctag

SEQ ID NO: 7286 - DNA, 231 bp, synthetic construct
  misc_feature 1..231: note = source = /note="Description of Artificial Sequence: Synthetic coding sequence"
  source 1..231: mol_type = other DNA
atgctgccctgcctggccctgctgctgctgatggagctgtctgtgtgcaccgtggccggagatggaggagaggagcagaccctgagcacagaggccgagacctgggagggcgccggccccagcatccagctgcagctgcaggaggtgaagacaggcaaggccagccagttcttcggcctgatgggcaagagggtgggcggcagagaagatgaggcccagggcagcgagtag

SEQ ID NO: 7287 - DNA, 684 bp, synthetic construct
  misc_feature 1..684: note = source = /note="Description of Artificial Sequence: Synthetic coding sequence"
  source 1..684: mol_type = other DNA
atgaggggccagggcaggaaggagagcctgagtgacagccgggacctggatggcagctatgaccagctgacagacagcgtggatgatgaatttgagctgagcacagtgtgccacaggcctgagggcctggagcagctgcaggagcagaccaagttcaccaggaaggagctgcaggtgctgtaccggggcttcaagaaccctggggccctgtccttccaggagtgccccagcggcatcgtgaatgaggagaacttcaagcagatctacagccagttcttcccccagggcgacagcagcacctacgccaccttcctgttcaatgcctttgacaccaaccatgatggctctgtgtcctttgaggactttgtggccggcctgagcgtcatcctgcggggcaccgtggatgaccggctgaactgggccttcaacctgtatgacctgaacaaggatggctgcatcaccaaggaggagatgctggacatcatgaagagcatctatgacatgatgggcaagtacacctacccagccctgcgggaggaggccccccgggagcacgtggagagcttcttccagaagatggacaggaacaaggatggagtggtgaccatcgaggagttcatcgagagctgccagaaggatgagaacatcatgaggtccatgcagctgtttgacaacgtcatctag

SEQ ID NO: 7288 - DNA, 876 bp, synthetic construct
  misc_feature 1..876: note = source = /note="Description of Artificial Sequence: Synthetic coding sequence"
  source 1..876: mol_type = other DNA
atgatgtctgccactggacctggcaggaagatgggcagccggggccagggcctgctgctggcctactgcctgctgctggcctttgccagcggcctggtgctgagccgggtgccccacgtgcagggcgagcagcaggagtgggagggcacagaggagctgcccagccccccagaccacgccgagagagctgaggagcagcacgagaagtaccggcccagccaggaccagggcctgcctgccagccgctgcctgcgctgctgtgaccccggcacctccatgtacccagccacagctgtgccccagatcaacatcaccatcctgaagggggagaagggggacagaggagaccggggcctgcagggcaagtatggcaagacaggcagcgctggggcccggggccacacaggccccaagggccagaagggctccatgggcgcccctggagagcgctgcaagagccactacgccgccttctctgtgggcaggaagaagcccatgcacagcaaccactactaccagaccgtcatctttgacacagaatttgtgaacctgtatgaccacttcaacatgttcaccgggaagttctactgctacgtgcccggcctgtacttcttcagcctgaatgtgcacacctggaaccagaaggagacctacctgcacatcatgaagaatgaggaggaggtggtgatcctgtttgcccaggtgggggacaggagcatcatgcagagccagagcctgatgctggagctgcgggagcaggaccaggtgtgggtgcggctgtacaagggggagcgggagaatgccatcttcagcgaggagctggacacctacatcaccttcagcggctacctggtgaagcacgccacagagccctag

SEQ ID NO: 7289 - DNA, 213 bp, synthetic construct
  misc_feature 1..213: note = source = /note="Description of Artificial Sequence: Synthetic coding sequence"
  source 1..213: mol_type = other DNA
atggagagaggagctggggccaagctgctgcccctgctgctgctgctgcgggccaccggcttcacctgtgcccagacagatggaagaaatggctacacagctgtgattgaggtgaccagcggcggcccctggggagactgggcctggccagagatgtgcccagatggcttctttgccagcggcttcagcctgaagctgggccgcatggagtag

SEQ ID NO: 7290 - DNA, 402 bp, synthetic construct
  misc_feature 1..402: note = source = /note="Description of Artificial Sequence: Synthetic coding sequence"
  source 1..402: mol_type = other DNA
atgggcagcagcggcctgctgagcctgctggtgctgtttgtgctgctggccaacgtgcagggccctggcctgacagactggctgttcccccggcgctgccccaagatccgggaggagtgtgagttccaggagagagatgtgtgcaccaaggaccggcagtgccaggacaacaagaagtgctgcgtgttcagctgtgggaagaagtgcctggacctgaagcaggatgtgtgtgagatgcccaaggagaccggcccctgcctggcctacttcctgcactggtggtatgacaagaaggacaacacctgcagcatgtttgtgtatggaggctgccagggcaacaacaacaacttccagagcaaggccaactgcctgaacacctgcaagaacaagcgcttcccctag

SEQ ID NO: 7291 - DNA, 771 bp, synthetic construct
  misc_feature 1..771: note = source = /note="Description of Artificial Sequence: Synthetic coding sequence"
  source 1..771: mol_type = other DNA
atgttccagacaggaggcctcatcgtgttctacggcctgctggcccagaccatggcccagtttggaggcctgcctgtgcccctggaccagaccctgcccctgaatgtgaacccagccctgcccctgagccccaccggcctggccggcagcctgaccaatgccctgagcaatggcctgctgagcggcggcctgctgggcatcctggagaacctgcccctgctggacatcctgaagccaggcggcggcaccagcggcggcctgctgggcggcctgctgggcaaggtgaccagcgtcatccctggcctgaacaacatcatcgacatcaaggtgacagacccccagctgctggagctgggcctggtgcagagcccagatggccaccggctgtatgtgaccatccccctgggcatcaagctgcaggtgaacacccccctggtgggcgccagcctgctgcggctggccgtgaagctggacatcacagctgagatcctggccgtgcgggacaagcaggagcgcatccacctggtgctgggggactgcacccacagccctggcagcctgcagatcagcctgctggatggcctgggccccctgcccatccagggcctgctggacagcctgaccggcatcctgaacaaggtgctgcctgagctggtgcagggcaatgtgtgccccctggtgaatgaggtgctgcggggcctggacatcaccctggtgcatgacatcgtgaacatgctgatccacggcctgcagtttgtgatcaaggtgtag

SEQ ID NO: 7292 - DNA, 1386 bp, synthetic construct
  misc_feature 1..1386: note = source = /note="Description of Artificial Sequence: Synthetic coding sequence"
  source 1..1386: mol_type = other DNA
atgagcctggacatccagagcctggacatccagtgtgaggagctgagtgatgcccgctgggccgagctgctgcccctgctgcagcagtgccaggtggtgcggctggatgactgtggcctgacagaggcccgctgcaaggacatcagcagcgccctgcgggtgaacccagccctggccgagctgaacctgcggagcaatgagctgggagatgtgggcgtgcactgtgtgctgcagggcctgcagacccccagctgcaagatccagaagctgagcctgcagaactgctgcctgaccggggccggctgcggcgtgctgagcagcaccctgcggaccctgcccaccctgcaggagctgcacctgagtgacaacctgctgggagatgctggcctgcagctgctgtgtgagggcctgctggacccccagtgccgcctggagaagctgcagctggagtactgcagcctgtctgctgccagctgtgagcccctggcctctgtgctgcgggccaagccagacttcaaggagctgactgtgagcaacaatgacatcaatgaagctggggtgcgggtgctgtgccagggcctgaaggacagcccctgccagctggaggccctgaagctggagagctgtggggtgaccagtgacaactgccgggacctgtgtggcatcgtggccagcaaggccagcctgcgggagctggccctgggcagcaacaagctgggagatgtgggcatggccgagctgtgccccggcctgctgcaccccagcagccggctgcggaccctgtggatctgggagtgtggcatcacagccaagggctgtggggacctgtgccgggtgctgcgggccaaggagagcctgaaggagctgagcctggccggaaatgagctgggagatgagggcgcccggctgctgtgtgagaccctgctggagcccggctgccagctggagagcctgtgggtgaagagctgcagcttcaccgctgcctgctgcagccacttcagctctgtgctggcccagaaccgcttcctgctggagctgcagatcagcaacaaccggctggaggatgctggggtgcgggagctgtgccagggcctgggccagcccggctctgtgctgcgggtgctgtggctggccgactgtgatgtgtctgacagcagctgcagcagcctggccgccaccctgctggccaaccacagcctgcgggagctggacctgagcaacaactgcctgggagatgctggcatcctgcagctggtggagagcgtgcggcagcccggctgcctgctggagcagctggtgctgtatgacatctactggagcgaggagatggaggaccggctgcaggccctggagaaggacaagcccagcctgcgggtcatctcctag

SEQ ID NO: 7293 - DNA, 534 bp, synthetic construct
  misc_feature 1..534: note = source = /note="Description of Artificial Sequence: Synthetic coding sequence"
  source 1..534: mol_type = other DNA
atgaggctgctgatcctgacctgcctggtggccgtggccctggcccggcccaagctgcccctgcgctacccagagcggctgcagaaccccagcgagagcagcgagcccatccccctggagagccgggaggagtacatgaatggcatgaaccggcagaggaacatcctgcgggagaagcagacagatgagatcaagaactgtgtggtggccgagcctgagaagatggagagcagcatcagcagcagcagcgaggagatgagcctgagcaaatgtgccgagcagttctgccgcctgaatgagtacaaccagctgcagctgcagaagatgagcaagcaggagcagatccggaggatgaatgaaaacagccacgtgcaggtgcccttccagcagctgaaccagctggccgcctacccctatgctgtgtggtactacccccagatcatgcagtatgtgcccttcccccccttcagtgacatcagcaaccccacagcccacgagaactatgagaagaacaacgtgatgctgcagtggtag

SEQ ID NO: 7294 - DNA, 3054 bp, synthetic construct
  misc_feature 1..3054: note = source = /note="Description of Artificial Sequence: Synthetic coding sequence"
  source 1..3054: mol_type = other DNA
atggacctgatccggggcgtgctgctgcggctgctgctgctggccagcagcctgggccctggagctgtgtccctgcgggccgccatcaggaagccaggcaaggtgggcccccccctggacatcaagctgggcgccctgaactgcacagccttcagcatccagtggaagatgcccaggcaccctggcagccccatcctgggctacacagtgttctacagcgaggtgggcgctgacaagagcctgcaggagcagctgcacagcgtgcccctgagccgggacatccccaccacagaggaggtgattggagacctgaagccaggcacagagtacagagtgtccattgctgcctacagccaggccggcaagggccgcctgagcagccccaggcatgtgaccaccctgagccaggacagctgcctgcccccagctgccccccagcagccccacgtgattgtggtgtctgacagcgaggtggccctgtcctggaagccaggggccagcgagggcagcgcccccatccagtactacagcgtggagttcatccggccagactttgacaagaagtggaccagcatccacgagcgcatccagatggacagcatggtgatcaagggcctggaccctgacaccaactaccagtttgctgtgcgggccatgaacagccacggccccagccccaggtcctggcccagcgacatcatccgcaccctgtgcccagaggaggccggcagcggccgctatggcccccgctacatcacagacatgggcgctggagaagatgatgagggctttgaagatgacctggacctggacatcagctttgaggaggtgaagcccctgcctgccaccaagggcggcaacaagaagttcctggtggagagcaagaagatgagcatcagcaaccccaagaccatcagccgcctcatcccccccaccagcgccagcctgcctgtgaccaccgtggccccccagcccatccccatccagaggaagggcaagaatggagtggccatcatgagccggctgtttgacatgccctgtgatgagaccctgtgcagcgctgacagcttctgtgtgaatgactacacctggggcggcagccgctgccagtgcaccctgggcaaaggaggagagagctgcagcgaggacatcgtcatccagtacccccagttcttcggccacagctatgtgacctttgagcccctgaagaacagctaccaggccttccagatcaccctggagttccgggcagaggccgaggatggcctgctgctgtactgtggagaaaatgagcacggccgcggggacttcatgagcctggccatcatccgccgcagcctgcagttccgcttcaactgtggcactggagtggccatcatcgtgtctgagaccaagatcaagctgggcggctggcacacagtgatgctgtacagagatggcctgaatggcctgctgcagctgaacaacggcacccctgtgacaggccagagccagggccagtacagcaagatcaccttccgcacccccctgtacctgggcggggcccccagcgcctactggctggtgcgggccaccggcaccaacagaggcttccagggctgtgtgcagagcctggccgtgaatggaagaagaattgacatgaggccctggcccctgggcaaggccctgtctggagcagatgtgggagaatgtagcagcggcatctgtgatgaggccagctgcatccacggcggcacctgcacagccatcaaggctgacagctacatctgcctgtgccccctgggcttcaagggccgccactgtgaagatgccttcaccctgaccatcccccagttccgggagagcctgcggagctatgctgccaccccctggcccctggagccccagcactacctgtccttcatggagtttgagatcaccttccggccagattctggagatggagtgctgctgtacagctatgacaccggcagcaaggacttcctgagcatcaacctggccggcggccacgtggagttccgctttgactgtggcagcggcactggagtgctgcggtctgaggaccccctgaccctgggcaactggcatgagctgcgggtgtccaggacagccaagaatggcatcctgcaggtggacaagcagaagatcgtggagggcatggccgagggcggcttcacccagatcaagtgcaacacagacatcttcatcggcggcgtgcccaactatgatgatgtgaagaagaacagcggcgtgctgaagcccttcagcggcagcatccagaagatcatcctgaatgacaggaccatccacgtgaagcatgacttcaccagcggcgtgaatgtggagaatgctgcccacccctgtgtgcgggccccctgtgcccatggaggcagctgccggcccaggaaggagggctatgactgtgactgccccctgggctttgagggcctgcactgccagaaggaatgtggcaactactgcctgaacaccatcatcgaggccatcgagatcccccagttcatcggccgcagctacctgacctatgacaacccagacatcctgaagagggtgtctggcagccgcagcaatgtgttcatgaggttcaagaccacagccaaggatggcctgctgctgtggaggggggacagccccatgaggcccaacagcgacttcatcagcctgggcctgagagatggagccctggtgttctcctacaacctgggcagcggcgtggccagcatcatggtgaatggcagcttcaatgatggccgctggcaccgggtgaaggctgtgagagatggccagagcggcaagatcaccgtggatgattatggagccaggacaggcaagagccctggcatgatgaggcagctgaacatcaatggagccctgtatgtgggcggcatgaaggagatcgccctgcacaccaaccggcagtacatgaggggcctggtgggctgcatcagccacttcaccctgagcacagactaccacatcagcctggtggaggatgctgtggatggcaagaacatcaacacctgtggggccaagtag

SEQ ID NO: 7295 - DNA, 1893 bp, synthetic construct
  misc_feature 1..1893: note = source = /note="Description of Artificial Sequence: Synthetic coding sequence"
  source 1..1893: mol_type = other DNA
atgcagcaggacggcctgggcgtgggcaccagaaatggcagcggcaagggccgctctgtgcaccccagctggccctggtgtgccccccggcccctgcgctacttcggcagagatgcccgggcccggcgggcccagacagctgccatggccctgctggccggcggcctgagccggggcctgggcagccaccctgctgctgctggaagagatgctgtggtgtttgtgtggctgctgctgagcacctggtgcacagccccagcccgggccatccaggtgacagtgagcaacccctaccacgtggtgatcctcttccagcctgtgaccctgccctgcacctaccagatgaccagcacccccacccagcccatcgtcatctggaagtacaagagcttctgccgggacagaattgctgatgccttcagccctgcctctgtggacaaccagctgaatgcccagctggccgccggcaaccctggctacaacccctacgtggagtgccaggacagcgtgaggacagtgcgggtggtggccaccaagcagggcaatgctgtgaccctgggggactactaccagggccgccgcatcaccatcactggaaatgctgacctgacctttgaccagacagcctggggagacagcggcgtgtactactgcagcgtggtgtctgcccaggacctgcagggcaacaatgaggcctatgcagagctgattgtgctggactggctgtttgtggtggtggtgtgcctggccgccttcctgatcttcctgctgctgggcatctgctggtgccagtgctgcccccacacctgctgctgctacgtgcgctgcccctgctgcccagacaagtgctgctgcccagaggccctgtatgctgctgggaaggccgccaccagcggcgtgcccagcatctatgcccccagcacctacgcccacctgagccctgccaagaccccacctcctccagccatgatccccatgggccctgcctacaacggctacccaggcggctacccaggagatgtggacaggagcagcagcgctgggggccagggcagctatgtgcccctgctgcgggacacagacagctctgtggccagcgaggtgcgcagcggctaccgcatccaggccagccagcaggatgacagcatgagggtgctgtactacatggagaaggagctggccaactttgaccccagcaggcctggccccccatctggccgggtggagcgggccatgtctgaggtgaccagcctgcatgaagatgactggaggagccggcccagccggggccctgccctgacccccatcagagatgaggagtggggcggccacagccccaggagcccccggggctgggaccaggagcccgcccgggagcaggccggcggcggctggagggcccggcggccccgggcccggtctgtggatgccctggatgacctgaccccacccagcacagctgagagcggcagccgcagccccaccagcaatggaggccgcagccgggcctacatgccacccaggagccgcagcagagatgacctgtatgaccaggatgacagccgggacttccccaggagccgggacccccactatgatgacttccgcagccgggagaggcctcctgctgaccccaggagccaccaccacaggacccgggacccccgggacaatggcagccgcagcggggacctgccctatgatggccgcctgctggaggaggccgtgaggaagaagggcagcgaggagaggagaagaccccacaaggaggaggaggaggaggcctactaccccccagcccccccaccctacagcgagacagacagccaggccagccgggagcggcggctgaagaagaacctggccctgagccgggagagcctggtggtgtag

SEQ ID NO: 7296 - DNA, 750 bp, synthetic construct; identical to SEQ ID NO: 6908
  misc_feature 1..750: note = source = /note="Description of Artificial Sequence: Synthetic coding sequence"
  source 1..750: mol_type = other DNA

SEQ ID NO: 7297 - DNA, 3057 bp, synthetic construct; identical to SEQ ID NO: 6932
  misc_feature 1..3057: note = source = /note="Description of Artificial Sequence: Synthetic coding sequence"
  source 1..3057: mol_type = other DNA

SEQ ID NO: 7298 - DNA, 1311 bp, synthetic construct
  misc_feature 1..1311: note = source = /note="Description of Artificial Sequence: Synthetic coding sequence"
  source 1..1311: mol_type = other DNA
atgcagggcaccccaggcggcggcaccaggcctggccccagccctgtggacaggaggaccctgctggtgttctccttcatcctggccgccgccctgggccagatgaacttcaccggggaccaggtgctgcgggtgctggccaaggatgagaagcagctgagcctgctgggggacctggagggcctgaagccccagaaggtggacttctggaggggccctgcccggcccagcctgcctgtggacatgagggtgcccttcagcgagctgaaggacatcaaggcctacctggagagccacggcctggcctacagcatcatgatcaaggacatccaggtgctgctggatgaggagcggcaggccatggccaagagccggcggctggagaggagcaccaacagcttctcctacagcagctaccacaccctggaggagatctacagctggattgacaactttgtgatggagcacagcgacatcgtgtccaagatccagatcggcaacagctttgagaaccagagcatcctggtgctgaagttcagcactggaggcagccgccacccagccatctggattgacaccggcatccacagccgggagtggatcacccacgccaccggcatctggacagccaacaagatcgtgtctgactatggcaaggacagagtgctgacagacatcctgaatgccatggacatcttcatcgagctggtgaccaacccagatggctttgccttcacccacagcatgaaccggctgtggaggaagaacaagagcatccggcccggcatcttctgcatcggcgtggacctgaacagaaactggaagagcggctttggaggaaatggcagcaacagcaacccctgcagcgagacctaccacggccccagcccccagagcgagcctgaggtggccgccatcgtgaacttcatcacagcccacggcaacttcaaggccctgatcagcatccacagctacagccagatgctgatgtacccctacggccgcctgctggagcctgtgagcaaccagcgggagctgtatgacctggccaaggatgctgtggaggccctgtacaaggtgcatggaattgagtacatcttcggcagcatcagcaccaccctgtatgtggccagcggcatcaccgtggactgggcctatgacagcggcatcaagtatgccttctcctttgagctgcgggacaccggccagtatggcttcctgctgcctgccacccagatcatccccacagcccaggagacctggatggccctgcggaccatcatggagcacaccctgaaccacccctactag

SEQ ID NO: 7299 - DNA, 492 bp, synthetic construct
  misc_feature 1..492: note = source = /note="Description of Artificial Sequence: Synthetic coding sequence"
  source 1..492: mol_type = other DNA
atgttccagggcctgctgctgctgctgctgctgtccatgggcggcacctgggccagcaaggagcccctgcggccccgctgccggcccatcaatgccaccctggccgtggagaaggagggctgccctgtgtgcatcaccgtgaacaccaccatctgtgccggctactgccccaccatgaccagggtgctgcagggcgtgctgcctgccctgccccaggtggtgtgcaactacagagatgtgcgctttgagagcatccggctgcccggctgcccccggggcgtgaaccctgtggtgtcctatgctgtggccctgagctgccagtgtgccctgtgccgccgcagcaccacagactgtggcggccccaaggaccaccccctgacctgtgatgacccccgcttccaggacagcagcagcagcaaggcccccccacccagcctgcccagccccagccggctgcccggccccagcgacacccccatcctgccccagtag

SEQ ID NO: 7300 - DNA, 213 bp, synthetic construct; identical to SEQ ID NO: 7198
  misc_feature 1..213: note = source = /note="Description of Artificial Sequence: Synthetic coding sequence"
  source 1..213: mol_type = other DNA

SEQ ID NO: 7301 - DNA, 1098 bp, synthetic construct
  misc_feature 1..1098: note = source = /note="Description of Artificial Sequence: Synthetic coding sequence"
  source 1..1098: mol_type = other DNA
atgtggctgctgctgaccatggccagcctcatctctgtgctgggcaccacccacggcctgtttgggaagctgcaccctggcagccctgaggtgaccatgaacatcagccagatgatcacctactggggctacccaaatgaggagtatgaggtggtgacagaagatggctacatcctggaggtgaaccgcatcccctacggcaagaagaacagcggcaacacagatgctggctatgatgtgtggctgggcaacagccggggcaacacctgggcccggaggaacctgtactacagcccagattctgtggagttctgggccttctcctttgatgagatggccaagtatgacctgcctgccaccatcgacttcatcgtgaagaagacaggccagaagcagctgcactacgtgggccacagccagggcaccaccatcggcttcatcgccttcagcaccaaccccagcctggccaagaggatcaagaccttctacgccctggcccctgtggccaccgtgaagtacaccaagagcctcatcaacaagctgcgctttgtgccccagagcctcttcaagttcatctttggagacaagatcttctacccccacaacttctttgaccagttcctggccacagaggtgtgcagccgggagatgctgaacctgctgtgcagcaatgccctcttcatcatctgtggctttgacagcaagaacttcaacaccagccggctggatgtgtacctgagccacaacccagctggcacctctgtgcagaacatgttccactggacccaggccgtgaagagcggcaagttccaggcctatgactggggcagccctgtgcagaacaggatgcactatgaccagagccagcccccctactacaacgtgacagccatgaatgtgcccatcgctgtgtggaatggaggcaaggacctgctggccgacccccaggatgtgggcctgctgctgcccaagctgcccaacctgatctaccacaaggagatccccttctacaaccacctggacttcatctgggccatggatgccccccaggaggtgtacaatgacatcgtgtccatgatcagcgaggacaagaagtag

SEQ ID NO: 7302 - DNA, 2535 bp, synthetic construct
  misc_feature 1..2535: note = source = /note="Description of Artificial Sequence: Synthetic coding sequence"
  source 1..2535: mol_type = other DNA
atgggccctggggccccctttgcccgggtgggctggcccctgcccctgctggtggtgatggccgccggcgtggcccctgtgtgggccagccacagcccccacctgccccggccccacagccgggtgcccccccaccccagcagcgagcggcgggctgtgtacatcggggccctcttccccatgtctgggggctggccaggcggccaggcctgccagcctgctgtggagatggccctggaggatgtgaacagcagaagagacatcctgcctgactatgagctgaagctgatccaccacgacagcaaatgtgaccccggccaggccaccaagtacctgtatgagctgctgtacaatgaccccatcaagatcatcctgatgcctggctgcagctctgtgtccaccctggtggccgaggccgccaggatgtggaacctgattgtgctgtcctatggcagcagcagccctgccctgagcaaccggcagcgcttccccaccttcttccgcacccaccccagcgccaccctgcacaaccccaccagggtgaagctgtttgagaagtggggctggaagaagatcgccaccatccagcagaccacagaggtgttcaccagcaccctggatgacctggaggagcgggtgaaggaggccggcatcgagatcaccttccggcagagcttcttcagtgaccctgctgtgcctgtgaagaacctgaagaggcaggatgcccgcatcatcgtgggcctcttctatgaaacagaggccaggaaggtgttctgtgaggtgtacaaggagcggctgtttgggaagaagtatgtgtggttcctgattggctggtacgccgacaactggttcaagatctatgaccccagcatcaactgcaccgtggatgagatgacagaagctgtggagggccacatcaccacagagatcgtgatgctgaacccagccaacaccaggagcatcagcaacatgaccagccaggagtttgtggagaagctgaccaagaggctgaagaggcaccctgaggagaccggcggcttccaggaggcccccctggcctatgatgccatctgggccctggccctggccctgaacaagaccagcggcggcggcggccgcagcggcgtgcggctggaggacttcaactacaacaaccagaccatcacagaccagatctaccgggccatgaacagcagcagctttgaaggagtgtctggccacgtggtgtttgatgccagcggcagcaggatggcctggaccctcatcgagcagctgcagggcggcagctacaagaagattggctactatgacagcaccaaggatgacctgtcctggagcaagacagacaagtggattggaggcagccccccagctgaccagaccctggtgatcaagaccttccgcttcctgagccagaagctgttcatctctgtgtctgtgctgagcagcctgggcatcgtgctggccgtggtgtgcctgtccttcaacatctacaacagccacgtgcgctacatccagaacagccagcccaacctgaacaacctgacagctgtgggctgcagcctggccctggccgctgtgttccccctgggcctggatggctaccacatcggcaggaaccagttcccctttgtgtgccaggcccggctgtggctgctgggcctgggcttcagcctgggctacggctccatgttcaccaagatctggtgggtgcacacagtgttcaccaagaaggaggagaagaaggagtggaggaagaccctggagccctggaagctgtatgccaccgtgggcctgctggtgggcatggatgtgctgaccctggccatctggcagatcgtggaccccctgcacaggaccatcgagacctttgccaaggaggagcccaaggaggacattgatgtgtccatcctgccccagctggagcactgcagcagcaggaagatgaacacctggctgggcatcttctacggctacaagggcctgctgctgctgctgggcatcttcctggcctatgagaccaagtctgtgtccacagagaagatcaatgaccacagagctgtgggcatggccatctacaacgtggccgtgctgtgcctgatcacagcccctgtgaccatgatcctgagcagccagcaggatgctgcctttgcctttgccagcctggccatcgtgttcagcagctacatcaccctggtggtgctgtttgtgcccaagatgagaagactcatcaccagaggagagtggcagagcgaggcccaggacaccatgaagacaggcagcagcaccaacaacaatgaggaggagaagagccggctgctggagaaggaaaatcgggagctggagaagatcatcgccgagaaggaggagcgggtgtctgagctgcggcaccagctgcagagccggcagcagctgcggagccgccgccacccccccaccccacctgagcccagcggcggcctgccccggggccccccagagcccccagaccggctgagctgtgatggcagccgggtgcacctgctgtacaagtag

SEQ ID NO: 7303 - DNA, 1020 bp, synthetic construct
  misc_feature 1..1020: note = source = /note="Description of Artificial Sequence: Synthetic coding sequence"
  source 1..1020: mol_type = other DNA
atggtgtccaagagccgctggaagctgctggccatgctggccctggtgctggtggtgatggtgtggtacagcatcagccgggaggaccgctacatcgagctgttctacttccccatccctgagaagaaggagccctgcctgcagggcgaggccgagagcaaggccagcaagctgtttgggaagctgagccccctgtgcagctacagccgggaccagcccatcttcctgcggctggaggactacttctgggtgaagacccccagcgcctatgagctgccctacggcaccaagggcagcgaggacctgctgctgcgggtgctggccatcaccagcagcagcatccccaagaacatccagagcctgcgctgccgccgctgtgtggtggtgggcaatggccaccggctgaggaacagcagcctgggagatgccatcaacaagtatgatgtggtgatccggctgaacaatgcccctgtggccggctatgaaggagatgtgggcagcaagaccaccatgaggctcttctacccagagagcgcccactttgaccccaaggtggagaacaacccagacaccctgctggtgctggtggccttcaaggccatggacttccactggattgagaccatcctgagtgacaagaagagggtgaggaagggcttctggaagcagcccccactcatctgggatgtgaaccccaagcagatccgcatcctgaaccccttcttcatggagattgctgctgacaagctgctgagcctgcccatgcagcagcccaggaagatcaagcagaagcccaccaccggcctgctggccatcaccctggccctgcacctgtgtgacctggtgcacatcgccggcttcggctacccagatgcctacaacaagaagcagaccatccactactatgagcagatcaccctgaagtccatggccggcagcggccacaacgtgtcccaggaggccctggccatcaagaggatgctggagatgggcgccatcaagaacctgaccagcttctag

SEQ ID NO: 7304 - DNA, 1386 bp, synthetic construct; identical to SEQ ID NO: 7292
  misc_feature 1..1386: note = source = /note="Description of Artificial Sequence: Synthetic coding sequence"
  source 1..1386: mol_type = other DNA

SEQ ID NO: 7305 - DNA, 1695 bp, synthetic construct
  misc_feature 1..1695: note = source = /note="Description of Artificial Sequence: Synthetic coding sequence"
  source 1..1695: mol_type = other DNA
atggcccccaagaagctgagctgcctgcggagcctgctgctgcccctgagcctgaccctgctgctgccccaggccgacaccaggagctttgtggtggaccggggccatgaccgcttcctgctggatggagcccccttccgctacgtgtctggcagcctgcactacttccgggtgccccgggtgctgtgggccgaccggctgctgaagatgcgctggagcggcctgaatgccatccagttctacgtgccctggaactaccacgagccccagcccggggtgtacaacttcaacggcagccgggacctgattgccttcctgaatgaagctgccctggccaacctgctggtgatcctgcggcccggcccctacatctgtgccgagtgggagatgggcggcctgcccagctggctgctgaggaagccagagatccacctgcggaccagtgaccctgctgacaacatgaccaagatcttcaccctgctgaggaaatatgagccccacggccccctggtgaacagcgagtactacacaggctggctggactactggggccagaaccacagcaccaggtctgtgtctgctgtgaccaagggcctggagaacatgctgaagctgggcgcctctgtgaacatgtacatgtttcatggaggcaccaactttggctactggaatggagctgacaagaagggccgcttcctgcccatcaccaccagctatgactatgatgcccccatcagcgaggccggggaccccacccccaagctgtttgccctgagagatgtgatcagcaagttccaggaggtgcccctgggccccctgcccccacccagccccaagatgatgctgggccctgtgaccctgcacctggtgggccacctgctggccttcctggacctgctgtgcccccggggccccatccacagcatcctgcccatgacctttgaggccgtgaagcaggaccacggcttcatgctgtaccgcacctacatgacccacaccatctttgagcccacccccttctgggtgcccaacaatggagtgcatgaccgggcctacgtgatggtggatggagtcttccagggcgtggtggagaggaacatgagggacaagctgttcctgaccgggaagctgggcagcaagctggacatcctggtggagaacatgggccgcctgagctttggcagcaacagcagtgacttcaagggcctgctgaagccacccatcctgggccagaccatcctgacccagtggatgatgttccccctgaagattgacaacctggtgaagtggtggttccccctgcagctgcccaagtggccctacccccaggcccccagcggccccaccttctacagcaagaccttccccatcctgggctctgtgggggacaccttcctgtacctgcccggctggaccaagggccaggtgtggatcaatggcttcaacctgggccgctactggaccaagcagggcccccagcagaccctgtatgtgccccgcttcctgctcttccccaggggggccctgaacaagatcaccctgctggagctggaggatgtgcccctgcagccccaggtgcagttcctggacaagcccatcctgaacagcaccagcaccctgcacaggacccacatcaacagcctgtctgctgacaccctgagcgccagcgagcccatggagctgagcggccactag

SEQ ID NO: 7306 - DNA, 1317 bp, synthetic construct
  misc_feature 1..1317: note = source = /note="Description of Artificial Sequence: Synthetic coding sequence"
  source 1..1317: mol_type = other DNA
atgatgtatgcccctgtggagttcagcgaggccgagttcagcagagctgagtaccagaggaagcagcagttctgggacagcgtgcggctggccctcttcaccctggccatcgtggccatcattggaattgccatcggcatcgtgacccactttgtggtggaggatgacaagagcttctactacctggccagcttcaaggtgaccaacatcaagtacaaggagaactacggcatccgcagcagccgggagttcatcgagaggagccaccagattgaaagaatgatgagccgcatcttccgccacagctctgtgggcggccgcttcatcaagagccacgtgatcaagctgagcccagatgagcagggcgtggacatcctgattgtgctgatcttccgctaccccagcacagacagcgctgagcagatcaagaagaagattgagaaggccctgtaccagagcctgaagaccaagcagctgagcctgaccatcaacaagcccagcttccggctgacccccatcgacagcaagaagatgaggaacctgctgaacagccgctgtggcatccgcatgaccagcagcaacatgcccctgcctgccagcagcagcacccagagaattgtgcagggccgggagacagccatggagggggagtggccctggcaggccagcctgcagctgattggcagcggccaccagtgtggggccagcctcatcagcaacacctggctgctgacagctgcccactgcttctggaagaacaaggaccccacccagtggatcgccacctttggagccaccatcaccccacctgctgtgaagagaaatgtgaggaagatcatcctgcacgagaactaccaccgggagaccaatgaaaatgacatcgccctggtgcagctgagcactggagtggagttcagcaacatcgtgcagagggtgtgcctgcctgacagcagcatcaagctgccccccaagacctctgtgtttgtgacaggcttcggcagcatcgtggatgatggccccatccagaacaccctgcggcaggcccgggtggagaccatcagcacagatgtgtgcaacaggaaggatgtgtatgatggcctcatcaccccaggcatgctgtgtgccggcttcatggagggcaagattgatgcctgcaagggggacagcggcggccccctggtgtatgacaaccacgacatctggtacatcgtgggcatcgtgtcctggggccagagctgtgccctgcccaagaagccaggagtgtacaccagggtgaccaagtacagagactggatcgccagcaagacaggcatgtag

SEQ ID NO: 7307 - DNA, 4392 bp, synthetic construct
  misc_feature 1..4392: note = source = /note="Description of Artificial Sequence: Synthetic coding sequence"
  source 1..4392: mol_type = other DNA
atggagcccaggctcttctgctggaccaccctcttcctgctggccggctggtgcctgcccggcctgccctgccccagccgctgcctgtgcttcaagagcacagtgcgctgcatgcacctgatgctggaccacatcccccaggtgccccagcagaccaccgtgctggacctgcgcttcaaccgcatccgggagatccctggcagcgccttcaagaagctgaagaacctgaacaccctgctgctgaacaacaaccacatcaggaagatcagcagaaatgcctttgagggcctggagaacctgctgtacctgtacctgtacaagaatgagatccacgccctggacaagcagaccttcaagggcctcatcagcctggagcacctgtacatccacttcaaccagctggagatgctgcagcctgagaccttcggggacctgctgcggctggagcggctcttcctgcacaacaacaagctgagcaagatcccagctggcagcttcagcaacctggacagcctgaagaggctgcggctggacagcaatgccctggtgtgtgactgtgacctgatgtggctgggggagctgctgcagggctttgcccagcacggccacacccaggccgccgccacctgtgagtacccccggcggctgcacggccgggctgtggcctctgtgacagtggaggagttcaactgccagagcccccgcatcacctttgagccccaggatgtggaggtgcccagcggcaacacagtgtacttcacctgcagagctgagggcaaccccaagccagagatcatctggatccacaacaaccacagcctggacctggaggatgacacccggctgaatgtgtttgatgatggcaccctgatgatccggaacacccgggagagtgaccagggcgtgtaccagtgcatggccaggaacagcgctggggaggccaagacccagagcgccatgctgcgctacagcagcctgcctgccaagcccagctttgtgatccagccccaggacacagaggtgctgattggcaccagcaccaccctggagtgcatggccaccggccacccccaccccctcatcacctggacccgggacaatggcctggagctggatggcagccgccacgtggccaccagcagcggcctgtacctgcagaacatcacccagagggaccacggccgcttcacctgccacgccaacaacagccacggcaccgtgcaggccgccgccaacatcatcgtgcaggccccaccccagttcaccgtgacccccaaggaccaggtggtgctggaggagcacgctgtggagtggctgtgtgaggctgatggcaaccccccacctgtgattgtgtggaccaagacaggaggccagctgcctgtggagggccagcacacagtgctgagcagcggcaccctgagaattgaccgggccgcccagcacgaccagggccagtatgagtgccaggccgtgagcagcctgggcgtgaagaaggtgtctgtgcagctgactgtgaagcccaaggccctggccgtgttcacccagctgccccaggacacctctgtggaggtgggcaagaacatcaacatcagctgccacgcccagggcgagccccagcccatcatcacctggaacaaggagggcgtgcagatcacagagagcggcaagttccacgtggatgatgagggcaccctgaccatctatgatgctggcttcccagaccagggccgctatgaatgtgtggccagaaattcctttggcctggccgtgaccaacatgttcctgactgtgacagccatccagggccggcaggccggagatgactttgtggagagcagcatcctggatgctgtgcagagggtggacagcgccatcaacagcaccaggaggcacctgttcagccagaagccccacaccagcagtgacctgctggcccagttccactacccccgggaccccctgattgtggagatggcccgggccggggagatctttgagcacaccctgcagctgatccgggagcgggtgaagcagggcctgactgtggacctggagggcaaggagttccgctacaatgacctggtgagccccaggagcctgagcctgattgccaacctgagcggctgcacagcccggcggcccctgcccaactgcagcaaccgctgcttccacgccaagtaccgggcccatgatggcacctgcaacaacctgcagcagcccacctggggcgccgccctgacagcctttgcccggctgctgcagcctgcctacagagatggcatccgggccccccggggcctgggcctgcctgtgggcagccggcagcccctgcccccaccccggctggtggccaccgtgtgggcccgggctgctgctgtgaccccagaccacagctacaccaggatgctgatgcactggggctggttcctggagcatgacctggaccacacagtgcctgccctgagcacagcccgcttcagtgatggccggccctgcagctctgtgtgcaccaatgaccccccctgcttccccatgaacaccaggcatgctgacccccggggcacccacgccccctgcatgctgtttgcccggagcagccctgcctgtgccagcggccggcccagcgccaccgtggacagcgtgtatgcccgggagcagatcaaccagcagacagcctacattgatggcagcaatgtgtatggcagcagcgagcgggagagccaggccctgcgggaccccagcgtgccccggggcctgctgaagacaggcttcccctggcccccatctgggaagcccctgctgcccttcagcacaggccccccaacagaatgtgcccggcaggagcaggagagcccctgcttcctggccggggaccaccgggccaatgagcacctggccctggccgccatgcacaccctgtggttccgggagcacaacaggatggccacagagctgagcgccctgaacccccactgggagggcaacacagtgtaccaggaggccaggaagatcgtgggcgctgagctgcagcacatcacctacagccactggctgcccaaggtgctgggggaccccggcaccaggatgctgcggggctaccggggctacaaccccaacgtgaatgccggcatcatcaacagctttgccacagctgccttccgcttcggccacaccctcatcaaccccatcctgtaccgcctgaatgccaccctgggggagatcagcgagggccacctgcccttccacaaggccctcttcagccccagccgcatcatcaaggagggcggcattgatcctgtgctgcggggcctgtttggagtggccgccaagtggagggcccccagctacctgctgagccctgagctgacccagaggctcttctctgctgcctacagcgctgctgtggacagcgctgccaccatcatccagaggggccgggaccacggcatccccccctacgtggacttccgggtcttctgcaacctgacctctgtgaagaactttgaggacctgcagaatgagatcaaggacagcgagatccggcagaagctgaggaagctgtatggcagccctggggacatcgacctgtggccagccctgatggtggaggacctgatccctggcaccagggtgggccccaccctgatgtgcctgtttgtgacccagttccagaggctgagagatggagaccgcttctggtatgaaaatcctggggtcttcaccccagcccagctgacccagctgaagcaggccagcctgagccgggtgctgtgtgacaacggggacagcatccagcaggtgcaggctgatgtgtttgtgaaggccgagtacccccaggactacctgaactgcagcgagatccccaaggtggacctgcgggtgtggcaggactgctgtgccgactgccgcagccggggccagttccgggctgtgacccaggagagccagaagaagaggtctgcccagtacagctaccctgtggacaaggacatggagctgagccacctgcggagccggcagcaggacaagatctacgtgggggaggatgccagaaatgtgacagtgctggccaagaccaagttcagccaggacttcagcacctttgctgctgagatccaggagaccatcacagccctgcgggagcagatcaacaagctggaggcccggctgcggcaggccggctgcacagatgtgcggggcgtgcccaggaaggccgaggagcgctggatgaaggaggactgcacccactgcatctgtgagagcggccaggtgacctgtgtggtggagatctgccccccagccccctgccccagccctgagctggtgaagggcacctgctgccctgtgtgccgggaccggggcatgcccagcgacagccctgagaagaggtag

SEQ ID NO: 7308 - DNA, 1206 bp, synthetic construct
  misc_feature 1..1206: note = source = /note="Description of Artificial Sequence: Synthetic coding sequence"
  source 1..1206: mol_type = other DNA
atgggcctgaaggccctgtgcctgggcctgctgtgtgtgctgtttgtgagccacttctacacccccatgccagacaacatcgaggagagctggaagatcatggccctggatgccatcgccaagacctgcaccttcaccgccatgtgctttgagaacatgaggatcatgagatatgaggagttcatctccatgatcttccggctggactacacccagcccctgagtgatgagtacatcaccgtgacagacaccacctttgtggacatccctgtgcggctgtacctgcccaagaggaagtctgagacccggcggcgggccgtcatctacttccatggaggcggcttctgcttcggcagcagcaagcagagggcctttgacttcctgaaccgctggacagccaacaccctggatgctgtggtggtgggcgtggactaccgcctggccccccagcaccacttccctgcccagtttgaagatggcctggccgctgtgaagttcttcctgctggagaagatcctgaccaagtatggagtggaccccacccgcatctgcatcgccggggacagcagcggcggcaacctggccacagctgtgacccagcaggtgcagaatgatgctgagatcaagcacaagatcaagatgcaggtgctgctgtacccaggcctgcagatcacagacagctacctgcccagccaccgggagaatgaacatggaattgtgctgaccagagatgtggccatcaagctggtgtccctgtacttcaccaaggatgaggccctgccctgggccatgagaagaaaccagcacatgcccctggagagccgccacctgttcaagtttgtgaactggagcatcctgctgcctgagaagtacaggaaggactatgtgtacacagagcccatcctgggcggcctgagctacagcctgcccggcctgacagacagccgggccctgcccctgctggccaatgacagccagctgcagaacctgcccctgacctacatcctgacctgccagcacgacctgctgagagatgatggcctgatgtatgtgacccggctgagaaatgtgggcgtgcaggtggtgcatgagcacattgaagatggcatccatggagccctgtccttcatgaccagccccttctacctgcggctgggcctgcgcatccgggacatgtatgtgtcctggctggacaagaacctgtag

SEQ ID NO: 7309 - DNA, 264 bp, synthetic construct; identical to SEQ ID NO: 7138
  misc_feature 1..264: note = source = /note="Description of Artificial Sequence: Synthetic coding sequence"
  source 1..264: mol_type = other DNA

SEQ ID NO: 7310 - DNA, 813 bp, synthetic construct
  misc_feature 1..813: note = source = /note="Description of Artificial Sequence: Synthetic coding sequence"
  source 1..813: mol_type = other DNA
atgaggggccagggcaggaaggagagcctgagtgacagccgggacctggatggcagctatgaccagctgaccggccaccccccaggccccaccaagaaggccctgaagcagcgcttcctgaagctgctgccctgctgcggcccccaggccctgcccagcgtgtctgagaccctggccgccccagccagcctgcggccccaccggccccggctgctggaccctgacagcgtggatgatgaatttgagctgagcacagtgtgccacaggcctgagggcctggagcagctgcaggagcagaccaagttcaccaggaaggagctgcaggtgctgtaccggggcttcaagaatgaatgtcccagcggcatcgtgaatgaggagaacttcaagcagatctacagccagttcttcccccagggcgacagcagcacctacgccaccttcctgttcaatgcctttgacaccaaccatgatggctctgtgtcctttgaagattttgtggccggcctgagcgtcatcctgcggggcaccgtggatgaccggctgaactgggccttcaacctgtatgacctgaacaaggatggctgcatcaccaaggaggagatgctggacatcatgaagagcatctatgacatgatgggcaagtacacctacccagccctgcgggaggaggccccccgggagcacgtggagagcttcttccagaagatggacaggaacaaggatggagtggtgaccatcgaggagttcatcgagagctgccagaaggatgagaacatcatgaggtccatgcagctgtttgacaacgtcatctag

SEQ ID NO: 7311 - DNA, 819 bp, synthetic construct
  misc_feature 1..819: note = source = /note="Description of Artificial Sequence: Synthetic coding sequence"
  source 1..819: mol_type = other DNA
atgcacctgcggctcatctcctggctgttcatcatcctgaacttcatggagtacatcggcagccagaatgccagccggggccggcggcagaggaggatgcaccccaacgtgtcccagggctgccagggcggctgtgccacctgcagcgactacaacggctgcctgagctgcaagcccaggctcttctttgccctggagcgcatcggcatgaagcagattggagtgtgcctgagcagctgccccagcggctactacggcacccgctacccagacatcaacaagtgcaccaagtgcaaggctgactgtgacacctgcttcaacaagaacttctgcaccaagtgcaagagcggcttctacctgcacctgggcaagtgcctggacaactgcccagagggcctggaggccaacaaccacaccatggagtgtgtgtccatcgtgcactgtgaggtgtctgagtggaacccctggagcccctgcaccaagaagggcaagacctgtggcttcaagaggggcacagagaccagggtgcgggagatcatccagcaccccagcgccaagggcaacctgtgcccccccaccaatgagaccaggaagtgcaccgtgcagaggaagaagtgccagaagggggagcggggcaagaagggccgggagaggaagaggaagaagcccaacaagggggagagcaaggaggccatcccagacagcaagagcctggagagcagcaaggagatccctgagcagcgggagaacaagcagcagcagaagaagaggaaggtgcaggacaagcagaagtctgtgtctgtgtccacagtgcactag

SEQ ID NO: 7312 - DNA, 294 bp, synthetic construct
  misc_feature 1..294: note = source = /note="Description of Artificial Sequence: Synthetic coding sequence"
  source 1..294: mol_type = other DNA
atggccaagagcttccctgtgttcagcctgctgtccttcatcctgatccacctggtgctgagctctgtgtctggccccaggcactggtggccaccccggggcatcatcaaggtgaagtgcccctatgagaaggtgaacctgtcctggtacaatggaacagtgaacccctgccccggcctgtaccagcccatctgtggcaccaacttcatcacctatgacaacccctgcatcctgtgtgtggagagcctgaagagccacggccgcatccgcttctaccatgatggcaagtgctag

SEQ ID NO: 7313 - DNA, 726 bp, synthetic construct; identical to SEQ ID NO: 7000
  misc_feature 1..726: note = source = /note="Description of Artificial Sequence: Synthetic coding sequence"
  source 1..726: mol_type = other DNA

SEQ ID NO: 7314 - DNA, 1827 bp, synthetic construct
  misc_feature 1..1827: note = source = /note="Description of Artificial Sequence: Synthetic coding sequence"
  source 1..1827: mol_type = other DNA
atggcccgggcccgggccggggccctgctggccctgtgggtgctgggcgccgccgcccacccccagtgcctggacttccggccccccttccggcccacccagcccctgcggctgtgtgcccagtacagcgactttggctgctgtgatgagggcagagatgctgagctgacccggcgcttctgggccctggccagccgggtggatgctgctgagtgggccgcctgtgccggctacgcccgggacctgctgtgccaggagtgcagcccctatgctgcccacctgtatgatgctgaggaccccttcacccccctgaggacagtgcccggcctgtgccaggactactgcctggacatgtggcacaagtgccggggcctcttccgccacctgagcacagaccaggagctgtgggccctggagggcaacctggcccgcttctgccgctacctgagcctggatgacacagactactgcttcccctacctgctggtgaacaagaacctgaacagcaacctgggccacgtggtggctgatgccaagggctgcctgcagctgtgcctggaggaggtggccaacggcctgaggaaccctgtggccatggtgcacgccagagatggcacccaccgcttctttgtggccgagcaggtgggcctggtgtgggcctacctgcctgacaggagccggctgggcaagcccttcctgaacatcagccgggtggtgctgaccagcccctgggagggagatgagcggggcttcctgggcatcgccttccaccccagcttccagcacaacagaaggctgtatgtgtactacagcgtgggcatccgcagcagcgagtggatccgcatcagcgagttccgggtgtctgaagatgatgaaaatgctgtggaccacagcagcgagcgcatcatcctggaggtgaaggagcccgccagcaaccacaacggcggccagctgctgtttggagatgatggctacctgtacatcttcaccggagatggcggcatggccggggaccccttcggcacctttggaaatgcccagaacaagagcgccctgctgggcaaggtgctgagaattgatgtggacaggaaggagcggggcctgccctacggcatccccccagacaacccctttgtgggggaccctgctgcccagcctgaggtgtatgccctgggcgtgaggaacatgtggcgctgcagctttgacagaggagaccccagcagcggcaccggccggggccgcctcttctgtggagatgtgggccagaacaagtttgaggaggtggatgtggtggagcggggcggcaactacggctggagggcccgggagggctttgagtgctatgacaggagcctgtgtgccaacaccagcctgaatgacctgctgcccatctttgcctacccccacacagtgggcaagtctgtgactggaggctacgtgtaccggggctgtgagtaccccaacctgaatggcctgtacatctttggagacttcatgagcggccgcctgatgagcctgcaggagaaccctggcaccggccagtggcagtacagcgagatctgcatgggccacggccagacctgtgagttccctggcctcatcaacaactactacccctacatcatcagctttggagaagatgaagctggggagctgtacttcatgagcactggagagcccagcgccacagccccccggggcgtggtgtacaagatcattgatgccagcagctgcaaggcccggagcgccatgcctggctacgtgcctgcccccagcgtgtgcagcagcctgaccagccagcccttcatcctgcagtggtggaagtag

SEQ ID NO: 7315 - DNA, 351 bp, synthetic construct
  misc_feature 1..351: note = source = /note="Description of Artificial Sequence: Synthetic coding sequence"
  source 1..351: mol_type = other DNA
atggcccctccttctgtgcccctggtgctgctgctggtgctgctgctgagcctggccgagaccccagccagcgccccagcccaccggggccggggcggctggaccctgaacagcgctggctacctgctgggccctgtgctgcacctgccccagatgggagaccaggacggcaagcgggagacagccctggagatcctggacctgtggaaggccattgatggcctgccctacagccaccccccccagcccagcaagagaaatgtgatggagacctttgccaagccagaaattggagacctgggcatgctgtccatgaagatccccaaggaggaggatgtgctgaagagctag

SEQ ID NO: 7316 - DNA, 3618 bp, synthetic construct
  misc_feature 1..3618: note = source = /note="Description of Artificial Sequence: Synthetic coding sequence"
  source 1..3618: mol_type = other DNA
atgaggaagcccaggaggaagagccggcagaatgctgagggcagaagaagccccagcccctacagcctgaagtgcagccccacccgggagaccctgacctacgcccaggcccagagaattgtggaggtggacattgatggccgcctgcaccgcatcagcatctatgaccccctgaagatcatcacagaagatgagctgacagcccaggacatcacagagtgcaacagcaacaaggaaaattctgagcagccccagtttcctgggaagagcaagaagcccagcagcaagggcaagaagaaggagagctgcagcaagcacgccagcggcaccagcttccacctgccccagcccagcttcaggatggtggacagcggcatccagcctgaggccccacccctgcctgctgcctactaccgctacatcgagaagcccccagaggacctggatgctgaggtggagtatgacatggatgaggaggacctggcctggctggacatggtgaatgagaagagaagagtggatggccacagcctggtgtctgctgacacctttgagctgctggtggaccggctggagaaggagagctacctggagagccgcagcagcggggcccagcagagcctgattgatgaagatgccttctgctgcgtgtgcctggatgatgagtgccacaacagcaatgtcatcctcttctgtgacatctgcaacctggccgtgcaccaggagtgctacggcgtgccctacatccctgagggccagtggctgtgccgctgctgcctgcagagccccagcaggcctgtggactgcatcctgtgccccaacaagggcggggccttcaagcagaccagtgatggccactgggcccacgtggtgtgtgccatctggatccctgaggtgtgctttgccaacacagtgttcctggagcccatcgagggcatcgacaacatccccccagcccgctggaagctgacctgctacatctgcaagcagaagggcctgggcgccgccatccagtgccacaaggtgaactgctacacagccttccacgtgacctgtgcccagagagctggcctcttcatgaagattgagcccatgagggagaccagcctgaatggcaccatcttcaccgtgaggaagacagcctactgtgaggcccacagccccccaggagctgccacagcccggaggaaaggagacagccccaggagcatcagcgagactggagatgaggagggcctgaaggagggagatggagaggaggaggaggaggaggaggtggaggaggaggagcaggaggcccagggcggcgtgtctggcagcctgaagggcgtgcccaagaagagcaagatgagcctgaagcagaagatcaagaaggagcctgaggaggccggccaggacacccccagcaccctgcccatgctggccgtgccccagatccccagctaccgcctgaacaagatctgcagcggcctgtccttccagaggaagaaccagttcatgcagaggctgcacaactactggctgctgaagaggcaggccagaaatggagtgcccctcatccggcggctgcacagccacctgcagagccagagaaatgctgagcagcgggagcaggatgagaagaccagcgctgtgaaggaggagctgaagtactggcagaagctgcggcatgacctggagcgggcccggctgctgattgagctgatcaggaagcgggagaagctgaagcgggagcaggtgaaggtgcagcaggccgccatggagctggagctgatgcccttcaacgtgctgctgcggaccaccctggacctgctgcaggagaaggaccctgcccacatctttgctgagcctgtgaacctgtctgaggtgcctgactacctggagttcatcagcaagcccatggacttcagcaccatgaggaggaagctggagagccacctgtaccgcaccctggaggagtttgaggaggacttcaacctgattgtgaccaactgcatgaagtacaatgccaaggacaccatcttccacagagctgctgtgcggctgcgggacctgggcggggccatcctgcggcatgcccggcggcaggccgagaacatcggctatgaccctgagcggggcacccacctgcctgagagccccaagctggaggacttctaccgcttctcctgggaggatgtggacaacatcctgatccctgagaacagagcccacctgagccctgaggtgcagctgaaggagctgctggagaagctggacctggtgtctgccatgaggagcagcggggcccggacccggcgggtgcggctgctgcggcgggagatcaatgccctgcggcagaagctggcccagcccccaccaccccagccccccagcctgaacaagacagtgtccaatggagagctgcctgctggcccccagggagatgctgctgtgctggagcaggccctgcaggaggagccagaagatgatggagacagagatgacagcaagctgcccccaccacccaccctggagcccactggacctgcccccagcctgtctgagcaggagagccccccagagccccccaccctgaagcccatcaatgacagcaagccacccagccgcttcctgaagcccaggaaggtggaggaggatgagctgctggagaagagccccctgcagctgggcaatgagcccctgcagaggctgctgagtgacaatggcatcaaccggctgagcctgatggccccagacaccccagctggcacccccctgtctggagtgggccgccgcacctctgtgctcttcaagaaggccaagaatggagtgaagctgcagaggagcccagacagagtgctggagaatggagaggaccacggcgtggccggcagccctgccagccctgccagcattgaggaggagcggcacagcaggaagaggcccaggagccgcagctgcagcgagagcgagggggagaggagcccccagcaggaggaggagaccggcatgaccaacggctttgggaagcacacagagagcggcagtgacagtgaatgttccctgggcctgagcggcggcctggcctttgaggcctgcagcggcctgaccccacccaagaggagccggggcaagccagccctgagccgggtgcccttcctggagggcgtgaatggagacagcgactacaacggcagcggccgcagcctgctgctgccctttgaagatagaggagacctggagcccctggagctggtgtgggccaagtgccggggctaccccagctacccagccctgatcatcgaccccaagatgccccgggagggcctgctgcacaatggagtgcccatccctgtgccccccctggatgtgctgaagctgggggagcagaagcaggccgaggccggggagaagctgttcctggtgctcttctttgacaacaagaggacctggcagtggctgccccgggacaaggtgctgcccctgggcgtggaggacacagtggacaagctgaagatgctggagggcaggaagaccagcatcaggaagtctgtgcaggtggcctatgaccgggccatgatccacctgagccgggtgcggggcccccacagctttgtgaccagcagctacctgtag

SEQ ID NO: 7317 - DNA, 1977 bp, synthetic construct
  misc_feature 1..1977: note = source = /note="Description of Artificial Sequence: Synthetic coding sequence"
  source 1..1977: mol_type = other DNA
atgtttgtgtcctacctgatcctgaccctgctgcacgtgcagacagctgtgctggcccggcctggaggagagagcatcggctgtgatgactacctgggcagtgacaaggtggtggacaagtgtggggtgtgtggcggggacaacacaggctgccaggtggtgtctggagtcttcaagcacgccctgaccagcctgggctaccaccgggtggtggagatccctgagggcgccaccaagatcaacatcacagagatgtacaagagcaacaactacctggccctgcggagccgcagcggccgcagcatcatcaatggaaactgggccatcgacaggcctgggaagtatgaaggaggcggcaccatgttcacctacaagaggcccaatgagatcagcagcacagctggggagagcttcctggccgagggccccaccaatgagatcctggatgtgtacatgatccaccagcagcccaaccctggggtgcactatgaatatgtgatcatgggcaccaatgccatcagcccccaggtgcccccccacagaagacctggagagcccttcaacggccagatggtgacagagggccgcagccaggaggagggggagcagaagggcagaaatgaggagaaggaggacctgcggggggaggcccctgagatgttcaccagcgagagcgcccagaccttccctgtgcgccacccagaccgcttcagcccccacaggccagacaacctggtgcccccagccccccagcccccccggcgcagccgggaccacaactggaagcagctgggcaccacagagtgcagcaccacctgtgggaagggcagccagtaccccatcttccgctgtgtgcacaggagcacccatgaggaggcccctgagagctactgtgacagctccatgaagcccaccccagaggaggagccctgcaacatcttcccctgcccagccttctgggacatcggggagtggagcgaatgttccaagacctgtggcctgggcatgcagcaccggcaggtgctgtgccggcaggtgtatgccaacagaagcctgactgtgcagccctaccgctgccagcacctggagaagccagagaccaccagcacctgccagctgaagatctgcagcgagtggcagatcagaacagactggaccagctgcagcgtgccctgtggggtgggccagaggaccagagatgtgaagtgtgtgagcaacattggagatgtggtggatgatgaggagtgcaacatgaagctgcggcccaatgacatcgagaactgtgacatgggcccctgtgccaagtcctggttcctgacagagtggagcgagcgctgcagcgcagaatgtggggccggcgtgaggaccaggtctgtggtgtgcatgaccaaccacgtgagcagcctgcccctggagggctgcggcaacaacagacctgctgaggccaccccctgtgacaatggcccctgcaccgggaaggtggagtggtttgctggctcctggagccagtgcagcattgaatgtggcagcggcacccagcagcgggaggtgatctgtgtgaggaagaatgctgacacctttgaggtgctggaccccagcgagtgcagcttcctggagaagccacccagccagcagagctgccacctgaagccctgtggggccaagtggttcagcacagagtggagcatgtgcagcaagagctgccagggcggcttccgggtgcgggaggtgcgctgcctgagtgatgacatgaccctgagcaacctgtgtgacccccagctgaagccagaggagcgggagagctgcaacccccaggactgtgtgcctgaggtggatgagaactgcaaggacaagtactacaactgcaatgtggtggtgcaggcccggctgtgtgtgtacaactactacaagacagcctgctgtgccagctgcaccagggtggccaaccggcagacaggcttcctgggcagcaggtag

SEQ ID NO: 7318 - DNA, 708 bp, synthetic construct
  misc_feature 1..708: note = source = /note="Description of Artificial Sequence: Synthetic coding sequence"
  source 1..708: mol_type = other DNA
atgaggcccctggccggcggcctgctgaaggtggtgtttgtggtgtttgccagcctgtgtgcctggtacagcggctacctgctggccgagctgatcccagatgcccccctgagcagcgctgcctacagcatccgcagcattggagagaggcctgtgctgaaggcccctgtgcccaagaggcagaagtgtgaccactggaccccctgccccagcgacacctacgcctaccgcctgctgagcggcggcggccgcagcaaatatgccaagatctgctttgaggacaacctgctgatgggagagcagctgggcaatgtggcccggggcatcaacatcgccatcgtgaactacgtgactggaaatgtgacagccacccgctgctttgacatgtatgaaggagacaacagcggccccatgaccaagttcatccagagcgctgcccccaagagcctgctcttcatggtgacctatgatgatggcagcacccggctgaacaatgatgccaagaatgccatcgaggccctgggcagcaaggagatccggaacatgaagttccgcagctcctgggtgttcatcgccgccaagggcctggagctgcccagcgagatccagcgggagaagatcaaccacagtgatgccaagaacaaccgctacagcggctggccagctgagatccagatcgagggctgcatccccaaggagaggagctag

SEQ ID NO: 7319 - DNA, 759 bp, synthetic construct
  misc_feature 1..759: note = source = /note="Description of Artificial Sequence: Synthetic coding sequence"
  source 1..759: mol_type = other DNA
atgaggggccagggcaggaaggagagcctgagtgacagccgggacctggatggcagctatgaccagctgaccggccaccccccaggccccaccaagaaggccctgaagcagcgcttcctgaagctgctgccctgctgcggcccccaggccctgcccagcgtgtctgagaacagcgtggatgatgaatttgagctgagcacagtgtgccacaggcctgagggcctggagcagctgcaggagcagaccaagttcaccaggaaggagctgcaggtgctgtaccggggcttcaagaatgaatgtcccagcggcatcgtgaatgaggagaacttcaagcagatctacagccagttcttcccccagggcgacagcagcacctacgccaccttcctgttcaatgcctttgacaccaaccatgatggctctgtgtcctttgaagattttgtggccggcctgagcgtcatcctgcggggcaccgtggatgaccggctgaactgggccttcaacctgtatgacctgaacaaggatggctgcatcaccaaggaggagatgctggacatcatgaagagcatctatgacatgatgggcaagtacacctacccagccctgcgggaggaggccccccgggagcacgtggagagcttcttccagaagatggacaggaacaaggatggagtggtgaccatcgaggagttcatcgagagctgccagaaggatgagaacatcatgaggtccatgcagctgtttgacaacgtcatctag

SEQ ID NO: 7320 - DNA, 312 bp, synthetic construct
  misc_feature 1..312: note = source = /note="Description of Artificial Sequence: Synthetic coding sequence"
  source 1..312: mol_type = other DNA
atgagcggccggggcaagggcggcaagggcctgggcaaaggaggagccaagaggcacaggaaggtgctgcgggacaacatccagggcatcaccaagccagccatccggcggctggcccggcggggcggcgtgaagaggatcagcggcctcatctatgaggagacccggggcgtgctgaaggtgttcctggagaatgtcatcagagatgctgtgacctacacagagcacgccaagaggaagacagtgacagccatggatgtggtgtatgccctgaagaggcagggccgcaccctgtatggctttggaggatag

SEQ ID NO: 7321 - DNA, 3120 bp, synthetic construct
  misc_feature 1..3120: note = source = /note="Description of Artificial Sequence: Synthetic coding sequence"
  source 1..3120: mol_type = other DNA
atggaggtgacagctgtggccacccagggcggctacggcagcagtgactgggtgaccagctacctgctgatgttcagtgatggcggcaggaactggaagcagtaccgccgggaggagagcatctggggcttccctggcaacaccaatgctgacagcgtggtgcactaccgcctgcagcccccatttgaggcccgcttcctgcgcttcctgcccctggcctggaacccccggggccgcatcggcatgagaattgaggtgtatggctgtgcctacaagtctgaggtggtgtactttgatggccagagcgccctgctgtaccgcctggacaagaagcccctgaagcccatcagagatgtgatcagcctgaagttcaaggccatgcagagcaatggcatcctgctgcaccgggagggccagcacggcaaccacatcaccctggagctgatcaagggcaagctggtgttcttcctgaacagcggaaatgccaagctgcccagcaccatcgcccctgtgaccctgaccctgggcagcctgctggatgaccagcactggcacagcgtgctgattgagctgctggacacccaggtgaacttcaccgtggacaagcacacccaccacttccaggccaagggggacagcagctacctggacctgaactttgagatcagctttggaggcatccccaccccaggccgcagccgggccttccggaggaagagcttccacggctgcctggagaacctgtactacaatggagtggatgtgacagagctggccaagaagcacaagccccagatcctgatgatgggaaatgtgtccttcagctgcccccagccccagacagtgcctgtgaccttcctgagcagccgcagctacctggccctgcccggcaacagcggggaggacaaggtgtctgtgaccttccagttccgcacctggaacagagctggccacctgctgtttggagagctgcggcggggcagcggcagctttgtgctcttcctgaaggatggcaagctgaagctgagcctcttccagcccggccagagccccagaaatgtgacagctggggccggcctgaatgatggccagtggcacagcgtgtccttcagcgccaagtggagccacatgaatgtggtggtggatgatgacacagctgtgcagcccctggtggccgtgctgattgattctggggacacctactactttggaggctgcctggacaacagcagcggcagcggctgcaagagccccctgggcggcttccagggctgcctgcggctcatcaccatcggggacaaggctgtggaccccatcctggtgcagcagggcgccctgggcagcttccgggacctgcagattgacagctgtggcatcacagaccgctgcctgcccagctactgtgagcacggcggagaatgttcccagagctgggacaccttcagctgtgactgcctgggcaccggctacacaggagagacctgccacagcagcctgtatgagcagagctgtgaggcccacaagcaccggggcaaccccagcggcctgtactacattgatgctgatggcagcggccccctgggccccttcctggtgtactgcaacatgacagcagatgctgcctggacagtggtgcagcacggcggcccagatgctgtgaccctgcggggggcccccagcggccaccccaggtctgctgtgtcctttgcctatgctgctggagctggccagctgcggtctgctgtgaacctggccgagcgctgtgagcagaggctggccctgcgctgtggcacagcccggcggccagacagcagagatggcacccccctgtcctggtgggtgggccgcaccaatgagacccacacctcctggggcggcagcctgcctgatgcccagaagtgcacctgtggcctggagggcaactgcatcgacagccagtactactgcaactgtgatgctggaagaaatgagtggaccagtgacaccatcgtgctgagccagaaggagcacctgcctgtgacccagatcgtgatgacagatgctggccggccccacagcgaggccgcctacaccctgggccccctgctgtgccgcggggaccagagcttctggaacagcgccagcttcaacacagagaccagctacctgcacttccctgccttccacggggagctgacagcagatgtgtgcttcttcttcaagaccaccgtgtcctctggagtcttcatggagaacctgggcatcacagacttcatccgcatcgagctgcgggcccccacagaggtgaccttctcctttgatgtgggcaatggcccctgtgaggtgacagtgcagagccccacccccttcaatgacaaccagtggcaccacgtgcgggcagagagaaatgtgaagggggccagcctgcaggtggaccagctgccccagaagatgcagcctgccccagcagatggccacgtgcggctgcagctgaacagccagctgttcatcggcggcacagccacccggcagaggggcttcctgggctgcatccgcagcctgcagctgaatggagtggccctggacctggaggagcgggccaccgtgaccccaggagtggagcccggctgtgccggccactgcagcacctacggccacctgtgcagaaatggaggccgctgccgggagaagagaagaggagtgacctgtgactgtgccttcagcgcctatgatggccccttctgcagcaatgagatcagcgcctactttgccaccggcagctccatgacctaccacttccaggagcactacaccctgtctgagaacagcagcagcctggtgagcagcctgcacagagatgtgaccctgacccgggagatgatcaccctgtccttccgcaccaccaggacccccagcctgctgctgtatgtgagcagcttctatgaggagtacctgagcgtcatcctggccaacaacggcagcctgcagatccgctacaagctggacagacaccagaacccagatgccttcacctttgacttcaagaacatggctgatggccagctgcaccaggtgaagatcaaccgggaggaggccgtggtgatggtggaggtgatcccccagatgcagaagagcaactag

SEQ ID NO: 7322 - DNA, 1257 bp, synthetic construct
  misc_feature 1..1257: note = source = /note="Description of Artificial Sequence: Synthetic coding sequence"
  source 1..1257: mol_type = other DNA
atgaggagcctgctgctgctgagcgccttctgcctgctggaggccgccctggccgctgaggtgaagaagccagctgctgctgctgcccctggaacagctgagaagctgagccccaaggccgccaccctggccgagaggtctgctggcctggccttcagcctgtaccaggccatggccaaggaccaggccgtggagaacatcctggtgtcccctgtggtggtggccagcagcctgggcctggtgtccctgggcggcaaggccaccacagccagccaggccaaggctgtgctgtctgctgagcagctgagagatgaggaggtgcatgctggcctgggggagctgctgcggagcctgagcaacagcacagccagaaatgtgacctggaagctgggcagccggctgtatggccccagctctgtgtcctttgctgatgactttgtgcgcagcagcaagcagcactacaactgtgagcacagcaagatcaacttccgggacaagaggtctgccctgcagagcatcaatgagtgggccgcccagaccacagatggcaagctgcctgaggtgaccaaggatgtggagaggacagatggagccctgctggtgaatgccatgttcttcaagccccactgggatgagaagttccaccacaagatggtggacaacagaggcttcatggtgaccaggagctacacagtgggcgtgatgatgatgcacaggacaggcctgtacaactactatgatgatgagaaggagaagctgcagatcgtggagatgcccctggcccacaagctgagcagcctcatcatcctgatgccccaccacgtggagcccctggagcggctggagaagctgctgaccaaggagcagctgaagatctggatgggcaagatgcagaagaaggctgtggccatcagcctgcccaagggcgtggtggaggtgacccatgacctgcagaagcacctggccggcctgggcctgacagaggccatcgacaagaacaaggctgacctgagcaggatgtctgggaagaaggacctgtacctggccagcgtcttccacgccacagcctttgagctggacacagatggcaacccctttgaccaggacatctacggccgggaggagctgcggagccccaagctgttctacgccgaccaccccttcatcttcctggtgcgggacacccagagcggcagcctgctcttcatcggccgcctggtgcggcccaagggggacaagatgagagatgagctgtag

SEQ ID NO: 7323 - DNA, 378 bp, synthetic construct
  misc_feature 1..378: note = source = /note="Description of Artificial Sequence: Synthetic coding sequence"
  source 1..378: mol_type = other DNA
atgcagctgctgaaggccctgtgggccctggccggggccgccctgtgctgcttcctggtgctggtgatccacgcccagttcctgaaggagggccagctggccgccggcacctgtgagatcgtgaccctggaccgggacagcagccagcccaggaggaccatcgcccggcagacagcccgctgtgcctgcaggaagggccagattgctggcaccacccgggcccggcctgcctgtgtggatgcccgcatcatcaagaccaagcagtggtgtgacatgctgccctgcctggagggggagggctgtgacctgctgatcaacagaagtggctggacctgcacccagcccggcggccgcatcaagaccaccaccgtgtcctag

SEQ ID NO: 7324 - DNA, 5859 bp, synthetic construct
  misc_feature 1..5859: note = source = /note="Description of Artificial Sequence: Synthetic coding sequence"
  source 1..5859: mol_type = other DNA
atgcctgccctgggccctgccctgctgcaggccctgtgggccggctgggtgctgaccctgcagcccctgcccccaacagccttcaccccaaatggcacctacctgcagcacctggcccgggaccccaccagcggcaccctgtacctgggcgccaccaacttcctgttccagctgagccctggcctgcagctggaggccaccgtgtccacaggccctgtgctggacagccgggactgcctgccccctgtgatgccagatgaatgtccccaggcccagcccaccaacaaccccaaccagctgctgctggtgtcccctggggccctggtggtgtgtggctctgtgcaccagggcgtgtgtgagcagaggcggctgggccagctggagcagctgctgctgcggcctgagaggcctggggacacccagtatgtggccgccaatgaccctgctgtgtccacagtgggcctggtggcccagggcctggccggggagcccctgctgtttgtgggccggggctacaccagccggggcgtgggcggcggcatcccccccatcaccacccgggccctgtggcccccagacccccaggccgccttctcctatgaggagacagccaagctggccgtgggccgcctgtctgagtacagccaccactttgtgtctgcctttgcccggggggccagcgcctacttcctgttcctgcggcgggacctgcaggcccagagccgggccttccgggcctacgtgtcccgggtgtgcctgcgggaccagcactactacagctatgtggagctgcccctggcctgtgagggcggccgctatggcctcatccaggccgctgctgtggccaccagccgggaggtggcccatggagaggtgctgtttgctgccttcagcagcgctgccccacccaccgtgggccggccccccagcgctgctgctggggccagcggggccagcgccctgtgtgccttccccctggatgaggtggaccggctggccaacagaacaagagatgcctgctacacccgggagggccgggcagaagatggaacagaggtggcctacatcgagtatgatgtgaacagcgactgtgcccagctgcctgtggacaccctggatgcctacccctgtggcagtgaccacacccccagccccatggccagccgggtgcccctggaggccacccccatcctggagtggccaggcatccagctgacagctgtggccgtgaccatggaggatggccacaccatcgccttcctgggggacagccagggccagctgcaccgggtgtacctgggccctggcagtgatggccacccctacagcacccagagcatccagcagggcagcgctgtgtcccgggacctgacctttgatggcacctttgagcacctgtatgtgatgacccagagcaccctgctgaaggtgcctgtggccagctgtgcccagcacctggactgtgccagctgcctggcccaccgggacccctactgcggctggtgtgtgctgctgggccgctgcagccgccgctcagaatgttcccggggccagggccctgagcagtggctgtggagcttccagcctgagctgggctgcctgcaggtggccgccatgagccctgccaacatcagccgggaggagacccgggaggtgttcctgtctgtgcctgacctgccccccctgtggccaggagagagctacagctgccactttggagagcaccagagccctgccctgctgaccggcagcggcgtgatgtgccccagcccagaccccagcgaggcccctgtgctgcccagaggagctgactatgtgtctgtgtctgtggagctgcgctttggagctgtggtgattgccaagaccagcctgtccttctatgactgtgtggccgtgacagagctgcggcccagcgcccagtgccaggcctgtgtgagcagccgctggggctgcaactggtgtgtgtggcagcacctgtgcacccacaaggccagctgtgatgctggccccatggtggccagccaccagagccccctggtgtccccagaccccccagcccggggagatggagacagcgctgagctggagggccccccagcccccctcatcctgcccagcagcctggactaccagtatgacaccccaggcctgtgggagctggaggaggccaccctgggcgccagcagctgcccctgtgtggagagcgtgcagggcagcaccctgatgcctgtgcacgtggagcgggagatccggctgctgggcaggaacctgcacctgttccaggacggccctggggacaatgaatgtgtgatggagctggagggcctggaggtggtggtggaggcccgggtggagtgtgagcccccaccagacacccagtgccacgtgacctgccagcagcaccagctgtcctatgaggccctgcagcctgagctgcgggtgggcctcttcctgcggcgggccggccgcctgcgggtggacagcgctgagggcctgcacgtggtgctgtatgactgcagcgtgggccatggagactgcagccgctgccagacagccatgccccagtatggctgtgtgtggtgtgagggggagcggccccgctgtgtgacccgggaggcctgtggggaggccgaggccgtggccacccagtgcccagcccccctcatccacagcgtggagcccctgaccggccctgtggatggcggcaccagggtgaccatccggggcagcaacctgggccagcacgtgcaggatgtgctgggcatggtgacagtggccggcgtgccctgtgctgtggatgcccaggagtatgaggtgagcagcagcctggtgtgcatcactggagccagcggggaggaggtggccggggccacagctgtggaggtgcccggccggggccggggcgtgtctgaacatgactttgcctaccaggaccccaaggtgcacagcatcttccctgcccggggcccccgggccggcggcacccggctgaccctgaatggcagcaagctgctgaccggccgcctggaggacatccgggtggtggtgggggaccagccctgccacctgctgcctgagcagcagagcgagcagctgcgctgtgagaccagcccccggcccaccccagccaccctgcctgtggccgtgtggtttggagccacagagcggcggctgcagaggggccagttcaagtacaccctggaccccaacatcaccagcgctggccccaccaagagcttcctgagcggcggccgggagatctgtgtgcggggccagaacctggatgtggtgcagaccccccgcatccgggtgacagtggtgtccaggatgctgcagcccagccagggcctgggcagaagaagaagagtggtgcctgagacagcctgcagcctgggccccagctgcagcagccagcagtttgaggagccctgccacgtgaacagcagccagctgatcacctgcaggaccccagccctgcccggcctgcctgaggacccctgggtgcgggtggagttcatcctggacaacctggtgtttgattttgccaccctgaaccccacccccttctcctatgaagctgaccccaccctgcagcccctgaaccctgaggaccccaccatgcccttccgccacaagccaggctctgtgttttctgtggagggggagaacctggacctggccatgagcaaggaggaggtggtggccatgattggagatggcccctgtgtggtgaagaccctgaccaggcaccacctgtactgtgagccccctgtggagcagcccctgcccaggcaccacgccctgcgggaggccccagacagcctgcctgagttcaccgtgcagatgggcaacctgcgcttcagcctgggccacgtgcagtatgatggagagagccctggggccttccctgtggccgcccaggtgggcctgggcgtgggcaccagcctgctggccctgggcgtcatcatcatcgtgctgatgtacagaaggaagagcaagcaggccctgcgggactacaagaaggtgcagatccagctggagaacctggagagctctgtgcgggaccgctgcaagaaggagttcacagacctgatgacagagatgacagacctgaccagtgacctgctgggcagcggcatccccttcctggactacaaggtgtatgcagagcgcatcttcttccctggccaccgggagagccccctgcaccgggacctgggcgtgcctgagagccggcggcccaccgtggagcagggcctgggccagctgagcaacctgctgaacagcaagctgttcctgaccaagttcatccacaccctggagagccagaggaccttcagcgcccgggaccgggcctacgtggccagcctgctgactgtggccctgcacggcaagctggagtacttcacagacatcctgcggaccctgctgagtgacctggtggcccagtatgtggccaagaaccccaagctgatgctgcggaggacagagaccgtggtggagaagctgctgaccaactggatgagcatctgcctgtacacctttgtgcgggacagcgtgggggagcccctgtacatgctgttccggggcatcaagcaccaggtggacaagggccctgtggacagcgtgacaggcaaggccaagtacaccctgaatgacaaccggctgctgagagaagatgtggagtaccggcccctgaccctgaatgccctgctggccgtgggccctggggccggggaggcccagggcgtgcctgtgaaggtgctggactgtgacaccatcagccaggccaaggagaagatgctggaccagctgtacaagggcgtgcccctgacccagaggccagaccccaggaccctggatgtggagtggaggtctggagtggccggccacctgatcctgagtgatgaagatgtgaccagcgaggtgcagggcctgtggaggcggctgaacaccctgcagcactacaaggtgcctgatggagccaccgtggccctggtgccctgcctgaccaagcacgtgctgcgggagaaccaggactatgtgcctggagagaggacccccatgctggaggatgtggatgagggcggcatccggccctggcacctggtgaagcccagtgatgagcctgagcccccccggccccggcggggcagcctgcggggcggggagcgggagcgggccaaggccatccctgagatctacctgacccggctgctgtccatgaagggcaccctgcagaagtttgtggatgacctcttccaggtgatcctgagcaccagcaggcctgtgcccctggccgtgaagtacttctttgacctgctggatgagcaggcccagcagcacggcatcagtgaccaggacaccatccacatctggaagaccaacagcctgcccctgcgcttctggatcaacatcatcaagaacccccagtttgtgtttgatgtgcagaccagtgacaacatggatgctgtgctgctggtgattgcccagaccttcatggatgcctgcaccctggccgaccacaagctgggccgggacagccccatcaacaagctgctgtatgcccgggacatcccccgctacaagaggatggtggagcgctactatgctgacatccggcagacagtgcctgccagtgaccaggagatgaacagcgtgctggccgagctgtcctggaactacagcggggacctgggcgcccgggtggccctgcacgagctgtacaagtacatcaacaagtactatgaccagatcatcacagccctggaggaggatggaacagcccagaagatgcagctgggctaccgcctgcagcagattgctgctgctgtggagaacaaggtgacagacctgtag

SEQ ID NO: 7325 - DNA, 342 bp, synthetic construct
  misc_feature 1..342: note = source = /note="Description of Artificial Sequence: Synthetic coding sequence"
  source 1..342: mol_type = other DNA
atgctggtgctcttcctgctgggcaccgtcttcctgctgtgcccctactggggcgagctgcatgaccccatcaaggccacagagatcatgtgctatgagtgcaagaagtaccacctgggcctgtgctatggagtgatgaccagctgcagcctgaagcacaagcagagctgtgctgtggagaacttctacatcctgaccaggaagggccagagcatgtaccactacagcaagctgagctgcatgaccagctgtgaggacatcaacttcctgggcttcaccaagagggtggagctgatctgctgtgaccacagcaactactgcaacctgcctgagggcgtgtag

SEQ ID NO: 7326 - DNA, 6408 bp, synthetic construct; identical to SEQ ID NO: 7028
  misc_feature 1..6408: note = source = /note="Description of Artificial Sequence: Synthetic coding sequence"
  source 1..6408: mol_type = other DNA

SEQ ID NO: 7327 - DNA, 390 bp, synthetic construct
  misc_feature 1..390: note = source = /note="Description of Artificial Sequence: Synthetic coding sequence"
  source 1..390: mol_type = other DNA
atgaggcccctgaagccaggggcccccctgcctgccctcttcctgctggccctggccctgagcccccatggagcccacggccggccccggggccggcggggggcccgggtgacagacaaggagcccaagcccctgctcttcctgcctgctgctggagctggccgcacccccagcggcagccgctctgctgagatcttcccccgggacagcaacctgaaggacaagttcatcaagcacttcaccggccctgtgaccttctccccagaatgttccaagcacttccaccggctgtactacaacaccagagaatgttccaccccagcctactacaagagatgtgcccggctgctgacccggctggccgtgagccccctgtgcagccagacctag

SEQ ID NO: 7328 - DNA, 252 bp, synthetic construct
  misc_feature 1..252: note = source = /note="Description of Artificial Sequence: Synthetic coding sequence"
  source 1..252: mol_type = other DNA
atgaggctgtctgtgtgcctgctgatggtgtccctggccctgtgctgctaccaggcccacgccctggtgtgcccagctgtggccagcgagatcaccgtcttcctgttcctgagtgatgctgctgtgaacctgcaggtggccaagctgaaccccccacctgaggccctggccgccaagctggaggtgaagcactgcacagaccagatctccttcaagaagaggctgagcctgaagaagtcctggtggaagtag

SEQ ID NO: 7329 - DNA, 1455 bp, synthetic construct; identical to SEQ ID NO: 7137
  misc_feature 1..1455: note = source = /note="Description of Artificial Sequence: Synthetic coding sequence"
  source 1..1455: mol_type = other DNA

SEQ ID NO: 7330 - DNA, 159 bp, synthetic construct
  misc_feature 1..159: note = source = /note="Description of Artificial Sequence: Synthetic coding sequence"
  source 1..159: mol_type = other DNA
atgaagctgtgtgtgacagtgctgagcctgctggtgctggtggccgccttctgcagcctggccctgagcgcccccagcaacaagcccctggaggccagcaagagcgccctgacccctgtgtccccaggcagccgcagcacctgcatgacctggaactag

SEQ ID NO: 7331 - DNA, 675 bp, synthetic construct
  misc_feature 1..675: note = source = /note="Description of Artificial Sequence: Synthetic coding sequence"
  source 1..675: mol_type = other DNA
atgagggtgtctggagtgctgcggctgctggccctgatctttgccatcgtgaccacctggatgttcatccgcagctacatgtccttctccatgaagaccatccggctgccccgctggctggccgccagccccaccaaggagatccaggtgaagaagtacaagtgtggcctcatcaagccctgcccagccaactactttgccttcaagatctgcagcggggccgccaacgtggtgggccccaccatgtgctttgaggacaggatgatcatgagccctgtgaagaacaacgtgggccggggcctgaacatcgccctggtgaatggcaccaccggggctgtgctgggccagaaggcctttgacatgtacagcggagatgtgatgcacctggtgaagttcctgaaggagatccctggaggagccctggtgctggtggccagctatgatgaccccggcaccaagatgaatgatgagagcaggaagctgttcagtgacctgggcagcagctatgccaagcagctgggcttccgggacagctgggtgttcatcggggccaaggacctgcggggcaagagcccctttgagcagttcctgaagaacagcccagacaccaacaagtatgagggctggccagagctgctggagatggagggctgcatgccacccaagcccttctag

SEQ ID NO: 7332 - DNA, 1404 bp, synthetic construct
  misc_feature 1..1404: note = source = /note="Description of Artificial Sequence: Synthetic coding sequence"
  source 1..1404: mol_type = other DNA
atgctgatcttctggaccatcaccctcttcctgctgggcgccgccaagggcaaggaggtgtgctatgaggacctgggctgcttcagtgacacagagccctggggcggcacagccatccggcccctgaagatcctgccctggagccctgagaagattggcacccgcttcctgctgtacaccaatgaaaaccccaacaacttccagatcctgctgctgagtgaccccagcaccatcgaggccagcaacttccagatggacaggaagacccgcttcatcatccacggcttcatcgacaagggagatgagagctgggtgacagacatgtgcaagaagctgtttgaggtggaggaggtgaactgcatctgtgtggactggaagaagggcagccaggccacctacacccaggccgccaacaacgtgcgggtggtgggcgcccaggtggcccagatgctggacatcctgctgacagagtacagctacccacccagcaaggtgcacctgattggccacagcctgggcgcccacgtggccggggaggccggcagcaagaccccaggcctgagccgcatcaccggcctggaccctgtggaggccagctttgagagcaccccagaggaggtgcggctggaccccagtgatgctgactttgtggatgtgatccacacagatgctgcccccctcatccccttcctgggcttcggcaccaaccagcagatgggccacctggacttcttccccaatggaggagagagcatgcctggctgcaagaagaatgccctgagccagatcgtggacctggatggcatctgggccggcacccgggactttgtggcctgcaaccacctgcggagctacaagtactacctggagagcatcctgaacccagatggctttgctgcctacccctgcaccagctacaagagctttgaaagtgacaagtgcttcccctgcccagaccagggctgcccccagatgggccactatgctgacaagtttgctggccgcaccagcgaggagcagcagaagttcttcctgaacacaggagaggccagcaactttgcccgctggaggtatggagtgtccatcaccctgagcggccgcacagccaccggccagatcaaggtggccctgtttggaaataaaggaaacacccaccagtacagcatcttccggggcatcctgaagccaggcagcacccacagctatgaatttgatgccaagctggatgtgggcaccatcgagaaggtgaagttcctgtggaacaacaacgtcatcaaccccaccctgcccaaggtgggcgccaccaagatcaccgtgcagaagggggaggagaagacagtgtacaacttctgcagtgaagatactgtgcgggaggacaccctgctgaccctgaccccctgctag

SEQ ID NO: 7333 - DNA, 237 bp, synthetic construct
  misc_feature 1..237: note = source = /note="Description of Artificial Sequence: Synthetic coding sequence"
  source 1..237: mol_type = other DNA
atgggcagcggcctgcccctggtgctgctgctgaccctgctgggcagcagccacggcaccggccctggcatgaccctgcagctgaagctgaaggagagcttcctgaccaacagcagctatgagagcagcttcctggagctgctggagaagctgtgcctgctgctgcacctgcccagcggcacctctgtgaccctgcaccacgcccggagccagcaccacgtggtgtgcaacacctag

SEQ ID NO: 7334 - DNA, 291 bp, synthetic construct
  misc_feature 1..291: note = source = /note="Description of Artificial Sequence: Synthetic coding sequence"
  source 1..291: mol_type = other DNA
atggagcacaaggaggtggtgctgctgctgctgctcttcctgaagagcggccagggcgagcccctggatgattatgtgaacacccagggccccagcctcttctctgtgaccaagaagcagctgggcgccggcagccgggaggagtgtgccgccaagtgtgaggaggacaaggagttcacctgccgggccttccagtaccacagcaaggagcagcagtgtgtgatcatggccgagaacaggaagagcagcatcatcatccgcatgagagatgctgtgctgtttgagaagtag

SEQ ID NO: 7335 - DNA, 1083 bp, synthetic construct
  misc_feature 1..1083: note = source = /note="Description of Artificial Sequence: Synthetic coding sequence"
  source 1..1083: mol_type = other DNA
atgggcctgctgctgctggtgcccctgctgctgctgcccggcagctatggcctgcccttctacaacggcttctactacagcaacagcgccaatgaccagaacctgggcaatggacatggcaaggacctgctgaatggagtgaagctggtggtggagaccccagaggagaccctcttcacctaccagggcgccagcgtcatcctgccctgccgctaccgctatgagcccgccctggtgagcccccggcgggtgcgggtgaagtggtggaagctgtctgaaaatggagcccctgagaaggatgtgctggtggccatcggcctgcggcacaggagctttggagactaccagggccgggtgcacctgcggcaggacaaggagcatgatgtgtccctggagatccaggacctgcggctggaggactatggccgctaccgctgtgaggtgattgatggcctggaggatgagagcggcctggtggagctggagctgcggggcgtggtgttcccctaccagagccccaacggccgctaccagttcaacttccacgagggccagcaggtgtgtgccgagcaggccgctgtggtggccagctttgagcagctgttccgggcctgggaggagggcctggactggtgcaatgccggctggctgcaggatgccaccgtgcagtaccccatcatgctgccccggcagccctgtggcggccctggcctggcccctggggtgcgctcctatggccccaggcaccggcggctgcacagatatgatgtgttctgctttgccacagccctgaagggccgggtgtactacctggagcaccctgagaagctgaccctgacagaggcccgggaggcctgccaggaggatgatgccaccatcgccaaggtgggccagctgtttgctgcctggaagttccacggcctggacagatgtgatgctggctggctggctgatggctctgtgcgctaccctgtggtgcacccccaccccaactgtggccccccagagcccggggtgcgcagctttggcttcccagacccccagagccggctgtatggagtgtactgctaccggcagcactag

SEQ ID NO: 7336 - DNA, 810 bp, synthetic construct
  misc_feature 1..810: note = source = /note="Description of Artificial Sequence: Synthetic coding sequence"
  source 1..810: mol_type = other DNA
atgatccgcaccctgctgctgagcaccctggtggccggggccctgagctgtggggaccccacctacccaccctacgtgaccagggtggtgggcggggaggaggcccggcccaacagctggccctggcaggtgtccctgcagtacagcagcaatggcaagtggtaccacacctgtggcggcagcctgattgccaacagctgggtgctgacagctgcccactgcatcagcagcagcaggacctacagagtgggcctgggccgccacaacctgtatgtggccgagagcggcagcctggccgtgtctgtgtccaagatcgtggtgcacaaggactggaacagcaaccagatcagcaaaggaaatgacatcgccctgctgaagctggccaaccctgtgtccctgacagacaagatccagctggcctgcctgcccccagctggcaccatcctgcccaacaactacccctgctacgtgacaggctggggccgcctgcagaccaacggggctgtgcctgatgtgctgcagcagggccgcctgctggtggtggactatgccacctgcagcagcagcgcctggtggggcagctctgtgaagacctccatgatctgtgctggaggagatggagtcatcagcagctgcaatggagacagcggcggccccctgaactgccaggccagtgatggccgctggcaggtgcacggcatcgtgtcctttggcagccggctgggctgcaactactaccacaagcccagcgtcttcaccagggtgagcaactacatcgactggatcaacagcgtcatcgccaacaactag

SEQ ID NO: 7337 - DNA, 1122 bp, synthetic construct
  misc_feature 1..1122: note = source = /note="Description of Artificial Sequence: Synthetic coding sequence"
  source 1..1122: mol_type = other DNA
atgctgccctggctgctggtgttttctgccctgggcatccaggcctggggagacagctcctggaacaagacccaggccaagcaggtgtctgagggcctgcagtacctgtttgagaacatcagccagctgacagagaagggcctgcccacagatgtgtccaccaccgtgtccaggaaggcctggggcgctgaggccgtgggctgcagcatccagctgaccacccctgtgaatgtgctggtgatccaccacgtgcccggcctggagtgccacgaccagacagtgtgcagccagaggctgcgggagctgcaggcccaccacgtgcacaacaacagcggctgtgatgtggcctacaacttcctggtgggagatgatggccgggtgtatgagggcgtgggctggaacatccagggcgtgcacacccagggctacaacaacatcagcctgggctttgccttcttcggcaccaagaagggccacagccccagccctgctgccctgagcgccatggagaacctgatcacctatgctgtgcagaagggccacctgagcagcagctatgtgcagcccctgctgggcaaaggagagaactgcctggccccccggcagaagaccagcctgaagaaggcctgccctggggtggtgcccaggtctgtgtggggcgcccgggagacccactgccccaggatgaccctgcctgccaagtatggcatcatcatccacacagctggccgcacctgcaacatcagtgatgaatgtcggctgctggtgcgggacatccagagcttctacatcgaccggctgaagagctgtgacatcggctacaacttcctggtgggccaggatggagccatctatgaaggagtgggctggaatgtgcagggcagcagcaccccaggctatgatgacatcgccctgggcatcaccttcatgggcaccttcaccggcatccccccaaatgctgctgccctggaggccgcccaggacctgatccagtgtgccatggtgaagggctacctgacccccaactacctgctggtgggccacagtgatgtggcccggaccctgagccctggccaggccctgtacaacatcatcagcacctggccccacttcaagcactag

SEQ ID NO: 7338 - DNA, 327 bp, synthetic construct
  misc_feature 1..327: note = source = /note="Description of Artificial Sequence: Synthetic coding sequence"
  source 1..327: mol_type = other DNA
atgaggcagaggctgctgcccagcgtgaccagcctgctgctggtggccctgctcttccctggcagcagccaggcccggcacgtgaaccacagcgccacagaggccctgggggagctgcgggagcgggcccctggccagggcaccaacggcttccagctgctgcggcatgctgtgaagagggacctgctgccccccaggaccccaccctaccagggagatgtgcccccaggcatccggaacaccatctgccacatgcagcagggcatctgccgcctcttcttctgccacagcggcaccggccagcagcaccggcagagatgtggctag

SEQ ID NO: 7339 - DNA, 708 bp, synthetic construct
  misc_feature 1..708: note = source = /note="Description of Artificial Sequence: Synthetic coding sequence"
  source 1..708: mol_type = other DNA
atgagcccccccctgctgaagctgggcgctgtgctgagcaccatggccatgatcagcaactggatgagccagaccctgcccagcctggtgggcctgaacaccacccggctgagcaccccagacaccctgacccagatcagccccaaggagggctggcaggtgtacagcagcgcccaggaccctgatggccgctgcatctgcaccgtggtggcccctgagcagaacctgtgcagcagagatgccaagagccggcagctgcggcagctgctggagaaggtgcagaacatgagccagagcattgaggtgctgaacctgcggacccagagggacttccagtatgtgctgaagatggagacccagatgaagggcctgaaggccaagttccggcagattgaagatgacaggaagaccctgatgaccaagcacttccaggagctgaaggagaagatggatgagctgctgcccctcatccctgtgctggagcagtacaagacagatgccaagctgatcacccagttcaaggaggagatccggaacctgtctgctgtgctgaccggcatccaggaggagattggagcctatgactatgaggagctgcaccagagggtgctgagcctggagacccggctgcgggactgcatgaagaagctgattgacctgaagaagaggaaggaggaggagaagaggcagcagaagggggaggcctag

SEQ ID NO: 7340 - DNA, 606 bp, synthetic construct
  misc_feature 1..606: note = source = /note="Description of Artificial Sequence: Synthetic coding sequence"
  source 1..606: mol_type = other DNA
atgaacctgaactgccccccctgtgtgacaggcctgcgggtgtggagcagctgccgcagcaagcccaacagccgggcccggagctgccgcagctgcacaggagccagcaggaccctgcccagccaccacatgagccacgtggagtgccccagcggcatcgtgaatgaggagaacttcaagcagatctacagccagttcttcccccagggcgacagcagcacctacgccaccttcctgttcaatgcctttgacaccaaccatgatggctctgtgtcctttgaggactttgtggccggcctgagcgtcatcctgcggggcaccgtggatgaccggctgaactgggccttcaacctgtatgacctgaacaaggatggctgcatcaccaaggaggagatgctggacatcatgaagagcatctatgacatgatgggcaagtacacctacccagccctgcgggaggaggccccccgggagcacgtggagagcttcttccagaagatggacaggaacaaggatggagtggtgaccatcgaggagttcatcgagagctgccagaaggatgagaacatcatgaggtccatgcagctgtttgacaacgtcatctag

SEQ ID NO: 7341 - DNA, 693 bp, synthetic construct
  misc_feature 1..693: note = source = /note="Description of Artificial Sequence: Synthetic coding sequence"
  source 1..693: mol_type = other DNA
atgaggctggccggccccctgagaattgtggtgctggtggtgtctgtgggcgtgacctggatcgtggtgtccatcctgctgggcggccctggcagcggcttcccccgcatccagcagctgttcaccagccctgagagctctgtgacagctgccccccgggccaggaagtacaagtgtggcctgccccagccctgcccagaggagcacctggccttccgggtggtgtctggggccgccaacgtcatcggccccaagatctgcctggaggacaagatgctgatgagctctgtgaaggacaacgtgggccggggcctgaacatcgccctggtgaatggagtgtctggagagctgattgaggcccgggcctttgacatgtgggccggagatgtgaatgacctgctgaagttcatccggcccctgcacgagggcaccctggtgtttgtggccagctatgatgatcctgccaccaagatgaatgaggagaccaggaagctgttcagcgagctgggcagcagaaatgccaaggagctggccttccgggacagctgggtgtttgtgggcgccaagggcgtgcagaacaagagcccctttgagcagcacgtgaagaacagcaagcacagcaacaagtatgagggctggccagaggccctggagatggagggctgcatccccaggaggagcacagccagctag

SEQ ID NO: 7342 - DNA, 684 bp, synthetic construct
  misc_feature 1..684: note = source = /note="Description of Artificial Sequence: Synthetic coding sequence"
  source 1..684: mol_type = other DNA
atgagggtggccggggccgccaagctggtggtggccgtggccgtgttcctgctgaccttctacgtgatcagccaggtgtttgagatcaagatggatgccagcctgggcaacctgtttgcccggagcgccctggacacagctgcccggagcaccaagcccccacgctacaagtgtggcatcagcaaggcctgcccagagaagcactttgccttcaagatggccagcggggccgccaacgtggtgggccccaagatctgcctggaggacaacgtgctgatgtctggagtgaagaacaacgtgggccggggcatcaacgtggccctggccaacgggaagacaggagaggtgctggacaccaagtactttgacatgtggggcggagatgtggcccccttcatcgagttcctgaaggccatccaggacggcaccatcgtgctgatgggcacctatgatgatggagccaccaagctgaatgatgaggcccggcggctgattgctgacctgggcagcaccagcatcaccaacctgggcttccgggacaactgggtgttctgtggcggcaagggcatcaagaccaagagcccctttgagcagcacatcaagaacaacaaggacaccaacaagtatgagggctggccagaggtggtggagatggagggctgcatcccccagaagcaggactag

SEQ ID NO: 7343 - DNA, 1656 bp, synthetic construct
  misc_feature 1..1656: note = source = /note="Description of Artificial Sequence: Synthetic coding sequence"
  source 1..1656: mol_type = other DNA
atggaggacagcgacagcgctgccaagcagctgggcctggccgaggccgctgctgctggaggagaggccgaggagcctgtgctgagcagagatgaggacagcgaggaggatgctgacagcgaggccgagcgggagaccccccgggtgacagctgtggccgtgatggctgctgagcccggccacatggacatgggcgctgaggccctgcccggcccagatgaagctgctgctgctgctgcctttgctgaggtgaccaccgtgacagtggccaacgtgggcgctgctgctgacaacgtgttcaccacctctgtggccaatgctgccagcatcagcggccacgtgctgagcggccgcacagccctgcagattggagacagcctgaacacagagaaggccaccctgattgtggtgcacacagatggcagcatcgtggagaccaccggcctgaagggccctgctgcccccctgaccccaggcccccagagcccccccacccccctggcccctggccaggagaagggcggcaccaagtacaactgggaccccagcgtgtatgattctgagctgcctgtgcgctgcaggaacatcagcggcaccctgtacaagaaccggctgggcagcggcggccggggccgctgcatcaagcagggcgagaactggtacagccccacagaatttgaggccatggccggccgggccagcagcaaggactggaagaggagcatccgctatgccggccggcccctgcagtgcctgatccaggacggcatcctgaacccccacgccgccagctgcacctgtgccgcctgctgtgatgacatgaccctgagcggccctgtgcggctgtttgtgccctacaagaggaggaagaaggaaaatgagctgcccaccacccctgtgaagaaggacagccccaagaacatcaccctgctgcctgccacagctgccaccaccttcaccgtgacccccagcggccagatcaccaccagcggggccctgacctttgaccgggccagcacagtggaggccacagctgtgatcagcgagagccctgcccagggagatgtgtttgctggggccaccgtgcaggaggcctctgtgcagcccccctgccgggccagccaccctgagccccactacccaggctaccaggacagctgccagatcgcccccttccctgaggccgccctgcccaccagccaccccaagatcgtgctgaccagcctgcctgccctggccgtgcccccacccacccccaccaaggccgcccccccagccctggtgaatggcctggagctgtctgagcccaggtcctggctgtacctggaggagatggtgaacagcctgctgaacacagcccagcagctgaagaccctgtttgagcaggccaagcacgccagcacctaccgggaggccgccaccaaccaggccaagatccatgctgatgctgagaggaaggagcagagctgtgtgaactgtggccgggaggccatgtctgagtgcaccggctgccacaaggtgaactactgcagcaccttctgccagaggaaggactggaaggaccaccagcacatctgtggccagagcgctgctgtgacagtgcaggctgatgaggtgcacgtggccgagagcgtgatggagaaggtgacagtgtag

SEQ ID NO: 7344 - DNA, 2022 bp, synthetic construct
  misc_feature 1..2022: note = source = /note="Description of Artificial Sequence: Synthetic coding sequence"
  source 1..2022: mol_type = other DNA
atgaagccaggcggcttctggctgcacctgaccctgctgggcgccagcctgcctgctgccctgggctggatggaccccggcaccagccggggcccagatgtgggcgtgggggagagccaggccgaggagcccaggagctttgaggtgacccggcgggagggcctgagcagccacaatgagctgctggccagctgtgggaagaagttctgcagccggggcagccgctgtgtgctgagcctggccccagaagatagagtgtctgtgaccaccgtgacagtgggcctgagcacagtgctgacctgtgctgtgcacggggacctgcggccccccatcatctggaagagaaatggcctgaccctgaacttcctggacctggaggacatcaatgactttggagaagatgacagcctgtacatcaccaaggtgaccaccatccacatgggcaactacacctgccacgccagcggccacgagcagctgttccagacccacgtgctgcaggtgaatgtgccccctgtgatccgggtgtacccagagagccaggcccaggagcccggggtggccgccagcctgcgctgccacgccgagggcatccccatgccccgcatcacctggctgaagaatggagtggatgtgtccacccagatgagcaagcagctgagcctgctggccaatggaagtgagctgcacatcagctctgtgcgctatgaagatactggagcctacacctgcatcgccaagaatgaggtgggcgtggatgaggacatcagcagcctcttcatcgaggacagcgccaggaagaccctggccaacatcctgtggagggaggagggcctgtctgtgggcaacatgttctacgtgttcagtgatgatggcatcatcgtcatccaccctgtggactgtgagatccagaggcacctgaagcccacagagaagatcttcatgtcctatgaggagatctgcccccagcgggagaagaatgccacccagccctgccagtgggtgtctgctgtgaatgtgaggaaccgctacatctacgtggcccagcctgccctgagccgggtgctggtggtggacatccaggcccagaaggtgctgcagagcattggagtggaccccctgcctgccaagctgtcctatgacaagagccatgaccaggtgtgggtgctgtcctggggagatgtgcacaagagccggcccagcctgcaggtgatcacagaggccagcacaggccagagccagcacctgatccgcaccccatttgctggggtggatgacttcttcatcccccccaccaacctgatcatcaaccacatccgcttcggcttcatcttcaacaagagtgaccctgctgtgcacaaggtggacctggagaccatgatgcccctgaagaccatcggcctgcaccaccacggctgtgtgccccaggccatggcccacacccacctgggcggctacttcttcatccagtgccggcaggacagccctgccagcgctgcccggcagctgctggtggacagcgtgacagattctgtgctgggccccaatggagatgtgacaggcaccccccacaccagcccagatggccgcttcatcgtgtctgctgctgctgacagcccctggctgcacgtgcaggagatcaccgtgcggggggagatccagaccctgtatgacctgcagatcaacagcggcatcagtgacctggccttccagaggagcttcacagagagcaaccagtacaacatctatgctgccctgcacacagagccagacctgctcttcctggagctgagcacaggcaaggtgggcatgctgaagaacctgaaggagcccccagctggccctgcccagccctggggcggcacccaccgcatcatgagggacagcggcctgtttggccagtacctgctgaccccagcccgggagagcctcttcctgatcaatggccggcagaacaccctgcgctgtgaggtgtctggcatcaagggcggcaccaccgtggtgtgggtgggggaggtgtag

SEQ ID NO: 7345 - DNA, 2007 bp, synthetic construct
  misc_feature 1..2007: note = source = /note="Description of Artificial Sequence: Synthetic coding sequence"
  source 1..2007: mol_type = other DNA
atggacctggtgctgaagcgctgcctgctgcacctggccgtgattggagccctgctggccgtgggcgccaccaaggtgcccaggaaccaggactggctgggcgtgtcccggcagctgcggaccaaggcctggaaccggcagctgtacccagagtggacagaggcccagaggctggactgctggaggggcggccaggtgtccctgaaggtgtccaatgatggccccaccctcatcggggccaatgccagcttcagcatcgccctgaacttccctggcagccagaaggtgctgcctgatggccaggtgatctgggtgaacaacaccatcatcaatggagaccaggtgtggggcggccagcctgtgtacccccaggagacagatgatgcctgcatcttcccagatggcggcccctgccccagcggctcctggagccagaagaggagctttgtgtatgtgtggaagacctggggccagtactggcaggtgctgggcggccctgtgtctggcctgagcatcggcaccggccgggccatgctgggcacccacaccatggaggtgacagtgtaccacagaagaggcagccgctcctatgtgcccctggcccacagcagcagcgccttcaccatcacagaccaggtgcccttctctgtgtctgtgtcccagctgcgggccctggatggcggcaacaagcacttcctgaggaaccagcccctgacctttgccctgcagctgcatgaccccagcggctacctggccgaggccgacctgagctacacctgggactttggagacagcagcggcaccctcatcagccgggccctggtggtgacccacacctacctggagcccggccctgtgacagcccaggtggtgctgcaggccgccatccccctgaccagctgtggcagcagccctgtgcccggcaccacagatggccaccggcccacagctgaggcccccaacaccacagctggccaggtgcccaccacagaggtggtgggcaccaccccaggccaggcccccacagctgagcccagcggcaccacctctgtgcaggtgcccaccacagaggtgatcagcacagcccctgtgcagatgcccacagctgagagcacaggcatgaccccagagaaggtgcctgtgtctgaggtgatgggcaccaccctggccgagatgagcaccccagaggccaccggcatgaccccagctgaggtgtccatcgtggtgctgagcggcaccacagctgcccaggtgaccaccacagagtgggtggagaccacagcccgggagctgcccatccctgagcctgagggcccagatgccagcagcatcatgagcacagagagcatcaccggcagcctgggccccctgctggatggaacagccaccctgcggctggtgaagaggcaggtgcccctggactgtgtgctgtaccgctatggcagcttctctgtgaccctggacatcgtgcagggcattgaatctgctgagatcctgcaggccgtgcccagcggggagggagatgcctttgagctgactgtgtcctgccagggcggcctgcccaaggaggcctgcatggagatcagcagccctggctgccagcccccagcccagaggctgtgccagcctgtgctgcccagccctgcctgccagctggtgctgcaccagatcctgaagggcggcagcggcacctactgcctgaatgtgtccctggccgacaccaacagcctggccgtggtgtccacccagctgatcatgcctgtgcccggcatcctgctgaccggccaggaggccggcctgggccaggtgcccctcatcgtgggcatcctgctggtgctgatggctgtggtgctggccagcctcatctacagaagaaggctgatgaagcaggacttctctgtgccccagctgccccacagcagcagccactggctgcggctgccccgcatcttctgcagctgccccatcggggagaacagccccctgctgagcggccagcaggtgtag

SEQ ID NO: 7346 - DNA, 1746 bp, synthetic construct
  misc_feature 1..1746: note = source = /note="Description of Artificial Sequence: Synthetic coding sequence"
  source 1..1746: mol_type = other DNA
atgcagcaggacggcctgggcgtgggcaccagaaatggcagcggcaagggccgctctgtgcaccccagctggccctggtgtgccccccggcccctgcgctacttcggcagagatgcccgggcccggcgggcccagacagctgccatggccctgctggccggcggcctgagccggggcctgggcagccaccctgctgctgctggaagagatgctgtggtgtttgtgtggctgctgctgagcacctggtgcacagccccagcccgggccatccaggtgacagtgagcaacccctaccacgtggtgatcctcttccagcctgtgaccctgccctgcacctaccagatgaccagcacccccacccagcccatcgtcatctggaagtacaagagcttctgccgggacagaattgctgatgccttcagccctgcctctgtggacaaccagctgaatgcccagctggccgccggcaaccctggctacaacccctacgtggagtgccaggacagcgtgaggacagtgcgggtggtggccaccaagcagggcaatgctgtgaccctgggggactactaccagggccgccgcatcaccatcactggaaatgctgacctgacctttgaccagacagcctggggagacagcggcgtgtactactgcagcgtggtgtctgcccaggacctgcagggcaacaatgaggcctatgcagagctgattgtgctggtgtatgctgctgggaaggccgccaccagcggcgtgcccagcatctatgcccccagcacctacgcccacctgagccctgccaagaccccacctcctccagccatgatccccatgggccctgcctacaacggctacccaggcggctacccaggagatgtggacaggagcagcagcgctgggggccagggcagctatgtgcccctgctgcgggacacagacagctctgtggccagcgaggtgcgcagcggctaccgcatccaggccagccagcaggatgacagcatgagggtgctgtactacatggagaaggagctggccaactttgaccccagccggcccggcccccccagcggccgggtggagcgggccatgtctgaggtgaccagcctgcatgaagatgactggaggagccggcccagccggggccctgccctgacccccatcagagatgaggagtggggcggccacagccccaggagcccccggggctgggaccaggagcccgcccgggagcaggccggcggcggctggagggcccggcggccccgggcccggtctgtggatgccctggatgacctgaccccacccagcacagctgagagcggcagccgcagccccaccagcaatggaggccgcagccgggcctacatgccacccaggagccgcagcagagatgacctgtatgaccaggatgacagccgggacttccccaggagccgggacccccactatgatgacttccgcagccgggagcggcccccagctgaccccaggagccaccaccacaggacccgggacccccgggacaatggcagccgcagcggggacctgccctatgatggccgcctgctggaggaggccgtgaggaagaagggcagcgaggagcggcggcggccccacaaggaggaggaggaggaggcctactaccccccagcccccccaccctacagcgagacagacagccaggccagccgggagcggcggctgaagaagaacctggccctgagccgggagagcctggtggtgtag

SEQ ID NO: 7347 - DNA, 1959 bp, synthetic construct
  misc_feature 1..1959: note = source = /note="Description of Artificial Sequence: Synthetic coding sequence"
  source 1..1959: mol_type = other DNA
atgcccccacccctgcccctgctgctgctgactgtgctggtggtggccgccgcccggcccggctgtgaatttgagaggaacccagctggggagtgccacaggcctcctgctgctgacagcgccacctgtgtggacctgcagctgcggacctgcagtgatgctgcctacaaccacaccaccttccccaacctgctgcagcaccgctcctgggaggtggtggaggccagcagcgagtacatcctgctgtctgtgctgcaccagctgctggagggccagtgcaacccagacctgcggctgctgggctgtgctgtgctggccccccgctgtgagggcggctgggtgagaagaccctgccgccacatctgtgagggcctgcgggaggtgtgccagcctgcctttgatgccatcgacatggcctggccctacttcctggactgccaccgctacttcaccagagaagatgagggctgctatgaccccctggagaagctgcggggcggcctggaggctgatgaggccctgcccagcggcctgccccccaccttcatccgcttcagccaccacagctatgcccagatggtgcgggtgctgcggaggacagccagccgctgtgcccacgtggcccggacctacagcatcggccgcagctttgatggccgggagctgctggtgattgagttcagcagcaggcctggccagcacgagctgatggagcctgaggtgaagctgattggcaacatccacggcaatgaggtggccggccgggagatgctgatctacctggcccagtacctgtgcagcgagtacctgctgggcaacccccgcatccagaggctgctgaacaccacccgcatccacctgctgcccagcatgaacccagatggctatgaggtggccgctgctgagggcgccggctacaacggctggaccagcggccggcagaatgcccagaacctggacctgaacagaaacttcccagacctgaccagcgagtactaccgcctggccgagaccaggggggcccggagtgaccacatccccatcccccagcactactggtggggcaaggtggcccctgagaccaaggccatcatgaagtggatgcagaccatcccctttgtgctgagcgccagcctgcacggcggggacctggtggtgtcctacccctttgacttcagcaagcacccccaggaggagaagatgttcagccccaccccagatgagaagatgttcaagctgctgagccgggcctatgcagatgtgcaccccatgatgatggacagaagtgagaacagatgtggcggcaacttcctgaagaggggcagcatcatcaatggagctgactggtacagcttcaccggcggcatgtctgacttcaactacctgcacaccaactgctttgagatcaccgtggagctgggctgtgtgaagtttcctcctgaggaggccctgtacatcctgtggcagcacaacaaggagagcctgctgaactttgtggagaccgtgcaccggggcatcaagggcgtggtgacagacaagtttgggaagcctgtgaagaatgcccgcatctctgtgaagggcatcagacatgacatcaccacagccccagatggagactactggaggctgctgcccccaggcatccacatcgtcatcgcccaggcccctggctacgccaaggtgatcaagaaggtgatcatcccagccaggatgaagagagctggccgggtggacttcatcctgcagcccctgggcatgggccccaagaacttcatccacggcctgcggaggacaggcccccatgaccccctgggcggggccagcagcctgggggaggccacagagccagaccccctgcgggcccggcggcagcccagcgcagatggcagcaagccctggtggtggagctacttcaccagcctgagcacccaccggccccgctggctgctgaagtactag

SEQ ID NO: 7348 - DNA, 279 bp, synthetic construct
  misc_feature 1..279: note = source = /note="Description of Artificial Sequence: Synthetic coding sequence"
  source 1..279: mol_type = other DNA
atgaagctgtgtgtgacagtgctgagcctgctggtgctggtggccgccttctgcagcctggccctgagcgcccccatgggcagtgaccccccaacagcctgctgcttctcctacacagccaggaagctgcccaggaactttgtggtggactactatgagaccagcagcctgtgcagccagcctgctgtggtgggcttcctgggcaggaagggcaagcaggtgtgtgccgaccccagcgagagctgggtgcaggagtatgtgtatgacctggagctgtag

SEQ ID NO: 7349 - DNA, 249 bp, synthetic construct
  misc_feature 1..249: note = source = /note="Description of Artificial Sequence: Synthetic coding sequence"
  source 1..249: mol_type = other DNA
atgaggcagaggctgctgcccagcgtgaccagcctgctgctggtggccctgctcttccctggcagcagccaggcccggcacgtgaaccacagcgccacagaggccctgggggagctgcgggagcgggcccctggccagggcaccaacggcttccagctgctgcggcatgctgtgaagagggacctgctgccccccaggaccccaccctaccagggcaccggccagcagcaccggcagagatgtggctag

SEQ ID NO: 7350 - DNA, 411 bp, synthetic construct
  misc_feature 1..411: note = source = /note="Description of Artificial Sequence: Synthetic coding sequence"
  source 1..411: mol_type = other DNA
atggacaacgtgcagcccaagatcaagcaccggcccttctgcttctctgtgaagggccacgtgaagatgctgcggctggccctgactgtgacctccatgaccttcttcatcatcgcccaggcccctgagccctacatcgtcatcactggatttgaggtgaccgtcatcctcttcttcatcctgctgtatgtgctgcggctggaccggctgatgaagtggctgttctggcccctgctggacatcatcaacagcctggtgaccaccgtcttcatgctgattgtgtctgtgctggccctgatccctgagaccaccaccctgactgtgggcggcggcgtgtttgccctggtgacagctgtgtgctgcctggctgatggagccctgatctacaggaagctgctcttcctgaggtag

SEQ ID NO: 7351 - DNA, 1068 bp, synthetic construct
  misc_feature 1..1068: note = source = /note="Description of Artificial Sequence: Synthetic coding sequence"
  source 1..1068: mol_type = other DNA
atgcagctgaccacctgcctgcgggagaccctcttcaccggggccagccagaagaccagcctgtggtggctgggcatcgccagctttggagtgcctgagaagctgggctgtgccaacctgcccctgaacagccggcagaaggagctgtgcaagaggaagccctacctgctgcccagcatccgggagggcgcccggctgggcatccaggagtgtggcagccagttcagacatgagcgctggaactgcatgatcacagctgctgccaccacagcccccatgggcgccagccccctgtttggctatgagctgagcagcggcaccaaggagacagccttcatctatgctgtgatggctgctggcctggtgcacagcgtgaccaggagctgcagcgctggcaacatgacagagtgcagctgtgacaccaccctgcagaatggaggcagcgccagcgagggctggcactggggcggctgcagtgatgatgtgcagtatggcatgtggttcagcaggaagttcctggacttccccatcggcaacaccaccgggaaggagaacaaggtgctgctggccatgaacctgcacaacaatgaggccggccggcaggccgtggccaagctgatgtctgtggactgccgctgccacggcgtgtctggcagctgtgctgtgaagacctgctggaagaccatgagcagctttgagaagattggccacctgctgaaggacaagtatgagaacagcatccagatcagtgacaagaccaagaggaagatgagaagaagagagaaggaccagaggaagatccccatccacaaggatgacctgctgtatgtgaacaagagccccaactactgtgtggaggacaagaagctgggcatccctggcacccagggccgggagtgcaacagaaccagcgagggcgcagatggctgcaacctgctgtgctgcggccggggctacaacacccacgtggtgcgccacgtggagcgctgtgagtgcaagttcatctggtgctgctacgtgcgctgcagaagatgtgagagcatgacagatgtgcacacctgcaagtag

SEQ ID NO: 7352 - DNA, 2916 bp, synthetic construct
  misc_feature 1..2916: note = source = /note="Description of Artificial Sequence: Synthetic coding sequence"
  source 1..2916: mol_type = other DNA
atgctgcggcggcctgccccagccctggccccagctgcccggctgctgctggccggcctgctgtgtggcggcggcgtgtgggccgcccgggtgaacaagcacaagccctggctggagcccacctaccatggaattgtgacagaaaatgacaacacagtgctgctggaccccccactcatcgccctggacaaggatgcccccctgcgctttgctggggagatctgtggcttcaagatccacggccagaatgtgccctttgatgctgtggtggtggacaagagcactggagagggcgtcatccgcagcaaggagaagctggactgtgagctgcagaaggactacagcttcaccatccaggcctatgactgtgggaaaggaccagatggcaccaacgtgaagaagagccacaaggccaccgtgcacatccaggtgaatgatgtgaatgaatatgcccctgtgttcaaggagaagagctacaaggccaccgtcatcgagggcaagcagtatgacagcatcctgcgggtggaggccgtggatgctgactgcagcccccagttcagccagatctgcagctatgagatcatcaccccagatgtgcccttcaccgtggacaaggatggctacatcaagaacacagagaagctgaactacggcaaggagcaccagtacaagctgactgtgacagcctatgactgtgggaagaagagggccacagaagatgtgctggtgaagatcagcatcaagcccacctgcaccccaggctggcagggctggaacaaccgcatcgagtatgagcccggcaccggggccctggccgtgttccccaacatccacctggagacctgtgatgagcctgtggcctctgtgcaggccaccgtggagctggagaccagccacatcggcaagggctgtgaccgggacacctacagcgagaagagcctgcaccggctgtgtggggctgctgctggaacagctgagctgctgcccagccccagcggcagcctgaactggaccatgggcctgcccacagacaatggacatgacagcgaccaggtgtttgagttcaacggcacccaggccgtgcgcatcccagatggagtggtgtctgtgagccccaaggagcccttcaccatctctgtgtggatgagacatggcccctttggaaggaagaaggagaccatcctgtgcagcagtgacaagacagacatgaacagacaccactacagcctgtatgtgcacggctgccgcctcatcttcctgttccggcaggaccccagcgaggagaagaagtacagacctgctgagttccactggaagctgaaccaggtgtgtgatgaggagtggcaccactacgtgctgaatgtggagttccccagcgtgaccctgtatgtggatggcaccagccatgagcccttctctgtgacagaggactaccccctgcaccccagcaagattgagacccagctggtggtgggcgcctgctggcaggagttctctggagtggagaatgacaatgaaacagagcctgtgacagtggccagcgctggaggagacctgcacatgacccagttcttccggggcaacctggccggcctgaccctgcggagcggcaagctggccgacaagaaggtgattgactgcctgtacacctgcaaggagggcctggacctgcaggtgctggaggacagcggccggggcgtgcagatccaggcccaccccagccagctggtgctgaccctggagggggaggacctgggggagctggacaaggccatgcagcacatctcctacctgaacagccggcagttccccaccccaggcatccggcggctgaagatcaccagcaccatcaagtgcttcaatgaggccacctgcatctctgtgccccctgtggatggctacgtgatggtgctgcagcctgaggagcccaagatcagcctgagcggcgtgcaccactttgcccgggccgccagcgagtttgagagcagcgagggcgtcttcctgtttcctgagctgcgcatcatcagcaccatcacccgggaggtggagccagaaggagatggagctgaggaccccaccgtgcaggagagcctggtgtctgaggagatcgtgcatgacctggacacctgtgaggtgacagtggagggggaggagctgaaccacgagcaggagagcctggaggtggacatggcccggctgcagcagaagggcatcgaggtgagcagcagcgagctgggcatgaccttcaccggggtggacaccatggccagctatgaggaggtgctgcacctgctgcgctacagaaactggcacgcccggagcctgctggacaggaagttcaagctgatctgcagcgagctgaatggccgctacatcagcaatgagttcaaggtggaggtgaatgtcatccacacagccaaccccatggagcacgccaaccacatggccgcccagccccagtttgtgcaccctgagcacaggagctttgtggacctgagcggccacaacctggccaacccccacccctttgctgtggtgcccagcacagccaccgtggtgattgtggtgtgtgtgtccttcctggtgttcatgatcatcctgggcgtcttccgcatccgggccgcccacaggaggaccatgagggaccaggacaccgggaaggaaaatgagatggactgggatgacagcgccctgaccatcaccgtgaaccccatggagacctatgaggaccagcacagcagcgaggaggaggaggaggaggaggaggaggaggagagtgaagatggagaggaggaggatgacatcaccagcgctgagagcgagagcagcgaggaggaggagggggagcagggcgacccccagaatgccacccggcagcagcagctggagtgggatgacagcaccctgagctactag

SEQ ID NO: 7353 - DNA, 564 bp, synthetic construct
  misc_feature 1..564: note = source = /note="Description of Artificial Sequence: Synthetic coding sequence"
  source 1..564: mol_type = other DNA
atggtggccgccaccgtggccgccgcctggctgctgctgtgggccgccgcctgtgcccagcaggagcaggacttctatgacttcaaggctgtgaacatccggggcaagctggtgtccctggagaagtaccggggctctgtgtccctggtggtgaatgtggcctctgaatgtggcttcacagaccagcactaccgggccctgcagcagctgcagagggacctgggcccccaccacttcaacgtgctggccttcccctgcaaccagtttggccagcaggagccagacagcaacaaggagattgagagctttgcccggaggacctacagcgtgtccttccccatgttcagcaagattgctgtgactggaactggagcccacccagccttcaagtacctggcccagaccagcggcaaggagcccacctggaacttctggaagtacctggtggccccagatggcaaggtggtgggcgcctgggaccccaccgtgtctgtggaggaggtgcggccccagatcacagccctggtgaggaagctgatcctgctgaagcgggaggacctgtag

SEQ ID NO: 7354 - DNA, 303 bp, synthetic construct
  misc_feature 1..303: note = source = /note="Description of Artificial Sequence: Synthetic coding sequence"
  source 1..303: mol_type = other DNA
atgtggggcttcctggtgctgaaggcccgctggctggtgacccctgtgaggaccctggccacagaagctggccagaagcccagcctgcggggcctgctggatgtgggcaacatccagcaccgggccgcccgggcccggggcctgacccggggcgtcatccgggtgagcccccaggagaggagccagcagaaccagagcgcccccaagggccccacccccagcacccggcccaagcccaggaccctgggcccccaggcccacagcctggccctgcagagcgtggacctgctcttccggccctag

SEQ ID NO: 7355 - DNA, 2352 bp, synthetic construct
  misc_feature 1..2352: note = source = /note="Description of Artificial Sequence: Synthetic coding sequence"
  source 1..2352: mol_type = other DNA
atgcgctggcagtgtggcacccgcttccggggcctgcggcctgctgtggccccctggacagccctgctggccctgggcctgcccggctgggtgctggccgtgtctgccacagctgctgctgtggtgcctgagcagcacgcctctgtggccggccagcaccccctggactggctgctgacagaccggggccccttccaccgggcccaggagtatgctgacttcatggagcgctaccggcagggcttcaccacccgctaccgcatctaccgggagtttgcccgctggaaggtgaacaacctggccctggagaggaaggacttcttcagcctgcccctgcccctggcccctgagttcatccggaacatccggctgctgggcagaagacccaacctgcagcaggtgacagagaacctgatcaagaagtatggcacccacttcctgctgagcgccaccctgggcggggaggagagcctgaccatctttgtggacaagcagaagctgggcaggaagacagagaccaccggcggggccagcatcatcggcggcagcggcaacagcacagctgtgtccctggagaccctgcaccagctggccgccagctacttcatcgaccgggagagcaccctgcggcggctgcaccacatccagatcgccactggagccatcaaggtgacagagaccaggacaggccccctgggctgcagcaactatgacaacctggacagcgtgtcctctgtgctggtgcagagccctgagaacaaggtgcagctgctgggcctgcaggtgctgctgcctgagtacctgcgggagagatttgtggccgccgccctgagctacatcacctgcagcagcgagggggagctggtgtgcaaggaaaatgactgctggtgcaagtgcagccccaccttccctgagtgcaactgcccagatgctgacatccaggccatggaggacagcctgctgcagatccaggacagctgggccacccacaaccggcagtttgaggagagcgaggagttccaggccctgctgaagaggctgcctgatgaccgcttcctgaacagcacagccatcagccagttctgggccatggacaccagcctgcagcaccgctaccagcagctgggcgccggcctgaaggtgctcttcaagaagacccaccgcatcctgcggcggctcttcaacctgtgcaagcgctgccaccggcagccccgcttccggctgcccaaggagaggagcctgagctactggtggaaccgcatccagagcctgctgtactgtggggagagcaccttccctggcaccttcctggagcagagccacagctgcacctgcccctatgaccagagcagctgccagggccccatcccctgtgccctgggggagggccctgcctgtgcccactgtgccccagacaacagcacccgctgtggcagctgcaaccctggctacgtgctggcccagggcctgtgcaggcctgaggtggccgagagcctggagaacttcctgggcctggagacagacctgcaggacctggagctgaagtacctgctgcagaagcaggacagcagaattgaggtgcacagcatcttcatcagcaatgacatgaggctgggctcctggtttgaccccagctggaggaagaggatgctgctgaccctgaagagcaacaagtacaagccaggcctggtgcacgtgatgctggccctgagcctgcagatctgcctgaccaagaacagcaccctggagcctgtgatggccatctacgtgaacccctttggaggcagccacagcgagagctggttcatgcctgtgaatgaaggcagcttcccagactgggagaggaccaacgtggatgctgctgcccagtgccagaactggaccatcaccctgggcaaccgctggaagaccttctttgaaacagtgcacgtgtacctgcggagccgcatcaagagcctggatgacagcagcaatgagaccatctactatgagcccctggagatgacagaccccagcaagaacctgggctacatgaagatcaacaccctgcaggtgtttggctacagcctgccctttgatcctgatgccatccgggacctgatcctgcagctggactacccctacacccagggcagccaggacagcgccctgctgcagctgattgagctgcgggacagagtgaaccagctgagccccccaggcaaggtgcggctggacctcttcagctgcctgctgcggcaccggctgaagctggccaacaatgaggtgggccgcatccagagcagcctgcgggccttcaacagcaagctgcccaaccctgtggagtatgagaccgggaagctgtgcagctag

SEQ ID NO: 7356 - DNA, 2016 bp, synthetic construct
  misc_feature 1..2016: note = source = /note="Description of Artificial Sequence: Synthetic coding sequence"
  source 1..2016: mol_type = other DNA
atggcccagctgttcctgcccctgctggccgccctggtgctggcccaggccccagctgccctggctgatgtgctggagggggacagcagtgaagatcgggccttccgggtgagaattgctggagatgcccccctgcagggcgtgctgggcggggccctgaccatcccctgccacgtgcactacctgcggcccccacccagccggcgggctgtgctgggcagcccccgggtgaagtggaccttcctgagccggggccgggaggccgaggtgctggtggcccggggcgtgcgggtgaaggtgaatgaggcctaccgcttccgggtggccctgcctgcctacccagccagcctgacagatgtgtccctggccctgtctgagctgcggcccaatgacagcggcatctaccgctgtgaggtgcagcacggcattgatgacagcagtgatgctgtggaggtgaaggtgaagggcgtggtgttcctgtaccgggagggcagcgcccgctatgccttctccttcagcggggcccaggaggcctgtgcccgcatcggggcccacatcgccaccccagagcagctgtatgctgcctacctgggcggctatgagcagtgtgatgctggctggctgagtgaccagacagtgcgctaccccatccagaccccccgggaggcctgctatggagacatggatggcttccctggggtgagaaattatggagtggtggaccctgatgacctgtatgatgtgtactgctacgccgaggacctgaatggagagctgttcctgggggaccccccagagaagctgaccctggaggaggcccgggcctactgccaggagagaggagctgagatcgccaccaccggccagctgtatgctgcctgggatggcggcctggaccactgcagccctggctggctggctgatggctctgtgcgctaccccatcgtgacccccagccagagatgtggcggcggcctgcccggggtgaagaccctcttcctgttccccaaccagacaggcttccccaacaagcacagccgcttcaacgtgtactgcttccgggacagcgcccagcccagcgccatccctgaggccagcaacccagccagcaacccagccagtgatggcctggaggccatcgtgacagtgacagagaccctggaggagctgcagctgccccaggaggccacagaaagtgagagcagaggagccatctacagcatccccatcatggaggatggcggcggcggcagcagcaccccagaggaccctgctgaggcccccaggaccctgctggagtttgagacccagagcatggtgcccccaacaggcttcagcgaggaggagggcaaggccctggaggaggaggagaagtatgaagatgaggaggagaaggaggaggaggaggaggaggaggaggtggaggatgaggccctgtgggcctggcccagcgagctgagcagccctggccctgaggccagcctgcccacagagcctgctgcccaggaggagagcctgagccaggccccagcccgggctgtgctgcagcccggggccagccccctgcctgatggagagagcgaggccagccggcccccccgggtgcacggccccccaacagagaccctgcccaccccccgggagaggaacctggccagccccagccccagcaccctggtggaggcccgggaggtgggggaggccactggaggccctgagctgtctggagtgcccagaggagagagcgaggagaccggcagcagcgagggcgcccccagcctgctgcctgccacccgggcccctgagggcacccgggagctggaggcccccagcgaggacaacagcggccgcacagccccagctggcacctctgtgcaggcccagcctgtgctgcccacagattctgccagcagaggaggagtggccgtggtgcctgccagcggcaacagcgcccagggcagcacagccctgagcatcctgctgctcttcttccccctgcagctgtgggtgacctag

SEQ ID NO: 7357 - DNA, 375 bp, synthetic construct
  misc_feature 1..375: note = source = /note="Description of Artificial Sequence: Synthetic coding sequence"
  source 1..375: mol_type = other DNA
atgtacaagctggccagctgctgcctgctcttcatcggcttcctgaaccccctgctgagcctgcccctgctggacagccgggagatctccttccagctgagcgcccctcatgaagatgcccggctgaccccagaggagctggagcgggccagcctgctgcagatcctgcctgagatgctgggcgctgagcggggggacatcctgaggaaggctgacagcagcaccaacatcttcaacccccggggcaacctgaggaagttccaggacttcagcggccaggaccccaacatcctgctgagccacctgctggcccgcatctggaagccctacaagaagcgggagaccccagactgcttctggaagtactgtgtgtag

SEQ ID NO: 7358 - DNA, 1326 bp, synthetic construct
  misc_feature 1..1326: note = source = /note="Description of Artificial Sequence: Synthetic coding sequence"
  source 1..1326: mol_type = other DNA
atggagtttgaatttgaccggctgcgggccttccaggccatgcaggtgcactgcaacaacatgcacaccctgggcgcccggctgcctggaggagtggagtgccgcttcagaagaggccctgccatggcctgggagggggagcccatgaggcacaacctgggcggcaacctgggggacccccgggcccgggctgtgtctgtgcccctgggcggccgggtggcccgcttcctgcagtgccgcttcctgtttgctggcccctggctgctcttcagcgagatctccttcatcagtgatgtggtgaacaacagcagccctgccctgggcggcaccttccccccagccccctggtggcccccaggccccccacccaccaacttcagcagcctggagctggagccccggggccagcagcctgtggccaaggccgagggcagccccacagccatcctgattggctgcctggtggccatcatcctgctgctgctgctgatcatcgccctgatgctgtggaggctgcactggaggcggctgctgagcaaggtgctggagagccaccccaggaccaggagccctggcctggtgggcatccggcccacccccctgcctgtgagccccatggccctgcgctgctgcagccccatccagcccacagccagcttctggcccctgacccctgtgcccctggaggcccgggccccaccccaccccccaggccccaacccccccaccccccggggcgtgactggaggcaacacctatgctgtgcctgccctgcccccaggagctgtgggagatggccccccccgggtggacttccccaggagccggctgcgcttcaaggagaagctgggggagggccagtttggagaggtgcacctgtgtgaggtggacagcccccaggacctggtgtccctggacttccccctgaatgtgaggaagggccaccccctgctggtggccgtgaagatcctgcggccagatgccaccaagaatgccagaaatgacttcctgaaggaggtgaagatcatgagccggctgaaggaccccaacatcatccggctgctgggcgtgtgtgtgcaggatgaccccctgtgcatgatcacagactacatggagaatggagacctgaaccagttcctgagcgcccaccagctggaggacaaggctgctgagggcgcccctggagatggccaggccgcccagggccccaccatctcctaccccatgctgctgcacgtggccgcccagatcgccagcggcatgagatacctggccaccctgaactttgtgcacttctggggcgagcggcaccgcttcctgcactag

SEQ ID NO: 7359 - DNA, 1950 bp, synthetic construct
  misc_feature 1..1950: note = source = /note="Description of Artificial Sequence: Synthetic coding sequence"
  source 1..1950: mol_type = other DNA
atgcagcaggacggcctgggcgtgggcaccagaaatggcagcggcaagggccgctctgtgcaccccagctggccctggtgtgccccccggcccctgcgctacttcggcagagatgcccgggcccggcgggcccagacagctgccatggccctgctggccggcggcctgagccggggcctgggcagccaccctgctgctgctggaagagatgctgtggtgtttgtgtggctgctgctgagcacctggtgcacagccccagcccgggccatccaggtgacagtgagcaacccctaccacgtggtgatcctcttccagcctgtgaccctgccctgcacctaccagatgaccagcacccccacccagcccatcgtcatctggaagtacaagagcttctgccgggacagaattgctgatgccttcagccctgcctctgtggacaaccagctgaatgcccagctggccgccggcaaccctggctacaacccctacgtggagtgccaggacagcgtgaggacagtgcgggtggtggccaccaagcagggcaatgctgtgaccctgggggactactaccagggccgccgcatcaccatcactggaaatgctgacctgacctttgaccagacagcctggggagacagcggcgtgtactactgcagcgtggtgtctgcccaggacctgcagggcaacaatgaggcctatgcagagctgattgtgctgggccgcaccagcggcgtggccgagctgctgcccggcttccaggccggccccatcgaggactggctgtttgtggtggtggtgtgcctggccgccttcctgatcttcctgctgctgggcatctgctggtgccagtgctgcccccacacctgctgctgctacgtgcgctgcccctgctgcccagacaagtgctgctgcccagaggccctgtatgctgctgggaaggccgccaccagcggcgtgcccagcatctatgcccccagcacctacgcccacctgagccctgccaagaccccacctcctccagccatgatccccatgggccctgcctacaacggctacccaggcggctacccaggagatgtggacaggagcagcagcgctgggggccagggcagctatgtgcccctgctgcgggacacagacagctctgtggccagcgaggtgcgcagcggctaccgcatccaggccagccagcaggatgacagcatgagggtgctgtactacatggagaaggagctggccaactttgaccccagccggcccggcccccccagcggccgggtggagcgggccatgtctgaggtgaccagcctgcatgaagatgactggaggagccggcccagccggggccctgccctgacccccatcagagatgaggagtggggcggccacagccccaggagcccccggggctgggaccaggagcccgcccgggagcaggccggcggcggctggagggcccggcggccccgggcccggtctgtggatgccctggatgacctgaccccacccagcacagctgagagcggcagccgcagccccaccagcaatggaggccgcagccgggcctacatgccacccaggagccgcagcagagatgacctgtatgaccaggatgacagccgggacttccccaggagccgggacccccactatgatgacttccgcagccgggagcggcccccagctgaccccaggagccaccaccacaggacccgggacccccgggacaatggcagccgcagcggggacctgccctatgatggccgcctgctggaggaggccgtgaggaagaagggcagcgaggagcggcggcggccccacaaggaggaggaggaggaggcctactaccccccagcccccccaccctacagcgagacagacagccaggccagccgggagcggcggctgaagaagaacctggccctgagccgggagagcctggtggtgtag

SEQ ID NO: 7360 - DNA, 402 bp, synthetic construct
  misc_feature 1..402: note = source = /note="Description of Artificial Sequence: Synthetic coding sequence"
  source 1..402: mol_type = other DNA
atgtctgagcgggtggagaggaactggagcactggaggctggctgctggccctgtgcctggcctggctgtggacccacctgaccctggccgccctgcagcccccaacagccaccgtgctggtgcagcagggcacctgtgaggtgattgctgcccaccgctgctgcaacagaaaccgcatcgaggagaggagccagacagtgaagtgcagctgcttcagcggccaggtggccggcaccacccgggccaagcccagctgtgtggatgccagcatcgtgctgcagcgctggtggtgccagatggagccctgcctgcctggagaggagtgcaaggtgctgcctgacctgagcggctggagctgcagcagcggccacaaggtgaagaccaccaaggtgaccaggtag

SEQ ID NO: 7361 - DNA, 699 bp, synthetic construct
  misc_feature 1..699: note = source = /note="Description of Artificial Sequence: Synthetic coding sequence"
  source 1..699: mol_type = other DNA
atggtggccgccaacacccgggcccctgaggacacccgggccccagctggccccaagcccagcagctgtgagtgggccgtgtgctgggccccagcccgctgccgcatcagcgccacagcctgtggcaacagctgggacaggcctgctggccgcacccagctgctgtggaccccagctgcccccacagccatggccgaggtgggccctggccacaccccagcccaccccagccagggcgctgtgccccccagcagagctgctgctgagccccacctgaagcccagccccagcgagctgcagacagctggccctgctgccaccatcccagcccggctgtgcaccaggaagccccggctggtgtacacccagtgctggtacgtgaaggagcccaagcaccctgagatcgtgaccccctggggcacagctgcccggcacagctggaggcagcaccagatgctgagcgccagcgagcggcgctgcctgcccagagatgtggagcagaagctgggccctgagcacacaggcccctgcctggatgagcagggccgggaggccgagctggcccggagcggccccagcgctgctggccctgtgcggctgaagccaggcctggtgcccggcctcttcctgctgagctgcaccaccagccccagcacctgcctgcctgtgggccaggagggggagcggggcatgctgtag

SEQ ID NO: 7362 - DNA, 711 bp, synthetic construct
  misc_feature 1..711: note = source = /note="Description of Artificial Sequence: Synthetic coding sequence"
  source 1..711: mol_type = other DNA
atgtgtgtgacctaccacaatggaacaggctactgcaagtgcccagagggcttcctgggggagtactgccagcaccgggacccctgtgagaagaaccgctgccagaatggaggcacctgtgtggcccaggccatgctgggcaaggccacctgccgctgtgccagcggcttcaccggggaggactgccagtacagcaccagccacccctgctttgtgtcccggccctgcctgaatggaggcacctgccacatgctgagccgggacacctatgaatgtacctgccaggtgggcttcaccgggaaggagtgccagtggacagatgcctgcctgagccacccctgtgccaacggcagcacctgcaccaccgtggccaaccagttcagctgcaagtgcctgaccggcttcaccggccagaagtgtgaaacagatgtgaatgaatgtgacatccctggccactgccagcacggcggcacctgcctgaacctgcccggcagctaccagtgccagtgcctgcagggcttcaccggccagtactgtgacagcctgtatgtgccctgtgcccccagcccctgtgtgaatggaggcacctgccggcagacaggagacttcacctttgagtgcaactgcctgcctgagaccgtgagaagaggaacagagctgtgggagcgggaccgggaggtgtggaatggcaaggagcatgatgaaaattag

SEQ ID NO: 7363 - DNA, 204 bp, synthetic construct
  misc_feature 1..204: note = source = /note="Description of Artificial Sequence: Synthetic coding sequence"
  source 1..204: mol_type = other DNA
atggacaacgtgcagcccaagatcaagcaccggcccttctgcttctctgtgaagggccacgtgaagatgctgcggctggtgtttgccctggtgacagctgtgtgctgcctggctgatggagccctgatctacaggaagctgctcttcaaccccagcggcccctaccagaagaagcctgtgcatgagaagaaggaggtgctgtag

SEQ ID NO: 7364 - DNA, 75 bp, synthetic construct
  misc_feature 1..75: note = source = /note="Description of Artificial Sequence: Synthetic coding sequence"
  source 1..75: mol_type = other DNA
atgctggtggatggccccagcgagaggcctgccctgtgcttcctgctgctggccgtggccatgtccttcttctag

SEQ ID NO: 7365 - DNA, 3345 bp, synthetic construct
  misc_feature 1..3345: note = source = /note="Description of Artificial Sequence: Synthetic coding sequence"
  source 1..3345: mol_type = other DNA
atgctggccagcagcagccgcatccgggccgcctggacccgggccctgctgctgcccctgctgctggccggccctgtgggctgcctgagccggcaggagctgttcccctttggacctggccagggcgacctggagctggaggatggagatgactttgtgtccccagccctggagctgagcggggccctgcgcttctatgacagaagtgacattgatgctgtgtatgtgaccaccaacggcatcatcgccaccagcgagcccccagccaaggagagccaccctggcctcttcccccccacctttggagctgtggcccccttcctggccgacctggacaccacagatggcctgggcaaggtgtactaccgggaggacctgagccccagcatcacccagagagctgctgaatgtgtgcaccggggcttccctgagatctccttccagcccagcagcgctgtggtggtgacctgggagagcgtggccccctaccagggccccagccgggaccctgaccagaagggcaagaggaacaccttccaggccgtgctggccagcagtgacagcagcagctatgccatcttcctgtacccagaagatggcctgcagttccacaccaccttcagcaagaaggagaacaaccaggtgcctgctgtggtggccttcagccagggctctgtgggcttcctgtggaagagcaatggagcctacaacatctttgccaatgaccgggagagcgtggagaacctggccaagagcagcaacagcggccagcagggcgtgtgggtgtttgaaattggcagccctgccaccaccaacggggtggtgcctgcagatgtgatcctgggcacagaagatggagcagaatatgatgatgaagatgaggactatgacctggccaccacccggctgggcctggaggatgtgggcaccacccccttctcctacaaggccctgcggcggggcggcgctgacacctacagcgtgcccagcgtgctgagccccaggagagctgccacagagcggcccctgggccccccaacagagaggaccaggagcttccagctggccgtggagaccttccaccagcagcacccccaggtgattgatgtggatgaggtggaggagaccggggtggtgttctcctacaacacagacagccggcagacctgtgccaacaacagacaccagtgcagcgtgcatgctgagtgccgggactatgccaccggcttctgctgcagctgtgtggccggctacacaggaaatggccggcagtgtgtggccgagggcagcccccagagggtgaatggcaaggtgaagggccgcatctttgtgggcagcagccaggtgcccatcgtgtttgagaacacagacctgcacagctatgtggtgatgaaccacggccgcagctacacagccatcagcaccatccctgagaccgtgggctacagcctgctgcccctggcccctgtgggcggcatcatcggctggatgtttgctgtggagcaggacggcttcaagaatggcttcagcatcaccggcggggagttcacccggcaggccgaggtgacctttgtgggccaccctggcaacctggtgatcaagcagcgcttcagcggcattgatgaacatggccacctgaccatcgacacagagctggagggccgggtgccccagatccccttcggcagctctgtgcacatcgagccctacacagagctgtaccactacagcaccagcgtcatcaccagcagcagcacccgggagtacacagtgacagagcctgagagagatggagccagccccagccgcatctacacctaccagtggaggcagaccatcaccttccaggagtgtgtgcatgatgacagcaggcctgccctgcccagcacccagcagctgtctgtggacagcgtgtttgtgctgtacaaccaggaggagaagatcctgcgctatgccctgagcaacagcatcggccctgtgcgggagggcagcccagatgccctgcagaacccctgctacatcggcacccacggctgtgacaccaatgctgcctgcaggcctggccccaggacccagttcacctgtgagtgcagcatcggcttcagaggagatggccgcacctgctatgaggtggagaagacccgctgccagcacgagcgggagcacatcctgggcgctgctggggccacagacccccagaggcccatccccccaggcctgtttgtgcctgaatgtgatgcccacggccactacgcccccacccagtgccacggcagcacaggctactgctggtgtgtggacagagatggccgggaggtggagggcaccaggacccggcccggcatgaccccaccctgcctgagcacagtggccccacccatccaccagggccctgctgtgcccacagctgtgatccccctgcccccaggcacccacctgctgtttgcccagacaggcaagattgagcggctgcccctggagggcaacaccatgaggaagacagaggccaaggccttcctgcacgtgcctgccaaggtgatcatcggcctggcctttgactgtgtggacaagatggtgtactggacagacatcacagagcccagcatcggccgggccagcctgcatggaggagagcccaccaccatcatccggcaggacctgggcagccctgagggcattgctgtggaccacctgggcaggaacatcttctggacagacagcaacctggaccgcatcgaggtggccaagctggatggcacccagaggagagtgctgtttgaaacagacctggtgaacccccggggcatcgtgacagacagcgtgcggggcaacctgtactggacagactggaacagagacaaccccaagattgagaccagctacatggatggcaccaacagacgcatcctggtgcaggatgacctgggcctgcccaacggcctgacctttgatgccttcagcagccagctgtgctgggtggatgctggcaccaacagagcagaatgtctgaaccccagccagcccagcaggaggaaggccctggagggcctgcagtacccctttgctgtgaccagctatggcaagaacctgtacttcacagactggaagatgaacagcgtggtggccctggacctggccatcagcaaggagacagatgccttccagccccacaagcagacccggctgtatggcatcaccacagccctgagccagtgcccccagggccacaactactgcagcgtgaacaatggaggctgcacccacctgtgcctggccaccccaggcagcaggacctgccgctgcccagacaacaccctgggcgtggactgcatcgagcagaagtag

SEQ ID NO: 7366 - DNA, 2172 bp, synthetic construct
  misc_feature 1..2172: note = source = /note="Description of Artificial Sequence: Synthetic coding sequence"
  source 1..2172: mol_type = other DNA
atgggcagccgctgtgccctggccctggccgtgctgagcgccctgctgtgccaggtgtggagcagcggcgtgtttgagctgaagctgcaggagtttgtgaacaagaagggcctgctgggcaacagaaactgctgccggggcggggccggccccccaccctgtgcctgcaggaccttcttccgggtgtgcctgaagcactaccaggcctctgtgtccccagagcccccctgcacctacggcagcgctgtgacccctgtgctgggcgtggacagcttcagcctgcctgatggcggcggcgctgacagcgccttcagcaaccccatccgcttccccttcggcttcacctggccaggcaccttcagcctcatcatcgaggccctgcacacagacagcccagatgacctggccacagagaaccctgagcggctcatcagccggctggccacccagaggcacctgactgtgggggaggagtggagccaggacctgcacagcagcggccgcacagacctgaagtacagctacagatttgtgtgtgatgagcactactacggggagggctgcagcgtcttctgccggcccagagatgatgccttcggccacttcacctgtggggagcggggggagaaggtgtgcaaccctggctggaagggcccctactgcacagagcccatctgcctgcccggctgtgatgagcagcacggcttctgtgacaagccaggagagtgcaagtgccgggtgggctggcagggccgctactgtgatgagtgcatccgctacccaggctgcctgcacggcacctgccagcagccctggcagtgcaactgccaggagggctggggcggcctcttctgcaaccaggacctgaactactgcacccaccacaagccctgcaagaatggagccacctgcaccaacacaggccagggcagctacacctgcagctgccggcccggctacacaggagccacctgtgagctgggcattgatgaatgtgaccccagcccctgcaagaatggaggcagctgcacagacctggagaacagctacagctgcacctgccccccaggcttctacggcaagatctgtgagctgagcgccatgacctgtgctgatggcccctgcttcaatggaggccgctgcagcgacagcccagatggcggctacagctgccgctgccctgtgggctacagcggcttcaactgtgagaagaagattgactactgcagcagcagcccctgcagcaatggagccaagtgtgtggacctgggagatgcctacctgtgccgctgccaggccggcttcagcggccgccactgtgatgacaacgtggatgactgtgccagcagcccctgtgccaacggcggcacctgcagagatggagtgaatgacttcagctgcacctgccccccaggctacacaggcaggaactgcagcgcccctgtgagccgctgtgaacatgccccctgccacaacggggccacctgccacgagcggggccacagatatgtgtgtgaatgtgcccggggctatggaggccccaactgccagttcctgctgcctgagctgcccccaggccctgctgtggtggacctgacagagaagctggagggccagggcggccccttcccctgggtggccgtgtgtgccggggtcatcctggtgctgatgctgctgctgggctgtgccgctgtggtggtgtgtgtgcggctgcggctgcagaagcaccggcccccagctgacccctgccgcggggagacagagaccatgaacaacctggccaactgccagcgggagaaggacatctctgtgtccatcattggagccacccagatcaagaacaccaacaagaaggctgacttccacggggaccacagcgctgacaagaatggcttcaaggcccgctacccagctgtggactacaacctggtgcaggacctgaagggagatgacacagctgtgagagatgcccacagcaagagggacaccaagtgccagccccagggcagcagtggagaggagaagggcacccccaccaccctgcggggcggggaggccagcgagaggaagaggccagacagcggctgcagcaccagcaaggacaccaagtaccagagcgtgtatgtgatcagcgaggagaaggatgaatgtgtgattgccacagaggtgtag

SEQ ID NO: 7367 - DNA, 981 bp, synthetic construct
  misc_feature 1..981: note = source = /note="Description of Artificial Sequence: Synthetic coding sequence"
  source 1..981: mol_type = other DNA
atggccgccccagcctctgtgatgggccccctgggccccagcgccctgggcctgctgctgctgctgctggtggtggccccaccccgggtggccgccctggtgcaccggcagcctgagaaccagggcatcagcctgaccggctctgtggcctgtggccggcccagcatggagggcaagatcctgggcggcgtgcctgcccctgagaggaagtggccctggcaggtgtctgtgcactacgccggcctgcacgtgtgtggcggcagcatcctgaatgagtactgggtgctgtctgctgcccactgcttccaccgggacaagaacatcaagatctatgacatgtatgtgggcctggtgaacctgcgggtggccggcaaccacacccagtggtatgaggtgaacagagtcatcctgcaccccacctatgagatgtaccaccccatcggaggagatgtggccctggtgcagctgaagacccgcatcgtgttttctgagagcgtgctgcctgtgtgcctggccaccccagaggtgaacctgaccagcgccaactgctgggccaccggctggggcctggtgtccaagcagggcgagaccagtgatgagctgcaggagatgcagctgcccctcatcctggagccctggtgccacctgctgtatggccacatgagctacatcatgccagacatgctgtgtgccggggacatcctgaatgccaagacagtgtgtgagggggacagcggcggccccctggtgtgtgagttcaacagatcctggctgcagatcggcatcgtgtcctggggccggggctgcagcaaccccctgtacccaggagtgtatgcctctgtgtcctacttcagcaagtggatctgtgacaacatcgagatcacccccaccccagcccagcctgccccagccctgagccctgccctgggccccaccctgtctgtgctgatggccatgctggccggctggagcgtgctgtag

SEQ ID NO: 7368 - DNA, 1596 bp, synthetic construct
  misc_feature 1..1596: note = source = /note="Description of Artificial Sequence: Synthetic coding sequence"
  source 1..1596: mol_type = other DNA
atgagcctggccgcctactgtgtgatctgctgccgccgcatcggcaccagcaccagcccccccaagagcggcacccactggagggacatccggaacatcatcaagttcaccggcagcctcatcctgggcggcagcctcttcctgacctatgaggtgctggccctgaagaaggctgtgaccctggacacccaggtggtggagcgggagaagatgaagagctacatctacgtgcacacagtgtccctggacaagggggagaaccacggcatcgcctggcaggccaggaaggagctgcacaaggctgtgaggaaggtgctggccaccagcgccaagatcctgaggaacccctttgctgaccccttcagcacagtggacattgaagatcatgaatgtgctgtgtggctgctgctgaggaagagcaagagtgatgacaagaccacccggctggaggccgtgcgggagatgtctgagacccaccactggcatgactaccagtaccgcatcatcgcccaggcctgtgaccccaagaccctgattggcctggcccggtctgaggagagtgacctgcgcttcttcctgctgcccccacccctgcccagcctgaaggaggacagcagcacagaggaggagctgcggcagctgctggccagcctgccccagacagagctggatgagtgcatccagtacttcaccagcctggccctgtctgagagcagccagagcctggccgcccagaagggcggcctgtggtgcttcggcggcaatggcctgccctatgcagagagctttggagaggtgcccagcgccaccgtggagatgttctgcctggaggccatcgtgaagcacagcgagatcagcacccactgtgacaagattgaggccaatggaggcctgcagctgctgcagaggctgtaccgcctgcacaaggactgccccaaggtgcagaggaacatcatgagggtcatcggcaacatggccctgaatgagcacctgcacagcagcatcgtgcgcagcggctgggtgtccatcatggccgaggccatgaagagcccccacatcatggagagcagccatgctgcccgcatcctggccaacctggaccgggagaccgtgcaggagaagtaccaggatggagtgtatgtgctgcacccccagtaccgcaccagccagcccatcaaggcagatgtgctcttcatccacggcctgatgggcgccgccttcaagacctggaggcagcaggacagcgagcaggccgtcatcgagaagcccatggaggatgaagatcgctacaccacctgctggcccaagacctggctggccaaggactgcccagccctgcgcatcatctctgtggagtatgacaccagcctgagtgactggagggcccgctgccccatggagcggcgcagcctgctgagcatcagcagcggcatcgtggagggcctggagagccccctgcacagcgaggccaccaacttcctgggcagcagcgagctgctggtgctgggcatcggccagtggtttggctaccacatcgcctgggaggtgttcctgagcaagcgctgctgctggaagcccctgcggagccagaagtag

SEQ ID NO: 7369 - DNA, 1596 bp, synthetic construct; identical to SEQ ID NO: 7368
  misc_feature 1..1596: note = source = /note="Description of Artificial Sequence: Synthetic coding sequence"
  source 1..1596: mol_type = other DNA

SEQ ID NO: 7370 - DNA, 1965 bp, synthetic construct
  misc_feature 1..1965: note = source = /note="Description of Artificial Sequence: Synthetic coding sequence"
  source 1..1965: mol_type = other DNA
atgagcctggccgcctactgtgtgatctgctgccgccgcatcggcaccagcaccagcccccccaagagcggcacccactggagggacatccggaacatcatcaagttcaccggcagcctcatcctgggcggcagcctcttcctgacctatgaggtgctggccctgaagaaggctgtgaccctggacacccaggtggtggagcgggagaagatgaagagctacatctacgtgcacacagtgtccctggacaagggggagaaccacggcatcgcctggcaggccaggaaggagctgcacaaggctgtgaggaaggtgctggccaccagcgccaagatcctgaggaacccctttgctgaccccttcagcacagtggacattgaagatcatgaatgtgctgtgtggctgctgctgaggaagagcaagagtgatgacaagaccacccggctggaggccgtgcgggagatgtctgagacccaccactggcatgactaccagtaccgcatcatcgcccaggcctgtgaccccaagaccctgattggcctggcccggtctgaggagagtgacctgcgcttcttcctgctgcccccacccctgcccagcctgaaggaggacagcagcacagaggaggagctgcggcagctgctggccagcctgccccagacagagctggatgagtgcatccagtacttcaccagcctggccctgtctgagagcagccagagcctggccgcccagaagggcggcctgtggtgcttcggcggcaatggcctgccctatgcagagagctttggagaggtgcccagcgccaccgtggagatgttctgcctggaggccatcgtgaagcacagcgagatcagcacccactgtgacaagattgaggccaatggaggcctgcagctgctgcagaggctgtaccgcctgcacaaggactgccccaaggtgcagaggaacatcatgagggtcatcggcaacatggccctgaatgagcacctgcacagcagcatcgtgcgcagcggctgggtgtccatcatggccgaggccatgaagagcccccacatcatggagagcagccatgctgcccgcatcctggccaacctggaccgggagaccgtgcaggagaagtaccaggatggagtgtatgtgctgcacccccagtaccgcaccagccagcccatcaaggcagatgtgctcttcatccacggcctgatgggcgccgccttcaagacctggaggcagcaggacagcgagcaggccgtcatcgagaagcccatggaggatgaagatcgctacaccacctgctggcccaagacctggctggccaaggactgcccagccctgcgcatcatctctgtggagtatgacaccagcctgagtgactggagggcccgctgccccatggagaggaagagcatcgccttccgcagcaatgagctgctgaggaagctgcgggctgctggggtgggggacaggcctgtggtgtggatcagccacagcatgggcggcctgctggtgaagaagatgctgctggaggccagcaccaagccagagatgagcaccgtcatcaacaacacccggggcatcatcttctacagcgtgccccaccacggcagccggctggccgagtacagcgtgaacatccgctacctgctcttccccagcctggaggtgaaggagctgagcaaggacagccctgccctgaagaccctgcaggatgacttcctggagtttgccaaggacaagaacttccaggtgctgaactttgtggagaccctgcccacctacatcggctccatgatcaagctgcacgtggtgcctgtggagagcgctgacctgggcattggagacctgatccctgtggatgtgaaccacctgaacatctgcaagcccaagaagaaggatgccttcctgtaccagaggaccctgcagttcatccgggaggccctggccaaggacctggagaactag

SEQ ID NO: 7371 - DNA, 1509 bp, synthetic construct
  misc_feature 1..1509: note = source = /note="Description of Artificial Sequence: Synthetic coding sequence"
  source 1..1509: mol_type = other DNA
atggcccagagatgtgtgtgtgtgctggccctggtggccatgctgctgctggtgttccccaccgtgagccgctccatgggccccaggtctggagagcaccagagggccagccgcatccccagccagttcagcaaggaggagcgggtggccatgaaggaggccctgaagggggccatccagatccccaccgtgaccttcagcagcgagaagagcaacaccacagccctggccgagtttgggaagtacatccacaaggtgttccccaccgtggtgtccaccagcttcatccagcacgaggtggtggaggagtacagccacctgttcaccatccagggcagtgaccccagcctgcagccctacctgctgatggcccactttgatgtggtgcctgcccctgaggagggctgggaggtgccccccttcagcggcctggagagagatggcatcatctacggccggggcaccctggatgacaagaacagcgtgatggccctgctgcaggccctggagctgctgctgatcaggaagtacatcccccggcgctccttcttcatcagcctgggccatgatgaggagagcagcggcaccggggcccagaggatcagcgccctgctgcagagcagaggagtgcagctggccttcatcgtggatgaaggaggcttcatcctggatgacttcatccccaacttcaagaagcccatcgccctgattgctgtgtctgagaagggctccatgaacctgatgctgcaggtgaacatgaccagcggccacagcagcgccccacccaaggagaccagcatcggcatcctggccgctgctgtgtcccggctggagcagacccccatgcccatcatcttcggcagcggcaccgtggtgacagtgctgcagcagctggccaatgagttccccttccctgtgaacatcatcctgagcaacccctggctgtttgagcccctcatcagccgcttcatggagaggaaccccctgaccaatgccatcatccgcaccaccacagccctgaccatcttcaaggccggcgtgaagttcaacgtcatcccccctgtggcccaggccaccgtgaacttccgcatccaccctggccagacagtgcaggaggtgctggagctgaccaagaacatcgtggccgacaacagagtgcagttccacgtgctgagcgcctttgaccccctgcctgtgagccccagtgatgacaaggccctgggctaccagctgctgcggcagacagtgcagagcgtcttccctgaggtgaacatcacagcccctgtgaccagcatcggcaacacagacagccgcttcttcaccaacctgaccaccggcatctaccgcttctaccccatctacatccagcctgaggacttcaagaggatccacggcgtgaatgagaagatctctgtgcaggcctatgagacccaggtgaagttcatctttgagctgatccagaatgctgacacagaccaggagcctgtgagccacctgcacaagctgtag

SEQ ID NO: 7372 - DNA, 999 bp, synthetic construct
  misc_feature 1..999: note = source = /note="Description of Artificial Sequence: Synthetic coding sequence"
  source 1..999: mol_type = other DNA
atgaggctgctggccttcctgagcctgctggccctggtgctgcaggagactggaacagccagcctgcccaggaaggagaggaagagaagagaggagcagatgccccgggagggggacagctttgaggtgctgcccctgagaaatgatgtgctgaacccagacaactacggggaggtgattgacctgagcaactatgaggagctgacagattatggagaccagctgcctgaggtgaaggtgaccagcctggccccagccaccagcatcagccctgccaagagcaccacagcccctggcacccccagcagcaaccccaccatgacccggcccaccacagctggcctgctgctgagcagccagcccaaccacggcctgcccacctgcctggtgtgtgtgtgcctgggcagctctgtgtactgtgatgacatcgacctggaggacatcccccccctgcccaggagaacagcctacctgtatgcccgcttcaaccgcatcagccgcatccgggcagaggacttcaagggcctgaccaagctgaagagaattgacctgagcaacaacctgatcagcagcattgacaatgatgccttccggctgctgcacgccctgcaggacctgatcctgcctgagaaccagctggaggccctgcctgtgctgcccagcggcatcgagttcctggatgtgcggctgaaccggctgcagagcagcggcatccagcctgctgccttccgggccatggagaagctgcagttcctgtacctgagtgacaacctgctggacagcatccctggccccctgcccctgagcctgcggtctgtgcacctgcagaacaacctgattgagaccatgcagagagatgtgttctgtgaccctgaggagcacaagcacacccggcggcagctggaggacatccggctggatggcaaccccatcaacctgagcctcttccccagcgcctacttctgcctgccccggctgcccatcggccgcttcacctag

SEQ ID NO: 7373 - DNA, 1401 bp, synthetic construct
  misc_feature 1..1401: note = source = /note="Description of Artificial Sequence: Synthetic coding sequence"
  source 1..1401: mol_type = other DNA
atggtgcgctctgtggcctgggccggcttcatggtgctgctgatgatcccctggggcagcgctgccaagctggtgtgctacttcaccaactgggcccagtaccggcagggcgaggcccgcttcctgcccaaggacctggaccccagcctgtgcacccacctgatctatgcctttgctggcatgaccaaccaccagctgagcaccacagagtggaatgatgagaccctgtaccaggagttcaacggcctgaagaagatgaaccccaagctgaagaccctgctggccatcggcggctggaactttggcacccagaagttcacagacatggtggccacagccaacaaccggcagacctttgtgaacagcgccatccgcttcctgaggaagtacagctttgatggcctggacctggactgggagtacccaggcagccagggcagccctgctgtggacaaggagcgcttcaccaccctggtgcaggacctggccaatgccttccagcaggaggcccagaccagcggcaaggagcggctgctgctgtctgctgctgtgcctgctggccagacctacgtggatgctggctatgaggtggacaagatcgcccagaacctggactttgtgaacctgatggcctatgacttccacggctcctgggagaaggtgacaggccacaacagccccctgtacaagaggcaggaggagagcggggccgccgccagcctgaatgtggatgctgctgtgcagcagtggctgcagaagggcaccccagccagcaagctgatcctgggcatgcccacctacggccgctccttcaccctggccagcagcagtgacaccagggtgggcgccccagccaccggcagcggcaccccaggccccttcaccaaggagggcggcatgctggcctactatgaggtgtgctcctggaagggggccaccaagcagaggatccaggaccagaaggtgccctacatcttccgggacaaccagtgggtgggctttgatgatgtggagagcttcaagaccaaggtgtcctacctgaagcagaagggcctgggcggggccatggtgtgggccctggacctggatgactttgctggcttcagctgcaaccagggccgctaccccctcatccagaccctgcggcaggagctgagcctgccctacctgcccagcggcaccccagagctggaggtgcccaagccaggccagcccagcgagcctgagcacggccccagccctggccaggacaccttctgccagggcaaggcagatggcctgtaccccaacccccgggagaggagcagcttctacagctgtgccgccggccgcctcttccagcagagctgccccaccggcctggtgttcagcaacagctgcaagtgctgcacctggaactag

SEQ ID NO: 7374 - DNA, 1596 bp, synthetic construct
  misc_feature 1..1596: note = source = /note="Description of Artificial Sequence: Synthetic coding sequence"
  source 1..1596: mol_type = other DNA
atgaggctgtgcctgggccggccccacccccggggccacagccgggtgggcaagtctgagcggggccgcggggcccggggcctggcccggcagaggaccctggaggatgaggaggagcaggagcgggagaggagaagaagacacaggaacctgagcagcaccacagatgatgaggccccccggctgagccagaatggagaccggcaggccagcgccagcgagcggctgcccagcgtggaggaggccgaggtgcccaagcccctgcccccagccagcaaggatgaagatgaggacatccagagcatcctgcggacccggcaggagcggcggcagaggcggcaggtggtggaggccgcccaggcccccatccaggagcggctggaggccgaggagggcaggaacagcctgagccctgtgcaggccacccagaagcccctggtgtccaagaaggagctggagatccccccaagaagaaggctgagccgggagcagaggggcccctgggccctggaggaggagagcctggtgggccgggagcctgaggagaggaagaagggcgtgcctgagaagagccctgtgctggagaagagctccatgcccaagaagacagcccctgagaagagcctggtgtctgacaagaccagcatcagcgagaaggtgctggccagcgagaagaccagcctgtctgagaagattgctgtgtctgagaagaggaacagcagcgagaagaagtctgtgctggagaagacctctgtgtctgagaagagcctggcccctggcatggccctgggcagcggccgccgcctggtgtctgagaaggccagcatctttgagaaggccctggccagcgagaagagccccacagcagatgccaagccagcccccaagagggccacagccagcgagcagcccctggcccaggagcccccagccagcggcggcagccctgccaccaccaaggagcagaggggccgggccctgcccgggaagaacctgcccagcctggccaagcagggcgccagtgaccccccaacagtggccagccggctgccccctgtgaccctgcaggtgaagatccccagcaaggaggaggaggccgacatgagcagccccacccagaggacctacagcagcagcctgaagaggagcagccccaggaccatctccttcaggatgaagcccaagaaggaaaattctgagaccaccctgaccaggtctgcctccatgaagctgcctgacaacacagtgaagctgggggagaagctggagcgctaccacacagccatccgccgctctgagagcgtgaagagccggggcctgccctgcacagagctgtttgtggcccctgtgggcgtggccagcaagaggcacctgtttgagaaggagctggccggccagagcagagctgagcccgccagcagcaggaaagaaaacctgcggctgagcggcgtggtgaccagccggctgaacctgtggatcagcaggacccaggagagcggggaccaggacccccaggaggcccagaaggccagcagcgccacagagaggacccagtggggccagaagagtgacagcagcctggatgctgaggtgtag

SEQ ID NO: 7375 - DNA, 1782 bp, synthetic construct
  misc_feature 1..1782: note = source = /note="Description of Artificial Sequence: Synthetic coding sequence"
  source 1..1782: mol_type = other DNA
atgaaggctgacctgaagcagcaccaccaccactggagcatcttctcctacatccggctgcggctgcccagcatgctgctgctcttcagcgtcatcctgatctcctgggtgtccacagtgggcggggagggcaccctgtgtgacttccccaagatccaccacggcttcctgtatgatgaggaggactacaaccccttcagccaggtgcccactggagaggtgttctactacagctgtgagtacaactttgtgagccccagcaagagcttctggacccgcatcacctgcacagaggagggctggagccccacccccaagtgcctgaggatgtgcagcttcccctttgtgaagaatggccacagcgagagcagcggcctcatccacctggagggggacacagtgcagatcatctgcaacacaggctacagcctgcagaacaatgagaagaacatcagctgtgtggagcggggctggagcaccccacccatctgcagcttcaccaagggggagtgccacgtgcccatcctggaggccaacgtggatgcccagcccaagaaggagagctacaaggtgggagatgtgctgaagttcagctgcaggaagaacctgatccgggtgggcagtgacagcgtgcagtgctaccagtttggctggagccccaacttccccacctgcaagggccaggtgcgcagctgtggccccccaccccagctgagcaatggagaggtgaaggagatcaggaaggaggagtatggccacaatgaggtggtggagtatgactgcaaccccaacttcatcatcaatggccccaagaagatccagtgtgtggatggagagtggaccaccctgcccacctgtgtggagcaggtgaagacctgtggctacatccctgagctggagtatggctacgtgcagcccagcgtgcccccctaccagcacggcgtgtctgtggaggtgaactgcagaaatgaatatgccatgattggcaacaacatgatcacctgcatcaatggcatctggacagagctgcccatgtgtgtggccacccaccagctgaagcgctgcaagattgctggggtgaacatcaagaccctgctgaagctgagcggcaaggagttcaaccacaacagccgcatccgctaccgctgcagcgacatcttccgctaccgccacagcgtgtgcatcaacgggaagtggaaccctgaggtggactgcacagagaagcgggagcagttctgccccccaccaccccagatccccaatgcccagaacatgaccaccaccgtgaactaccaggatggagagaaggtggccgtgctgtgcaaggagaactacctgctgcctgaggccaaggagatcgtgtgcaaggatggccgctggcagagcctgccccgctgtgtggagagcacagcctactgcggccccccacccagcatcaacaatggagacaccaccagcttccccctgtctgtgtacccacctggcagcacagtgacctaccgctgccagagcttctacaagctgcagggctctgtgacagtgacctgcaggaacaagcagtggagcgagcccccacgctgcctggacccctgtgtggtgtctgaggagaacatgaacaagaacaacatccagctgaagtggagaaatgatggcaagctgtatgccaagacaggagatgctgtggagttccagtgcaagttcccccacaaggccatgatcagcagcccccccttccgggccatctgccaggagggcaagtttgagtaccccatctgtgagtag

SEQ ID NO: 7376 - DNA, 2301 bp, synthetic construct
  misc_feature 1..2301: note = source = /note="Description of Artificial Sequence: Synthetic coding sequence"
  source 1..2301: mol_type = other DNA
atgatctggaggagcagagctggagctgagctgttcagcctgatggccctgtgggagtggatcgccctgagcctgcactgctgggtgctggccgtggccgctgtgtctgaccagcacgccaccagcccctttgactggctgctgagtgacaagggccccttccacaggagccaggagtacacagactttgtggacaggagccggcagggcttcagcacccgctacaagatctaccgggagtttggccgctggaaggtgaacaacctggccgtggagaggaggaacttcctgggcagccccctgcccctggcccctgagttcttcaggaacatccggctgctgggccggcggcccaccctgcagcagatcacagaaaatctcatcaagaagtatggcacccacttcctgctgagcgccaccctgggcggggaggagagcctgaccatctttgtggacaagaggaagctgagcaagagagctgagggcagtgacagcaccaccaacagcagctctgtgaccctggagaccctgcaccagctggccgccagctacttcatcgaccgggacagcaccctgcggcggctgcaccacatccagatcgccagcacagccatcaaggtgacagagaccaggacaggccccctgggctgcagcaactatgacaacctggacagcgtgtcctctgtgctggtgcagagccctgagaacaagatccagctgcagggcctgcaggtgctgctgcctgactacctgcaggagagatttgtgcaggccgccctgagctacatcgcctgcaacagcgagggggagttcatctgcaaggaaaatgactgctggtgccactgcggccccaagtttcctgagtgcaactgccccagcatggacatccaggccatggaggagaacctgctgcgcatcacagagacctggaaggcctacaacagcgactttgaggagagtgatgagttcaagctgttcatgaagaggctgcccatgaactacttcctgaacaccagcaccatcatgcacctgtggaccatggacagcaacttccagaggagatatgagcagctggagaacagcatgaagcagctgttcctgaaggcccagaagatcgtgcacaagctgttcagcctgagcaagcgctgccacaagcagcccctcatcagcctgccccggcagaggaccagcacctactggctgacccgcatccagagcttcctgtactgcaatgaaaatggcctgctgggcagcttcagcgaggagacccacagctgcacctgccccaatgaccaggtggtgtgcacagccttcctgccctgcaccgtgggagatgccagcgcctgcctgacctgtgccccagacaacagaacccgctgtggcacctgcaacacaggctacatgctgagccagggcctgtgcaagccagaggtggccgagagcacagaccactacatcggctttgaaacagacctgcaggacctggagatgaagtacctgctgcagaagacagaccggcgcatcgaggtgcacgccatcttcatcagcaatgacatgaggctgaacagctggtttgaccccagctggaggaagaggatgctgctgaccctgaagagcaacaagtacaagagcagcctggtgcacatgatcctgggcctgagcctgcagatctgcctgaccaagaacagcaccctggagcctgtgctggccgtgtatgtgaacccctttggaggcagccacagcgagagctggttcatgcctgtgaatgaaaacagcttcccagactgggagaggaccaagctggacctgcccctgcagtgctacaactggaccctgaccctgggcaacaagtggaagaccttctttgagaccgtgcacatctacctgcggagccgcatcaagagcaatggccccaatggaaatgaaagcatctactatgagcccctggagttcatcgaccccagcaggaacctgggctacatgaagatcaacaacatccaggtgtttggctacagcatgcactttgatcctgaggccatccgggacctgatcctgcagctggactacccctacacccagggcagccaggacagcgccctgctgcagctgctggagatccgggacagagtgaacaagctgagccccccaggccagaggcggctggacctcttcagctgcctgctgcggcaccggctgaagctgagcaccagcgaggtggtgcgcatccagagcgccctgcaggccttcaatgccaagctgcccaacaccatggactatgacaccaccaagctgtgcagctag

SEQ ID NO: 7377 - DNA, 1815 bp, synthetic construct
  misc_feature 1..1815: note = source = /note="Description of Artificial Sequence: Synthetic coding sequence"
  source 1..1815: mol_type = other DNA
atgaggcgctgcaacagcggcagcggccccccacccagcctgctgctgctgctgctgtggctgctggccgtgcctggggccaatgctgcccccaggtctgccctgtacagccccagcgaccccctgaccctgctgcaggccgacacagtgagaggagctgtgctgggcagccgcagcgcctgggccgtggagttctttgcctcctggtgtggccactgcatcgcctttgcccccacctggaaggccctggctgaagatgtgaaggcctggaggcctgccctgtacctggccgccctggactgtgccgaggagaccaacagcgctgtgtgccgggacttcaacatccctggcttccccaccgtgcgcttcttcaaggccttcaccaagaatggcagcggggctgtgtttcctgtggccggggctgatgtgcagaccctgcgggagcggctgattgatgccctggagagccaccacgacacctggcccccagcctgcccccccctggagcccgccaagctggaggagattgatggcttctttgccaggaacaatgaggagtacctggccctgatctttgagaagggcggcagctacctgggccgggaggtggccctggacctgagccagcacaagggcgtggccgtgcggcgggtgctgaacacagaggccaacgtggtgaggaagtttggagtgacagacttccccagctgctacctgctcttcagaaatggatctgtgtcccgggtgcctgtgctgatggagagccgctccttctacacagcctacctgcagaggctgagcggcctgacccgggaggccgcccagaccaccgtggcccccaccacagccaacaagatcgcccccaccgtgtggaagctggccgacaggagcaagatctacatggctgacctggagagcgccctgcactacatcctgcgcatcgaggtgggccgcttccctgtgctggagggccagaggctggtggccctgaagaagtttgtggccgtgctggccaagtacttccctggccggcccctggtgcagaacttcctgcacagcgtgaatgagtggctgaagaggcagaagaggaacaagatcccctacagcttcttcaagacagccctggatgacaggaaggagggcgctgtgctggccaagaaggtgaactggattggctgccagggcagcgagccccacttccggggcttcccctgcagcctgtgggtgctcttccacttcctgactgtgcaggccgcccggcagaatgtggaccacagccaggaggccgccaaggccaaggaggtgctgcctgccatccggggctacgtgcactacttcttcggctgccgggactgtgccagccactttgagcagatggctgctgcctccatgcaccgggtgggcagccccaatgctgctgtgctgtggctgtggagcagccacaacagagtgaatgcccggctggccggggcccccagcgaggacccccagttccccaaggtgcagtggccaccccgggagctgtgcagcgcctgccacaatgaaaggctggatgtgcctgtgtgggatgtggaggccaccctgaacttcctgaaggcccacttcagccccagcaacatcatcctggacttccctgctgctggcagcgctgccaggagagatgtgcagaatgtggccgccgcccctgagctggccatgggcgccctggagctggagagcaggaacagcaccctggaccccgggaagccagagatgatgaagagccccaccaacaccacccctcatgtgcctgctgagggccctgagctgatctag

SEQ ID NO: 7378 - DNA, 2244 bp, synthetic construct
  misc_feature 1..2244: note = source = /note="Description of Artificial Sequence: Synthetic coding sequence"
  source 1..2244: mol_type = other DNA
atgaggcgctgcaacagcggcagcggccccccacccagcctgctgctgctgctgctgtggctgctggccgtgcctggggccaatgctgcccccaggtctgccctgtacagccccagcgaccccctgaccctgctgcaggccgacacagtgagaggagctgtgctgggcagccgcagcgcctgggccgtggagttctttgcctcctggtgtggccactgcatcgcctttgcccccacctggaaggccctggctgaagatgtgaaggcctggaggcctgccctgtacctggccgccctggactgtgccgaggagaccaacagcgctgtgtgccgggacttcaacatccctggcttccccaccgtgcgcttcttcaaggccttcaccaagaatggcagcggggctgtgtttcctgtggccggggctgatgtgcagaccctgcgggagcggctgattgatgccctggagagccaccacgacacctggcccccagcctgcccccccctggagcccgccaagctggaggagattgatggcttctttgccaggaacaatgaggagtacctggccctgatctttgagaagggcggcagctacctgggccgggaggtggccctggacctgagccagcacaagggcgtggccgtgcggcgggtgctgaacacagaggccaacgtggtgaggaagtttggagtgacagacttccccagctgctacctgctcttcagaaatggatctgtgtcccgggtgcctgtgctgatggagagccgctccttctacacagcctacctgcagaggctgagcggcctgacccgggaggccgcccagaccaccgtggcccccaccacagccaacaagatcgcccccaccgtgtggaagctggccgacaggagcaagatctacatggctgacctggagagcgccctgcactacatcctgcgcatcgaggtgggccgcttccctgtgctggagggccagaggctggtggccctgaagaagtttgtggccgtgctggccaagtacttccctggccggcccctggtgcagaacttcctgcacagcgtgaatgagtggctgaagaggcagaagaggaacaagatcccctacagcttcttcaagacagccctggatgacaggaaggagggcgctgtgctggccaagaaggtgaactggattggctgccagggcagcgagccccacttccggggcttcccctgcagcctgtgggtgctcttccacttcctgactgtgcaggccgcccggcagaatgtggaccacagccaggaggccgccaaggccaaggaggtgctgcctgccatccggggctacgtgcactacttcttcggctgccgggactgtgccagccactttgagcagatggctgctgcctccatgcaccgggtgggcagccccaatgctgctgtgctgtggctgtggagcagccacaacagagtgaatgcccggctggccggggcccccagcgaggacccccagttccccaaggtgcagtggccaccccgggagctgtgcagcgcctgccacaatgaaaggctggatgtgcctgtgtgggatgtggaggccaccctgaacttcctgaaggcccacttcagccccagcaacatcatcctggacttccctgctgctggcagcgctgccaggagagatgtgcagaatgtggccgccgcccctgagctggccatgggcgccctggagctggagagcaggaacagcaccctggaccccgggaagccagagatgatgaagagccccaccaacaccacccctcatgtgcctgctgagggccctgaggccagccggccccccaagctgcaccctggcctgcgggccgcccctggccaggagcccccagagcacatggccgagctgcagagaaatgagcaggagcagcccctgggccagtggcacctgagcaagagggacacaggagctgccctgctggccgagagcagagctgagaagaaccggctgtggggccccctggaggtgagaagagtgggccgcagcagcaagcagctggtggacatccctgagggccagctggaggcccgggccggccggggccggggccagtggctgcaggtgctgggcggcggcttctcctacctggacatcagcctgtgtgtgggcctgtacagcctgtccttcatgggcctgctggccatgtacacctacttccaggccaagatccgggccctgaagggccacgccggccaccctgctgcctag

SEQ ID NO: 7379 - DNA, 1476 bp, synthetic construct
  misc_feature 1..1476: note = source = /note="Description of Artificial Sequence: Synthetic coding sequence"
  source 1..1476: mol_type = other DNA
atgaagaccttcacctggaccctgggcgtgctcttcttcctgctggtggacaccggccactgccggggcggccagttcaagatcaagaagatcaaccagaggcgctacccccgggccacagatggcaaggaggaggccaagaagtgtgcctacaccttcctggtgcctgagcagaggatcaccggccccatctgtgtgaacaccaagggccaggatgccagcaccatcaaggacatgatcaccaggatggacctggagaacctgaaggatgtgctgagccggcagaagcgggagattgatgtgctgcagctggtggtggatgtggatggcaacatcgtgaatgaggtgaagctgctgaggaaggagagcaggaacatgaacagccgggtgacccagctgtacatgcagctgctgcacgagatcatcaggaagagggacaacagcctggagctgagccagctggagaacaagatcctgaatgtgaccacagagatgctgaagatggccacccgctaccgggagctggaggtgaagtatgccagcctgacagacctggtgaacaaccagagcgtgatgatcaccctgctggaggagcagtgcctgcgcatcttcagccggcaggacacccacgtgtccccacccctggtgcaggtggtgccccagcacatccccaacagccagcagtacaccccaggcctgctgggcggcaatgagatccagagggaccccggctacccccgggacctgatgcctcctccagacctggccaccagccccaccaagagccccttcaagatcccccctgtgaccttcatcaatgaaggccccttcaaggactgccagcaggccaaggaggccggccacagcgtgtctggcatctacatgatcaagccagagaacagcaatggccccatgcagctgtggtgtgagaacagcctggaccccggcggctggacagtcatccagaagaggacagatggctctgtgaacttcttcaggaactgggagaactacaagaagggcttcggcaacattgatggagagtactggctgggcctggagaacatctacatgctgagcaaccaggacaactacaagctgctgattgagctggaggactggagcgacaagaaggtgtatgcagagtacagcagcttccggctggagcctgagagcgagttctaccgcctgcggctgggcacctaccagggcaatgctggggacagcatgatgtggcacaacgggaagcagttcaccaccctggaccgggacaaggacatgtatgccggcaactgtgcccacttccacaagggcggctggtggtacaatgcctgtgcccacagcaacctgaatggagtgtggtacagaggaggccactaccgcagcaagcaccaggacggcatcttctgggccgagtacagaggaggcagctacagcctgcgggctgtgcagatgatgatcaagcccatcgactag

SEQ ID NO: 7380 - DNA, 2484 bp, synthetic construct
  misc_feature 1..2484: note = source = /note="Description of Artificial Sequence: Synthetic coding sequence"
  source 1..2484: mol_type = other DNA
atgatgtgcctgaagatcctgcgcatcagcctggccatcctggccggctgggccctgtgcagcgccaacagcgagctgggctggaccaggaagaagagcctggtggagcgggagcacctgaaccaggtgctgctggagggggagcgctgctggctgggcgccaaggtgagaagaccccgggccagcccccagcaccacctgtttggagtgtaccccagcagagctggcaactacctgcggccctaccctgtgggggagcaggagatccaccacacaggccgcagcaagccagacacagagggcaatgctgtgtccctggtgcccccagacctgacagaaaatcctgctggcctgcggggagctgtggaggagcctgctgccccctgggtgggggacagccccatcggccagagcgagctgctgggagatgatgatgcctacctgggcaaccagaggagcaaggagagcctgggggaggccggcatccagaagggcagcgccatggccgccaccaccaccacagccatcttcaccaccctgaatgagcccaagccagagacccagaggcggggctgggccaagagccggcagaggcggcaggtgtggaagagaagagcagaagatggccagggcgacagcggcatcagcagccacttccagccctggcccaagcacagcctgaagcaccgggtgaagaagagccccccagaggagagcaaccagaatggaggagagggcagctaccgggaggccgagaccttcaacagccaggtgggcctgcccatcctgtacttcagcggccggcgggagcggctgctgctgcggcctgaggtgctggccgagatcccccgggaggccttcaccgtggaggcctgggtgaagccagagggcggccagaacaacccagccatcatcgccggcgtgtttgacaactgcagccacacagtgtctgacaagggctgggccctgggcatccgcagcggcaaggacaagggcaagagagatgcccgcttcttcttcagcctgtgcacagacagagtgaagaaggccaccatcctgatcagccacagccgctaccagcccggcacctggacccacgtggccgccacctatgatggccgccacatggccctgtatgtggatggcacccaggtggccagcagcctggaccagagcggccccctgaacagccccttcatggccagctgccgcagcctgctgctgggcggggacagcagtgaagatggccactacttccggggccacctgggcaccctggtgttctggagcacagccctgccccagagccacttccagcacagcagccagcacagcagcggggaggaggaggccacagacctggtgctgacagccagctttgagcctgtgaacacagagtgggtgcccttcagagatgagaagtacccccggctggaggtgctgcagggctttgagcctgagcctgagatcctgagccccctgcagccccccctgtgtggccagacagtgtgtgacaacgtggagctgatcagccagtacaacggctactggcccctgcggggggagaaggtgatccgctaccaggtggtgaacatctgtgatgatgagggcctgaaccccatcgtgtctgaggagcagatccggctgcagcacgaggccctgaatgaggccttcagccgctacaacatctcctggcagctgtctgtgcaccaggtgcacaacagcaccctgcggcaccgggtggtgctggtgaactgtgagcccagcaagattggaaatgaccactgtgaccctgaatgtgagcaccccctgaccggctatgatggaggagactgccgcctgcagggccgctgctacagctggaacagaagagatggcctgtgccacgtggagtgcaacaacatgctgaatgactttgatgatggagactgctgtgacccccaggtggctgatgtgaggaagacctgctttgatcctgacagccccaagagggcctacatgtctgtgaaggagctgaaggaggccctgcagctgaacagcacccacttcctgaacatctactttgccagctctgtgcgggaggacctggccggggccgccacctggccctgggacaaggatgctgtgacccacctgggcggcatcgtgctgagccctgcctactacggcatgcctggccacacagacaccatgattcatgaggtgggccacgtgctgggcctgtaccacgtgttcaagggcgtgtctgagcgggagagctgcaatgacccctgcaaggagaccgtgcccagcatggagactggagacctgtgtgccgacacagcccccacccccaagtctgagctgtgccgggagcctgagcccaccagtgacacctgtggcttcacccgcttccctggggcccccttcaccaactacatgagctacacaggcatcaccaccgtgctcttctgcttcctgctgcgcatccacggcggcctgtag

SEQ ID NO: 7381 - DNA, 5376 bp, synthetic construct
  misc_feature 1..5376: note = source = /note="Description of Artificial Sequence: Synthetic coding sequence"
  source 1..5376: mol_type = other DNA
atgatgtgcctgaagatcctgcgcatcagcctggccatcctggccggctgggccctgtgcagcgccaacagcgagctgggctggaccaggaagaagagcctggtggagcgggagcacctgaaccaggtgctgctggagggggagcgctgctggctgggcgccaaggtgagaagaccccgggccagcccccagcaccacctgtttggagtgtaccccagcagagctggcaactacctgcggccctaccctgtgggggagcaggagatccaccacacaggccgcagcaagccagacacagagggcaatgctgtgtccctggtgcccccagacctgacagaaaatcctgctggcctgcggggagctgtggaggagcctgctgccccctgggtgggggacagccccatcggccagagcgagctgctgggagatgatgatgcctacctgggcaaccagaggagcaaggagagcctgggggaggccggcatccagaagggcagcgccatggccgccaccaccaccacagccatcttcaccaccctgaatgagcccaagccagagacccagaggcggggctgggccaagagccggcagaggcggcaggtgtggaagagaagagcagaagatggccagggcgacagcggcatcagcagccacttccagccctggcccaagcacagcctgaagcaccgggtgaagaagagccccccagaggagagcaaccagaatggaggagagggcagctaccgggaggccgagaccttcaacagccaggtgggcctgcccatcctgtacttcagcggccggcgggagcggctgctgctgcggcctgaggtgctggccgagatcccccgggaggccttcaccgtggaggcctgggtgaagccagagggcggccagaacaacccagccatcatcgccggcgtgtttgacaactgcagccacacagtgtctgacaagggctgggccctgggcatccgcagcggcaaggacaagggcaagagagatgcccgcttcttcttcagcctgtgcacagacagagtgaagaaggccaccatcctgatcagccacagccgctaccagcccggcacctggacccacgtggccgccacctatgatggccgccacatggccctgtatgtggatggcacccaggtggccagcagcctggaccagagcggccccctgaacagccccttcatggccagctgccgcagcctgctgctgggcggggacagcagtgaagatggccactacttccggggccacctgggcaccctggtgttctggagcacagccctgccccagagccacttccagcacagcagccagcacagcagcggggaggaggaggccacagacctggtgctgacagccagctttgagcctgtgaacacagagtgggtgcccttcagagatgagaagtacccccggctggaggtgctgcagggctttgagcctgagcctgagatcctgagccccctgcagccccccctgtgtggccagacagtgtgtgacaacgtggagctgatcagccagtacaacggctactggcccctgcggggggagaaggtgatccgctaccaggtggtgaacatctgtgatgatgagggcctgaaccccatcgtgtctgaggagcagatccggctgcagcacgaggccctgaatgaggccttcagccgctacaacatctcctggcagctgtctgtgcaccaggtgcacaacagcaccctgcggcaccgggtggtgctggtgaactgtgagcccagcaagattggaaatgaccactgtgaccctgaatgtgagcaccccctgaccggctatgatggaggagactgccgcctgcagggccgctgctacagctggaacagaagagatggcctgtgccacgtggagtgcaacaacatgctgaatgactttgatgatggagactgctgtgacccccaggtggctgatgtgaggaagacctgctttgatcctgacagccccaagagggcctacatgtctgtgaaggagctgaaggaggccctgcagctgaacagcacccacttcctgaacatctactttgccagctctgtgcgggaggacctggccggggccgccacctggccctgggacaaggatgctgtgacccacctgggcggcatcgtgctgagccctgcctactacggcatgcctggccacacagacaccatgattcatgaggtgggccacgtgctgggcctgtaccacgtgttcaagggcgtgtctgagcgggagagctgcaatgacccctgcaaggagaccgtgcccagcatggagactggagacctgtgtgccgacacagcccccacccccaagtctgagctgtgccgggagcctgagcccaccagtgacacctgtggcttcacccgcttccctggggcccccttcaccaactacatgagctacacagatgacaactgcacagacaacttcacccccaaccaggtggccaggatgcactgctacctggacctggtgtaccagcagtggacagagagcaggaagcccacccccatccccatcccccccatggtgattggccagaccaacaagagcctgaccatccactggctgccccccatctctggagtggtgtatgaccgggccagcggcagcctgtgtggggcctgcacagaagatggcaccttccggcagtatgtgcacacagccagcagccggcgggtgtgtgacagcagcggctactggaccccagaggaggccgtgggccccccagatgtggaccagccctgtgagcccagcctgcaggcctggagccctgaggtgcacctgtaccacatgaacatgacagtgccctgccccacagagggctgcagcctggagctgctcttccagcaccctgtgcaggccgacaccctgaccctgtgggtgaccagcttcttcatggagagcagccaggtgctgtttgacacagagatcctgctggagaacaaggagagcgtgcacctgggccccctggacaccttctgtgacatccccctgaccatcaagctgcacgtggatggcaaggtgtctggagtgaaggtgtacacctttgatgaaagaattgaaattgatgctgccctgctgaccagccagccccacagccccctgtgcagcggctgcaggcctgtgcgctaccaggtgctgcgggaccccccatttgccagcggcctgcctgtggtggtgacccacagccacaggaagttcacagatgtggaggtgaccccaggccagatgtaccagtaccaggtgctggccgaggccggcggggagctgggggaggccagcccccccctgaaccacatccacggggccccctactgtggagatggcaaggtgtctgagcggctgggggaggagtgtgatgatggagacctggtgtctggagatggctgcagcaaggtgtgtgagctggaggagggcttcaactgtgtgggggagcccagcctgtgctacatgtatgaaggagatggcatctgtgagccctttgagaggaagaccagcatcgtggactgtggcatctacacccccaagggctacctggaccagtgggccacccgggcctacagcagccatgaggacaagaagaagtgccctgtgtccctggtgactggagagccccacagcctcatctgcaccagctaccacccagacctgcccaaccaccggcccctgaccggctggttcccctgtgtggcctctgaaaatgagacccaggatgacagaagtgagcagcctgagggcagcctgaagaaggaggatgaggtgtggctgaaggtgtgcttcaacagacctggagaggcccgggccatcttcatcttcctgaccacagatggcctggtgcctggagagcaccagcagcccaccgtgaccctgtacctgacagatgtgcggggcagcaaccacagcctgggcacctacggcctgagctgccagcacaaccccctcatcatcaacgtgacccaccaccagaatgtgctcttccaccacaccacctctgtgctgctgaacttcagcagcccccgggtgggcatctctgctgtggccctgcggaccagcagcagaattggcctgagcgcccccagcaactgcatcagtgaagatgagggccagaaccaccagggccagagctgcatccaccggccctgtgggaagcaggacagctgccccagcctgctgctggaccacgcagatgtggtgaactgcaccagcatcggccctggcctgatgaagtgtgccatcacctgccagaggggctttgccctgcaggccagcagcggccagtacatccggcccatgcagaaggagatcctgctgacctgcagcagcggccactgggaccagaatgtgtcctgcctgcctgtggactgtggggtgcctgaccccagcctggtgaactatgccaacttcagctgcagcgagggcaccaagttcctgaagcgctgcagcatcagctgtgtgcccccagccaagctgcagggcctgagcccctggctgacctgcctggaggatggcctgtggagcctgcctgaggtgtactgcaagctggagtgtgatgccccacccatcatcctgaatgccaacctgctgctgccccactgcctgcaggacaaccatgatgtgggcaccatctgcaagtatgagtgcaagccaggctactacgtggccgagagcgctgagggcaaggtgaggaacaagctgctgaagatccagtgcctggagggcggcatctgggagcagggcagctgcatccctgtggtgtgtgagcccccacctcctgtgtttgagggcatgtatgaatgtaccaacggcttcagcctggacagccagtgtgtgctgaactgcaaccaggagcgggagaagctgcccatcctgtgcaccaaggagggcctgtggacccaggagttcaagctgtgtgagaacctgcagggcgagtgccccccaccacccagcgagctgaacagcgtggagtacaagtgtgagcagggctatggaattggagctgtgtgcagccccctgtgtgtgatcccccccagcgaccctgtgatgctgcctgagaacatcacagctgacaccctggagcactggatggagcctgtgaaggtgcagagcatcgtgtgcacaggaagacggcagtggcacccagaccctgtgctggtgcactgcatccagagctgtgagcccttccaggctgatggctggtgtgacaccatcaacaacagagcctactgccactatgatggaggagactgctgcagcagcaccctgagcagcaagaaggtgatcccctttgctgctgactgtgacctggatgaatgtacctgccgggaccccaaggccgaggagaaccagtag

SEQ ID NO: 7382 - DNA, 702 bp, synthetic construct
  misc_feature 1..702: note = source = /note="Description of Artificial Sequence: Synthetic coding sequence"
  source 1..702: mol_type = other DNA
atgaaggaccccctggccaaggatgagcgcatctacgtgaccaactactactacggcaacaccctggtggagttcaggaacctggagaacttcaagcagggccgctggagcaacagctacaagctgccctacagctggattggaactggacatgtggtgtacaatggagccttctactacaacagagccttcaccaggaacatcatcaagtatgacctgaagcagagatatgtggccgcctgggccatgctgcatgatgtggcctatgaggaggccaccccctggcgctggcagggccacagtgatgtggactttgctgtggatgaaaatggcctgtggctgatctacccagccctggatgatgagggcttcagccaggaggtgattgtgctgagcaagctgaatgctgctgacctgagcacccagaaggagaccacctggaggacaggcctgcggaggaacttctacggcaactgcttcgtcatctgtggggtgctgtatgctgtggacagctacaaccagagaaatgccaacatctcctatgcctttgacacccacaccaacacccagatcgtgccccggctgctgtttgaaaatgagtacagctacaccacccagattgactacaaccccaaggaccggctgctgtatgcctgggacaatggccaccaggtgacctaccacgtgatctttgcctactag

SEQ ID NO: 7383 - DNA, 579 bp, synthetic construct
  misc_feature 1..579: note = source = /note="Description of Artificial Sequence: Synthetic coding sequence"
  source 1..579: mol_type = other DNA
atgctgaagaagatctctgtgggcgtggccggggacctgaacacagtgaccatgaagctgggctgtgtgctgatggcctgggccctgtacctgagcctgggcgtgctgtgggtggcccagatgctgctggccgccagctttgagaccctgcagtgtgagggccctgtgtgcacagaggagagcagctgccacacagaagatgacctgacagatgcccgggaggccggcttccaggtgaaggcctacaccttcagcgagcccttccacctgattgtgtcctatggagccagcagcagcgctgccccacccaccctgaacccagccccccagaagtctgctgcccctggaacagcccctgaggaggcccctggccccctgcccccaccacccacccccagcagtgaagatcctggcttcagcagccccctgggcatgccagacccccacctgtaccaccagatgggcctgctgctgaagcacatgcaggatgtgcgggtgctgctgggccacctgctgatggagctgcgggagctgagcggccacaggaagccaggcaccaccaaggccacagctgagtag

SEQ ID NO: 7384 - DNA, 459 bp, synthetic construct
  misc_feature 1..459: note = source = /note="Description of Artificial Sequence: Synthetic coding sequence"
  source 1..459: mol_type = other DNA
atgctgctggccgccagctttgagaccctgcagtgtgagggccctgtgtgcacagaggagagcagctgccacacagaagatgacctgacagatgcccgggaggccggcttccaggtgaaggcctacaccttcagcgagcccttccacctgattgtgtcctatggagccagcagcagcgctgccccacccaccctgaacccagccccccagaagtctgctgcccctggaacagcccctgaggaggcccctggccccctgcccccaccacccacccccagcagtgaagatcctggcttcagcagccccctgggcatgccagacccccacctgtaccaccagatgggcctgctgctgaagcacatgcaggatgtgcgggtgctgctgggccacctgctgatggagctgcgggagctgagcggccacaggaagccaggcaccaccaaggccacagctgagtag

SEQ ID NO: 7385 - DNA, 1098 bp, synthetic construct
  misc_feature 1..1098: note = source = /note="Description of Artificial Sequence: Synthetic coding sequence"
  source 1..1098: mol_type = other DNA
atgaagctgggctgtgtgctgatggcctgggccctgtacctgagcctgggcgtgctgtgggtggcccagatgctgctggccgccggctgccacgccgccgccagctttgagaccctgcagtgtgagggccctgtgtgcacagaggagagcagctgccacacagaagatgacctgacagatgcccgggaggccggcttccaggtgaaggcctacaccttcagcgagcccttccacctgattgtgtcctatgactggctgatcctgcagggccctgccaagcctgtgtttgaaggagacctgctggtgctgcgctgccaggcctggcaggactggcccctgacccaggtgaccttctacagagatggcagcgccctgggccccccaggccccaaccgggagttcagcatcaccgtggtgcagaaggctgacagcggccactaccactgcagcggcatcttccagagccctggccctggcatccctgagacagcctctgtggtggccatcaccgtgcaggagctgtttcctgcccccatcctgcgggctgtgcccagcgctgagccccaggccggcagccccatgaccctgagctgccagaccaagctgcccctgcagaggtctgctgcccggctgctcttctccttctacaaggatggaagaattgtgcagagccggggcctgagcagcgagttccagatccccacagccagcgaggaccacagcggcagctactggtgtgaggccgccacagaggacaaccaggtgtggaagcagagcccccagctggagatccgggtgcagggcgccagcagcagcgctgccccacccaccctgaacccagccccccagaagtctgctgcccctggaacagcccctgaggaggcccctggccccctgcccccaccacccacccccagcagcgaggaccccggcttcagcagccccctgggcatgccagacccccacctgtaccaccagatgggcctgctgctgaagcacatgcaggatgtgcgggtgctgctgggccacctgctgatggagctgcgggagctgagcggccacaggaagccaggcaccaccaaggccacagctgagtag

SEQ ID NO: 7386 - DNA, 711 bp, synthetic construct
  misc_feature 1..711: note = source = /note="Description of Artificial Sequence: Synthetic coding sequence"
  source 1..711: mol_type = other DNA
atgctgaagaagatctctgtgggcgtggccggggacctgaacacagtgaccatgaagctgggctgtgtgctgatggcctgggccctgtacctgagcctgggcgtgctgtgggtggcccagatgctgctggagctgtttcctgcccccatcctgcgggctgtgcccagcgctgagccccaggccggcagccccatgaccctgagctgccagaccaagctgcccctgcagaggtctgctgcccggctgctcttctccttctacaaggatggccgcatcgtgcagagccggggcctgagcagcgagttccagatccccacagccagcgaggaccacagcggcagctactggtgtgaggccgccacagaggacaaccaggtgtggaagcagagcccccagctggagatccgggtgcagggcgccagcagcagcgctgccccacccaccctgaacccagccccccagaagtctgctgcccctggaacagcccctgaggaggcccctggccccctgcccccaccacccacccccagcagtgaagatcctggcttcagcagccccctgggcatgccagacccccacctgtaccaccagatgggcctgctgctgaagcacatgcaggatgtgcgggtgctgctgggccacctgctgatggagctgcgggagctgagcggccacaggaagccaggcaccaccaaggccacagctgagtag

SEQ ID NO: 7387 - DNA, 1149 bp, synthetic construct
  misc_feature 1..1149: note = source = /note="Description of Artificial Sequence: Synthetic coding sequence"
  source 1..1149: mol_type = other DNA
atgctgaagaagatctctgtgggcgtggccggggacctgaacacagtgaccatgaagctgggctgtgtgctgatggcctgggccctgtacctgagcctgggcgtgctgtgggtggcccagatgctgctggccgccggctgccacgccgccgccagctttgagaccctgcagtgtgagggccctgtgtgcacagaggagagcagctgccacacagaagatgacctgacagatgcccgggaggccggcttccaggtgaaggcctacaccttcagcgagcccttccacctgattgtgtcctatgactggctgatcctgcagggccctgccaagcctgtgtttgaaggagacctgctggtgctgcgctgccaggcctggcaggactggcccctgacccaggtgaccttctacagagatggcagcgccctgggccccccaggccccaaccgggagttcagcatcaccgtggtgcagaaggctgacagcggccactaccactgcagcggcatcttccagagccctggccctggcatccctgagacagcctctgtggtggccatcaccgtgcaggagctgtttcctgcccccatcctgcgggctgtgcccagcgctgagccccaggccggcagccccatgaccctgagctgccagaccaagctgcccctgcagaggtctgctgcccggctgctcttctccttctacaaggatggccgcatcgtgcagagccggggcctgagcagcgagttccagatccccacagccagcgaggaccacagcggcagctactggtgtgaggccgccacagaggacaaccaggtgtggaagcagagcccccagctggagatccgggtgcagggcgccagcagcagcgctgccccacccaccctgaacccagccccccagaagtctgctgcccctggaacagcccctgaggaggcccctggccccctgcccccaccacccacccccagcagtgaagatcctggcttcagcagccccctgggcatgccagacccccacctgtaccaccagatgggcctgctgctgaagcacatgcaggatgtgcgggtgctgctgggccacctgctgatggagctgcgggagctgagcggccacaggaagccaggcaccaccaaggccacagctgagtag

SEQ ID NO: 7388 - DNA, 738 bp, synthetic construct
  misc_feature 1..738: note = source = /note="Description of Artificial Sequence: Synthetic coding sequence"
  source 1..738: mol_type = other DNA
atgagccggctgcgggccctgctgggcctgggcctgctggtggccggcagccgggtgccccgcatcaagagccagaccatcgcctgccgcagcggccccacctggtggggcccccagaggctgaacagcggcggccgctgggacagcgaggtgatggccagcacagtggtgaagtacctgagccaggaggaggcccaggccgtggaccaggagctgttcaatgagtaccagttctctgtggaccagctgatggagctggccggcctgagctgtgccacagccatcgccaaggcctacccacccacctccatgagccgcagcccccccaccgtgctggtgatctgtggccctggcaacaatggaggagatggcctggtgtgtgcccggcacctgaagctgtttggctatgagcccaccatctactaccccaagaggcccaacaagcccctcttcaccgccctggtgacccagtgccagaagatggacatccccttcctgggggagatgcctgctgagcccatgaccattgatgagctgtatgagctggtggtggatgccatcttcggcttctccttcaagggagatgtgcgggagcccttccacagcatcctgtctgtgctgaagggcctgactgtgcccatcgccagcattgacatccccagcggggccggcatccagaaggtgggctggggccgcctgggcccctaccccccagacagctgcccccaccaggtgtag

SEQ ID NO: 7389 - DNA, 783 bp, synthetic construct
  misc_feature 1..783: note = source = /note="Description of Artificial Sequence: Synthetic coding sequence"
  source 1..783: mol_type = other DNA
atgagccggctgcgggccctgctgggcctgggcctgctggtggccggcagccgggtgccccgcatcaagagccagaccatcgcctgccgcagcggccccacctggtggggcccccagaggctgaacagcggcggccgctgggacagcgaggtgatggccagcacagtggtgaagtacctgagccaggaggaggcccaggccgtggaccaggagctgttcaatgagtaccagttctctgtggaccagctgatggagctggccggcctgagctgtgccacagccatcgccaaggcctacccacccacctccatgagccgcagcccccccaccgtgctggtgatctgtggccctggcaacaatggaggagatggcctggtgtgtgcccggcacctgaagctgtttggctatgagcccaccatctactaccccaagaggcccaacaagcccctcttcaccgccctggtgacccagtgccagaagatggacatccccttcctgggggagatgcctgctgagctgcagggccgctgcagcggcaccgtgccccagcaccctgagtgcccagagggcacccactgtgcccactgccagcaccgccacagcctgaggatgggccgcggggagggcaagtgctggagggaccctgcccggctggcccacatcccccacagcccccagaagatctgcaaccctgtgtaccgcagcctgcccctgcccggcggcagcttctgtgccacctgcagcggggaggaggtgcctgctgagcccgccaccctgccctag

SEQ ID NO: 7390 - DNA, 867 bp, synthetic construct
  misc_feature 1..867: note = source = /note="Description of Artificial Sequence: Synthetic coding sequence"
  source 1..867: mol_type = other DNA
atgagccggctgcgggccctgctgggcctgggcctgctggtggccggcagccgggtgccccgcatcaagagccagaccatcgcctgccgcagcggccccacctggtggggcccccagaggctgaacagcggcggccgctgggacagcgaggtgatggccagcacagtggtgaagtacctgagccaggaggaggcccaggccgtggaccaggagctgttcaatgagtaccagttctctgtggaccagctgatggagctggccggcctgagctgtgccacagccatcgccaaggcctacccacccacctccatgagccgcagcccccccaccgtgctggtgatctgtggccctggcaacaatggaggagatggcctggtgtgtgcccggcacctgaagctgtttggctatgagcccaccatctactaccccaagaggcccaacaagcccctcttcaccgccctggtgacccagtgccagaagatggacatccccttcctgggggagatgcctgctgagcccatgaccattgatgagctgtatgagctggtggtggatgccatcttcggcttctccttcaagggagatgtgcgggagcccttccacagcatcctgtctgtgctgaagggcctgactgtgcccatcgccagcattgacatccccagcggctgggatgtggagaagggaaatgctgggggcatccagcctgacctgctgatcagcctgacagcccccaagaagagcgccacccagttcaccggccgctaccactacctgggcggccgctttgtgcccccagccctggagaagaagtaccagctgaacctgcccccctacccagacacagaatgtgtgtaccgcctgcagtag

SEQ ID NO: 7391 - DNA, 879 bp, synthetic construct
  misc_feature 1..879: note = source = /note="Description of Artificial Sequence: Synthetic coding sequence"
  source 1..879: mol_type = other DNA
atgcacctgcggctcatctcctggctgttcatcatcctgaacttcatggagtacatcggcagccagaatgccagccggggccggcggcagaggaggatgcaccccaacgtgtcccagggctgccagggcggctgtgccacctgcagcgactacaacggctgcctgagctgcaagcccaggctcttctttgccctggagcgcatcggcatgaagcagattggagtgtgcctgagcagctgccccagcggctactacggcacccgctacccagacatcaacaagtgcaccaagtgcaaggctgactgtgacacctgcttcaacaagaacttctgcaccaagtgcaagagcggcttctacctgcacctgggcaagtgcctggacaactgcccagagggcctggaggccaacaaccacaccatggagtgtgtgtccatcgtgcactgtgaggtgtctgagtggaacccctggagcccctgcaccaagaagggcaagacctgtggcttcaagaggggcacagagaccagggtgcgggagatcatccagcaccccagcgccaagggcaacctgtgcccccccaccaatgagaccaggaagtgcaccgtgcagaggaagaagtgccagaagggggagcggggcaagaagggccgggagaggaagaggaagaagcccaacaagggggagagcaaggaggccatcccagacagcaagagcctggagagcagcaaggagatccctgagcagcgggagaacaagcagcagcagaagaagaggaaggtgcaggacaagcagaagtctggaattgaggtgaccctggccgagggcctgacctctgtgtcccagaggacccagcccaccccctgcagaagacgctacctgtag

SEQ ID NO: 7392 - DNA, 2871 bp, synthetic construct
  misc_feature 1..2871: note = source = /note="Description of Artificial Sequence: Synthetic coding sequence"
  source 1..2871: mol_type = other DNA
atggagacccaggagctgcggggggccctggccctgctgctgctgtgcttcttcaccagcgccagccaggacctgcaggtgattgacctgctgactgtgggggagagccggcagatggtggccgtggccgagaagatcagaacagccctgctgacagctggggacatctacctgctgagcaccttccggctgccccccaagcagggcggcgtgctgtttggcctgtacagccggcaggacaacacccgctggctggaggcctctgtggtgggcaagatcaacaaggtgctggtgcgctaccagagagaagatggcaaggtgcatgctgtgaacctgcagcaggccggcctggctgatggccgcacccacacagtgctgctgcggctgcggggccccagccggcccagccctgccctgcacctgtatgtggactgcaagctgggggaccagcacgccggcctgcctgccctggcccccatccccccagctgaggtggatggcctggagatcagaacaggccagaaggcctacctgaggatgcagggctttgtggagagcatgaagatcatcctgggcggctccatggcccgggtgggcgccctgtctgaatgtcccttccagggagatgagagcatccacagcgctgtgaccaatgccctgcacagcatcctgggggagcagaccaaggccctggtgacccagctgaccctcttcaaccagatcctggtggagctgagagatgacatccgggaccaggtgaaggagatgagcctcatccggaacaccatcatggagtgccaggtgtgtggcttccacgagcagaggagccactgcagccccaacccctgcttccggggcgtggactgcatggaggtgtatgagtacccaggctaccgctgtggcccctgccccccaggcctgcagggcaatggcacccactgcagcgacatcaatgaatgtgcccatgctgacccctgcttccctggcagcagctgcatcaacaccatgcctggcttccactgtgaggcctgcccccggggctacaagggcacccaggtgtctggagtgggcatcgactatgcccgggccagcaagcaggtgtgcaatgacattgatgaatgtaatgatggcaacaatggaggctgtgaccccaacagcatctgcaccaacacagtgggcagcttcaagtgtggcccctgccgcctgggcttcctgggcaaccagagccagggctgcctgcctgcccggacctgccacagccctgcccacagcccctgccacatccacgcccactgcctgtttgaaagaaatggagctgtgtcctgccagtgcaatgtgggctgggccggaaatggaaatgtgtgtggcacagacacagacattgatggctacccagaccaggccctgccctgcatggacaacaacaagcactgcaagcaggacaactgcctgctgacccccaacagcggccaggaggatgctgacaatgatggagtgggggaccagtgtgatgatgatgctgatggagatggcatcaagaatgtggaggacaactgccgcctcttccccaacaaggaccagcagaacagcgacacagacagctttggagatgcctgtgacaactgccccaacgtgcccaacaatgaccagaaggacacagatggaaatggagaaggagatgcctgtgacaatgatgtggatggagatggcatccccaacggcctggacaactgccccaaggtgcccaaccccctgcagacagacagagatgaagatggagtgggagatgcctgtgacagctgcccagagatgagcaaccccacccagacagatgctgacagcgacctggtgggagatgtgtgtgacaccaatgaagattctgatggagatggccaccaggacaccaaggacaactgcccccagctgcccaacagcagccagctggacagcgacaatgatggcctgggagatgaatgtgatggagatgatgacaatgatggcatcccagactatgtgcccccaggccctgacaactgccgcctggtgcccaaccccaaccagaaggacagtgatggaaatggagtgggagatgtgtgtgaagatgactttgacaatgatgctgtggtggaccccctggatgtgtgcccagagagcgctgaggtgaccctgacagacttccgggcctaccagacagtggtgctggaccctgaaggagatgcccagattgaccccaactgggtggtgctgaaccagggcatggagatcgtgcagaccatgaacagcgaccccggcctggccgtgggctacacagccttcaatggagtggactttgagggcaccttccacgtgaacacagtgacagatgatgattatgccggcttcctgttctcctaccaggacagcggccgcttctacgtggtgatgtggaagcagacagagcagacctactggcaggccacccccttccgggctgtggcccagcccggcctgcagctgaaggctgtgacctctgtgtctggccctggagagcacctgagaaatgccctgtggcacacaggccacaccccagaccaggtgcggctgctgtggacagaccccagaaatgtgggctggagggacaagaccagctaccgctggcagctgctgcaccggccccaggtgggctacatccgggtgaagctgtatgagggcccccagctggtggccgacagcggggtcatcatcgacacctccatgaggggcggccgcctgggcgtcttctgcttcagccaggagaacatcatctggagcaacctgcagtaccgctgcaatgacacagtgcctgaggactttgagcccttccggcggcagctgctgcagggccgggtgtag

SEQ ID NO: 7393 - DNA, 1110 bp, synthetic construct
  misc_feature 1..1110: note = source = /note="Description of Artificial Sequence: Synthetic coding sequence"
  source 1..1110: mol_type = other DNA
atgctgccctggctgctggtgttttctgccctgggcatccaggcctggggagacagctcctggaacaagacccaggccaagcaggtgtctgagggcctgcagtacctgtttgagaacatcagccagctgacagagaaggatgtgtccaccaccgtgtccaggaaggcctggggcgctgaggccgtgggctgcagcatccagctgaccacccctgtgaatgtgctggtgatccaccacgtgcccggcctggagtgccacgaccagacagtgtgcagccagaggctgcgggagctgcaggcccaccacgtgcacaacaacagcggctgtgatgtggcctacaacttcctggtgggagatgatggccgggtgtatgagggcgtgggctggaacatccagggcgtgcacacccagggctacaacaacatcagcctgggctttgccttcttcggcaccaagaagggccacagccccagccctgctgccctgagcgccatggagaacctgatcacctatgctgtgcagaagggccacctgagcagcagctatgtgcagcccctgctgggcaaaggagagaactgcctggccccccggcagaagaccagcctgaagaaggcctgccctggggtggtgcccaggtctgtgtggggcgcccgggagacccactgccccaggatgaccctgcctgccaagtatggcatcatcatccacacagctggccgcacctgcaacatcagtgatgaatgtcggctgctggtgcgggacatccagagcttctacatcgaccggctgaagagctgtgacatcggctacaacttcctggtgggccaggatggagccatctatgaaggagtgggctggaatgtgcagggcagcagcaccccaggctatgatgacatcgccctgggcatcaccttcatgggcaccttcaccggcatccccccaaatgctgctgccctggaggccgcccaggacctgatccagtgtgccatggtgaagggctacctgacccccaactacctgctggtgggccacagtgatgtggcccggaccctgagccctggccaggccctgtacaacatcatcagcacctggccccacttcaagcactag

SEQ ID NO: 7394 - DNA, 675 bp, synthetic construct
  misc_feature 1..675: note = source = /note="Description of Artificial Sequence: Synthetic coding sequence"
  source 1..675: mol_type = other DNA
atggagaagatcccctttgtgctgggcggcaacctgcagggcggggagctggtggtggcctacccctatgacctggtgcgcagcccctggaagacccaggagcacacccccaccccagatgaccacgtgttccgctggctggcctacagctatgccagcacccaccggctgatgacagatgccaggagaagagtgtgccacacagaggacttccagaaggaggagggcaccgtgaatggagcctcctggcacacagtggccggcagcctgaatgacttctcctacctgcacaccaactgctttgagctgagcatctacgtgggctgtgacaagtacccccatgagagccagctgcctgaggagtgggagaacaaccgggagagcctcatcgtgttcatggagcaggtgcaccggggcatcaagggcctggtgcgggacagccacggcaagggcatccccaatgccatcatctctgtggagggcatcaaccacgacatcagaacaggccgggtgtccctgcagaagctgagcctggcctgcagaagagtgcgctgtgcctttgccctgagcagcagcagcaccatgattgtgcggcccccccagccctatggaacagtgccccacagcagcccagaccctgtgaccaccaagatcagccccctgaggaacttctag

SEQ ID NO: 7395 - DNA, 285 bp, synthetic construct
  misc_feature 1..285: note = source = /note="Description of Artificial Sequence: Synthetic coding sequence"
  source 1..285: mol_type = other DNA
atgcctgtgattgctgggggcatcctggccgccctgctgctgctgattgtggtggtgctgtgcctgtacttcaagatccacaatgccctgaaggccgccaaggagcctgaggccgtggccgtgaagaaccacaacccagacaaggtgtggtgggccaagaacagccaggccaagaccatcgccacagagagctgcccagccctgcagtgctgtgagggctacaggatgtgtgccagctttgacagcctgcccccctgctgctgtgacatcaatgaaggcctgtag

SEQ ID NO: 7396 - DNA, 285 bp, synthetic construct; identical to SEQ ID NO: 7395
  misc_feature 1..285: note = source = /note="Description of Artificial Sequence: Synthetic coding sequence"
  source 1..285: mol_type = other DNA

SEQ ID NO: 7397 - DNA, 1026 bp, synthetic construct
  misc_feature 1..1026: note = source = /note="Description of Artificial Sequence: Synthetic coding sequence"
  source 1..1026: mol_type = other DNA
atggtgcctgctgctggggccctgctgtgggtgctgctgctgaacctgggccccagggctgctggggcccagggcctgacccagacccccacagagatgcagagggtgtccctgcgctttggaggccccatgaccaggagctaccgcagcacagccaggacaggcctgcccaggaagacccgcatcatcctggaggatgaaaatgatgccatggctgatgctgaccggctggccggccctgctgctgctgagctgctggccgccaccgtgtccacaggcttcagccgcagcagcgccatcaatgaagaagatggcagcagcgaggagggcgtggtgatcaatgccggcaaggacagcaccagccgggagctgcccagcgccacccccaacacagctggcagcagcagcacccgcttcatcgccaacagccaggagcctgagatccggctgaccagcagcctgcccaggagccctggccgcagcacagaggacctgcccggcagccaggccaccctgagccagtggagcaccccaggcagcacccccagccgctggcccagccccagccccacagccatgcccagccctgaggacctgcggctggtgctgatgccctggggcccctggcactgccactgcaagagcggcaccatgagccgcagccgcagcggcaagctgcacggcctgagcggccgcctgcgggtgggcgccctgagccagctgaggacagagcacaagccctgcacctaccagcagtgcccctgcaaccggctgcgggaggagtgccccctggacaccagcctgtgcacagacaccaactgtgccagccagagcaccaccagcaccaggaccaccaccacccccttccccaccatccacctgcggagcagccccagcctgcccccagccagcccctgcccagccctggccttctggaagagggtgagaattggcctggaggacatctggaacagcctgagcagcgtcttcacagagatgcagcccatcgacaggaaccagaggtag

SEQ ID NO: 7398 - DNA, 366 bp, synthetic construct
  misc_feature 1..366: note = source = /note="Description of Artificial Sequence: Synthetic coding sequence"
  source 1..366: mol_type = other DNA
atggatgtgctgtttgtggccatctttgctgtgcccctcatcctgggccaggagtatgaagatgaggagcggctgggagaagatgagtactaccaggtggtgtactactacacagtgacccccagctatgatgacttctctgctgacttcaccatcgactacagcatctttgaaagtgaggaccggctgaaccggctggacaaggacatcacagaggccatcgagaccaccatcagcctggagacagcccgggctgaccaccccaagcctgtgacagtgaagcctgtgaccacagagcctgtggaggagggctgctatgacagcctggatggcagcctggcccggggcaactggaagatcaagtag

SEQ ID NO: 7399 - DNA, 396 bp, synthetic construct
  misc_feature 1..396: note = source = /note="Description of Artificial Sequence: Synthetic coding sequence"
  source 1..396: mol_type = other DNA
atggatgtgctgtttgtggccatctttgctgtgcccctcatcctgggccaggagtatgaagatgaggagcggctgggagaagatgagtactaccaggtggtgtactactacacagtgacccccagctatgatgacttctctgctgacttcaccatcgactacagcatctttgaaagtgaggaccggctgaaccggctggacaaggacatcacagaggccatcgagaccaccatcagcctggagacagcccgggctgaccaccccaagcctgtgacagtgaagcctgtgaccacagagcccagcccagacctgaatgatgctgtgagcagcctgcggagccccatccccctgctgctgagctgtgcctttgtgcaggtgggcatgtacttcatgtag

SEQ ID NO: 7400 - DNA, 396 bp, synthetic construct; identical to SEQ ID NO: 7399
  misc_feature 1..396: note = source = /note="Description of Artificial Sequence: Synthetic coding sequence"
  source 1..396: mol_type = other DNA

SEQ ID NO: 7401 - DNA, 312 bp, synthetic construct; identical to SEQ ID NO: 7320
  misc_feature 1..312: note = source = /note="Description of Artificial Sequence: Synthetic coding sequence"
  source 1..312: mol_type = other DNA

SEQ ID NO: 7402 - DNA, 312 bp, synthetic construct; identical to SEQ ID NO: 7320
  misc_feature 1..312: note = source = /note="Description of Artificial Sequence: Synthetic coding sequence"
  source 1..312: mol_type = other DNA

SEQ ID NO: 7403 - DNA, 1404 bp, synthetic construct
  misc_feature 1..1404: note = source = /note="Description of Artificial Sequence: Synthetic coding sequence"
  source 1..1404: mol_type = other DNA
atgctgggcatctggatcgtggccttcctgttcttcggcaccagccggggcaaggaggtgtgctatgaaaggctgggctgcttcaaggatggcctgccctggaccaggaccttcagcacagagctggtgggcctgccctggagccctgagaagatcaacacccgcttcctgctgtacaccatccacaaccccaatgcctaccaggagatctctgctgtgaacagcagcaccatccaggccagctactttggaacagacaagatcacccgcatcaacattgctggctggaagacagatggcaagtggcagagggacatgtgcaatgtgctgctgcagctggaggacatcaactgcatcaacctggactggatcaatggcagccgggagtacatccatgctgtgaacaacctgcgggtggtgggcgctgaggtggcctacttcattgatgtgctgatgaagaagtttgagtacagccccagcaaggtgcacctgattggccacagcctgggcgcccacctggccggggaggccggcagccgcatccctggcctgggccgcatcaccggcctggaccctgctggccccttcttccacaacacccccaaggaggtgcggctggaccccagtgatgccaactttgtggatgtgatccacaccaatgctgcccgcatcctgtttgagctgggcgtgggcaccattgatgcctgtggccacctggacttctaccccaacggcggcaagcacatgcctggctgtgaagatctcatcacccccctgctgaagttcaacttcaatgcctacaagaaggagatggccagcttctttgactgcaaccacgcccggagctaccagttctatgcagagagcatcctgaacccagatgccttcatcgcctacccctgccgcagctacaccagcttcaaggccggcaactgcttcttctgcagcaaggagggctgccccaccatgggccactttgctgaccgcttccacttcaagaacatgaagaccaacggcagccactacttcctgaacacaggcagcctgagcccctttgcccgctggaggcacaagctgtctgtgaagctgagcggcagcgaggtgacccagggcaccgtcttcctgcgggtgggcggcgctgtgaggaagacaggagaatttgccatcgtgtctgggaagctggagcccggcatgacctacaccaagctgattgatgctgatgtgaatgtgggcaacatcacctctgtgcagttcatctggaagaagcacctgtttgaggacagccagaacaagctgggcgctgagatggtgatcaacaccagcggcaagtatggctacaagagcaccttctgcagccaggacatcatgggccccaacatcctgcagaacctgaagccctgctag

SEQ ID NO: 7404 - DNA, 1287 bp, synthetic construct
  misc_feature 1..1287: note = source = /note="Description of Artificial Sequence: Synthetic coding sequence"
  source 1..1287: mol_type = other DNA
atgatcactggagtcttctccatgaggctgtggacccctgtgggcgtgctgaccagcctggcctactgcctgcaccagaggagagtggccctggccgagctgcaggaggctgatggccagtgccctgtggacaggagcctgctgaagctgaagatggtgcaggtggtgttcagacatggagcccggagccccctgaagcccctgcccctggaggagcaggtggagtggaacccccagctgctggaggtgcccccccagacccagtttgactacacagtgaccaacctggccggcggccccaagccctacagcccctatgacagccagtaccacgagaccaccctgaagggcggcatgtttgctggccagctgaccaaggtgggcatgcagcagatgtttgccctgggggagcggctgaggaagaactacgtggaggacatccccttcctgagccccaccttcaacccccaggaggtgttcatccgcagcaccaacatcttcaggaacctggagagcacccgctgcctgctggccggcctcttccagtgccagaaggagggccccatcatcatccacacagatgaggccgacagcgaggtgctgtaccccaactaccagagctgctggagcctgcggcagaggacccggggccggcggcagacagccagcctgcagcccggcatcagcgaggacctgaagaaggtgaaggacaggatgggcatcgacagcagtgacaaggtggacttcttcatcctgctggacaacgtggccgctgagcaggcccacaacctgcccagctgccccatgctgaagagatttgccaggatgattgagcagagagctgtggacaccagcctgtacatcctgcccaaggaggaccgggagagcctgcagatggctgtgggccccttcctgcacatcctggagagcaacctgctgaaggctgtggacagcgccacagccccagacaagatcaggaagctgtacctgtatgctgcccatgatgtgaccttcatccccctgctgatgaccctgggcatctttgaccacaagtggcccccatttgctgtggacctgaccatggagctgtaccagcacctggagagcaaggagtggtttgtgcagctgtactaccacggcaaggagcaggtgccccggggctgcccagatggcctgtgccccctggacatgttcctgaatgccatgtctgtgtacaccctgagccctgagaagtaccacgccctgtgcagccagacccaggtgatggaggtgggcaatgaggagtag

SEQ ID NO: 7405 - DNA, 711 bp, synthetic construct; identical to SEQ ID NO: 7362
  misc_feature 1..711: note = source = /note="Description of Artificial Sequence: Synthetic coding sequence"
  source 1..711: mol_type = other DNA

SEQ ID NO: 7406 - DNA, 990 bp, synthetic construct
  misc_feature 1..990: note = source = /note="Description of Artificial Sequence: Synthetic coding sequence"
  source 1..990: mol_type = other DNA
atggtgaccaaggcctttgtgctgctggccatctttgctgaggccagcgccaagagctgtgcccccaacaaggcagatgtgatcctggtgttctgctaccccaagaccatcatcaccaagatcccagaatgtccctacggctgggaggtgcaccagctggccctgggcggcctgtgctacaatggagtgcatgagggcggctactaccagtttgtgatcccagacctgagccccaagaacaagagctactgcggcacccagagcgagtacaagccacccatctaccacttctacagccacatcgtgtccaatgacaccaccgtgattgtgaagaaccagcctgtgaactacagcttcagctgcacctaccacagcacctacctggtgaaccaggccgcctttgaccagagggtggccaccgtgcacgtgaagaatggctccatgggcacctttgagagccagctgagcctgaacttctacaccaatgccaagttcagcatcaagaaggaggccccctttgtgctggaggccagcgagatcggcagtgacctgtttgctggggtggaggccaagggcctgagcatccgcttcaaggtggtgctgaacagctgctgggccaccccatctgctgacttcatgtaccccctgcagtggcagctgatcaacaagggctgccccacagatgagaccgtgctggtgcatgaaaatggccgggaccaccgggccaccttccagttcaatgccttccgcttccagaacatccccaagctgagcaaggtgtggctgcactgtgagaccttcatctgtgacagcgagaagctgagctgccctgtgacctgtgacaagaggaagaggctgctgcgggaccagacaggaggagtgctggtggtggagctgagcctgcggagccggggcttcagcagcctgtacagcttcagtgatgtgctgcaccacctgatcatgatgctgggcatctgtgctgtgctgtag

SEQ ID NO: 7407 - DNA, 1161 bp, synthetic construct
  misc_feature 1..1161: note = source = /note="Description of Artificial Sequence: Synthetic coding sequence"
  source 1..1161: mol_type = other DNA
atggcccagtggcactgcagccagaggacccaggccggcggccatggagtgggggagcggctggcccagtgccaggaccagagcagcagacatgctgctgagctgcgggacttcaagaacaagatgctgcccctgctggaggtggccgagaaggagcgggaggccctgaggacagaggccgacaccatcagcggccgggtggaccggctggagcgggaggtggactacctggagacccagaacccagccctgccctgtgtggagtttgatgagaaggtgactggaggccctggcaccaagggcaagggcagaagaaatgagaagtatgacatggtgacagactgtggctacaccatcagccaggtgcgctccatgaagatcctgaagagatttggaggccctgctggcctgtggaccaaggaccccctgggccagacagagaagatctacgtgctggatggcacccagaatgacacagcctttgtgttcccccggctgcgggacttcaccctggccatggccgccaggaaggccagccgggtgcgggtgcccttcccctgggtgggcaccggccagctggtgtatggaggcttcctgtactttgcccggcggcccccaggccggcctgggggcggcggggagatggagaacaccctgcagctgatcaagttccacctggccaacagaacagtggtggacagctctgtgtttcctgctgagggcctcatccccccctacggcctgacagctgacacctacatcgacctggccgcagatgaggagggcctgtgggccgtgtatgccaccagagaagatgacagacacctgtgcctggccaagctggacccccagaccctggacacagagcagcagtgggacaccccctgccccagagaaaatgctgaggccgcctttgtgatctgtggcaccctgtatgtggtgtacaacaccaggcctgccagccgggcccgcatccagtgcagctttgatgccagcggcaccctgaccccagagcgggccgccctgccctacttccccaggagatatggagcccacgccagcctgcgctacaacccccgggagcggcagctgtatgcctgggatgatggctaccagatcgtgtacaagctggagatgaggaagaaggaggaggaggtgtag

SEQ ID NO: 7408 - DNA, 510 bp, synthetic construct
  misc_feature 1..510: note = source = /note="Description of Artificial Sequence: Synthetic coding sequence"
  source 1..510: mol_type = other DNA
atgtctgagcgggtggagaggaactggagcactggaggctggctgctggccctgtgcctggcctggctgtggacccacctgaccctggccgccctgcagcccccaacagccaccgtgctggtgcagcagggcacctgtgaggtgattgctgcccaccgctgctgcaacagaaaccgcatcgaggagaggagccagacagtgaagtgcagctgcttcagcggccaggtggccggcaccacccgggccaagcccagctgtgtggatgacctgctgctggccgcccactgtgcccggcgggaccccagggctgccctgcggctgctgctgccccagccccccagcagctgcagagatggcggcgtgcgctggagccctgcctgccggggccgctctgtgcgctgcagcaggacctgcagagatggagctgctgctgtggacaccaagagcaagcccccaagaagccatgacagctcctggggcagcaggcctggccaggagcggctggactag

SEQ ID NO: 7409 - DNA, 693 bp, synthetic construct; identical to SEQ ID NO: 7341
  misc_feature 1..693: note = source = /note="Description of Artificial Sequence: Synthetic coding sequence"
  source 1..693: mol_type = other DNA

SEQ ID NO: 7410 - DNA, 1176 bp, synthetic construct
  misc_feature 1..1176: note = source = /note="Description of Artificial Sequence: Synthetic coding sequence"
  source 1..1176: mol_type = other DNA
atgctgcggcctgggggcgctgaggaggccgcccagctgcccctgcggcgggccagcgcccctgtgcctgtgcccagccctgctgccccagatggcagccgggccagcgcccggctgggcctggcctgcctgctgctgctgctgctgctgaccctgcctgcccgggtggacacctcctggtggtacatcggggccctgggcgcccgggtcatctgtgacaacatccctggcctggtgtcccggcagaggcagctgtgccagcgctacccagacatcatgaggtctgtgggggagggcgcccgggagtggatccgggagtgccagcaccagttccgccaccaccgctggaactgcaccaccctggaccgggaccacacagtgtttggccgggtgatgctgcggagcagccgggaggccgcctttgtgtatgccatcagcagcgctggggtggtgcacgccatcacccgggcctgcagccagggcgagctgtctgtgtgcagctgtgacccctacacccggggccgccaccacgaccagagaggagactttgactggggcggctgcagcgacaacatccactacggcgtgcgctttgccaaggcctttgtggatgccaaggagaagaggctgaaggatgcccgggccctgatgaacctgcacaacaacagatgtggccgcacagctgtgcggcgcttcctgaagctggagtgcaagtgccacggcgtgtctggcagctgcaccctgcggacctgctggagggccctgagtgacttcagaagaactggagactacctgcggaggagatatgatggagctgtgcaggtgatggccacccaggatggagccaacttcaccgctgcccggcagggctaccgccgggccaccaggacagacctggtgtactttgacaacagcccagactactgtgtgctggacaaggctgctggcagcctgggcacagctggccgggtgtgcagcaagaccagcaagggcacagatggctgtgagatcatgtgctgcggccggggctatgacaccaccagggtgaccagggtgacccagtgtgagtgcaagttccactggtgctgtgctgtgcgctgcaaggaatgtagaaacacagtggatgtgcacacctgcaaggcccccaagaaggccgagtggctggaccagacctag

SEQ ID NO: 7411 - DNA, 1119 bp, synthetic construct
  misc_feature 1..1119: note = source = /note="Description of Artificial Sequence: Synthetic coding sequence"
  source 1..1119: mol_type = other DNA
atgctggatggcctgggcgtggtggccatcagcatcttcggcatccagctgaagacagagggcagcctgaggacagctgtgcccggcatccccacccagagcgccttcaacaagtgcctgcagcgctacatcggggccctgggcgcccgggtcatctgtgacaacatccctggcctggtgtcccggcagaggcagctgtgccagcgctacccagacatcatgaggtctgtgggggagggcgcccgggagtggatccgggagtgccagcaccagttccgccaccaccgctggaactgcaccaccctggaccgggaccacacagtgtttggccgggtgatgctgcggagcagccgggaggccgcctttgtgtatgccatcagcagcgctggggtggtgcacgccatcacccgggcctgcagccagggcgagctgtctgtgtgcagctgtgacccctacacccggggccgccaccacgaccagagaggagactttgactggggcggctgcagcgacaacatccactatggagtgcgctttgccaaggcctttgtggatgccaaggagaagaggctgaaggatgcccgggccctgatgaacctgcacaacaacagatgtggccgcacagctgtgcggcgcttcctgaagctggagtgcaagtgccacggcgtgtctggcagctgcaccctgcggacctgctggagggccctgagtgacttccggaggactggagactacctgcggcggcgctatgatggagctgtgcaggtgatggccacccaggatggagccaacttcaccgctgcccggcagggctacagaagagccaccaggacagacctggtgtactttgacaacagcccagactactgtgtgctggacaaggccgccggcagcctgggcacagctggccgggtgtgcagcaagaccagcaaaggaacagatggctgtgagatcatgtgctgcggccggggctatgacaccaccagggtgaccagggtgacccagtgtgagtgcaagttccactggtgctgtgctgtgcgctgcaaggagtgcaggaacacagtggatgtgcacacctgcaaggcccccaagaaggccgagtggctggaccagacctag

SEQ ID NO: 7412 - DNA, 1242 bp, synthetic construct
  misc_feature 1..1242: note = source = /note="Description of Artificial Sequence: Synthetic coding sequence"
  source 1..1242: mol_type = other DNA
atggagaacatgctgctgtggctgatcttcttcaccccaggctggaccctgattgatggcagcgagatggagtgggacttcatgtggcacctgaggaaggtgcccagaattgtgtctgagaggaccttccacctgaccagccctgcctttgaagcagatgccaagatgatggtgaacacagtgtgtggcatcgagtgccagaaggagctgcccacccccagcctgtctgagctggaggactacctgtcctatgagaccgtgtttgaaaatggcaccaggaccctgaccagggtgaaggtgcaggacctggtgctggagcccacccagaacatcaccaccaagggcgtgtctgtgcggaggaagaggcaggtgtatggaacagacagccgcttcagcatcctggacaagcgcttcctgaccaacttccccttcagcacagctgtgaagctgagcacaggctgcagcggcatcctgatcagcccccagcacgtgctgacagctgcccactgtgtgcatgatggcaaggactatgtgaagggcagcaagaagctgcgggtgggcctgctgaagatgaggaacaagagcggcggcaagaagaggcggggcagcaagaggagcagaagagaggccagcggcggggaccagcgggagggcacccgggagcacctgcgggagcgggccaagggcggcagaagaaggaagaagagcggccggggccagagaattgctgagggccggcccagcttccagtggaccagggtgaagaacacccacatccccaagggctgggcccggggcggcatgggagatgccaccctggactatgactatgccctgctggagctgaagagggcccacaagaagaagtacatggagctgggcatcagccccaccatcaagaagatgcctgggggcatgatccacttcagcggctttgacaatgacagagctgaccagctggtgtaccgcttctgcagcgtgtctgatgagagcaatgacctgctgtaccagtactgtgatgctgagagcggcagcacaggcagcggcgtgtacctgcggctgaaggaccctgacaagaagaactggaagaggaagatcatcgctgtgtacagcggccaccagtgggtggatgtgcatggagtgcagaaggactacaacgtggccgtgcgcatcacccccctgaagtatgcccagatctgcctgtggatccacggcaatgatgccaactgtgcctacggctag

SEQ ID NO: 7413 - DNA, 1143 bp, synthetic construct
  misc_feature 1..1143: note = source = /note="Description of Artificial Sequence: Synthetic coding sequence"
  source 1..1143: mol_type = other DNA
atgggcgccaccaccatggaccagaagagcctgtgggccggcagcgcctacaagctggtgtgctacttcaccaactggagccaggaccggcaggagcccgggaagttcaccccagaaaatattgaccccttcctgtgcagccacctgatctacagctttgccagcattgagaacaacaaggtgatcatcaaggacaagtctgaggtgatgctgtaccagaccatcaacagcctgaagaccaagaaccccaagctgaagatcctgctgagcattggaggctacctgtttggcagcaagggcttccaccccatggtggacagcagcaccagccggctggagttcatcaacagcatcatcctcttcctgaggaaccacaactttgatggcctggatgtgtcctggatctacccagaccagaaggagaacacccacttcaccgtgctgatccacgagctggccgaggccttccagaaggacttcaccaagagcaccaaggagcggctgctgctgacagctggggtgtctgctggccggcagatgattgacaacagctaccaggtggagaagctggccaaggacctggacttcatcaacctgctgagctttgacttccacggctcctgggagaagcccctcatcaccggccacaacagccccctgagcaagggctggcaggaccggggccccagcagctactacaacgtggagtatgctgtgggctactggatccacaagggcatgcccagcgagaaggtggtgatgggcatccccacctacggccacagcttcaccctggccagcgctgagaccaccgtgggcgccccagccagcggccctggagctgctggccccatcacagagagcagcggcttcctggcctactatgagatctgccagttcctgaagggggccaagatcacccggctgcaggaccagcaggtgccctatgctgtgaagggcaaccagtgggtgggctatgatgatgtgaagtccatggagaccaaggtgcagttcctgaagaacctgaacctgggcggggccatgatctggagcattgacatggatgacttcaccgggaagagctgcaaccagggcccctaccccctggtgcaggccgtgaagaggagcctgggcagcctgtag

SEQ ID NO: 7414 - DNA, 1173 bp, synthetic construct
  misc_feature 1..1173: note = source = /note="Description of Artificial Sequence: Synthetic coding sequence"
  source 1..1173: mol_type = other DNA
atgggcgccaccaccatggaccagaagagcctgtgggccggcgtggtggtgctgctgctgctgcagggcggcagcgcctacaagctggtgtgctacttcaccaactggagccaggaccggcaggagcccgggaagttcaccccagaaaatattgaccccttcctgtgcagccacctgatctacagctttgccagcattgagaacaacaaggtgatcatcaaggacaagtctgaggtgatgctgtaccagaccatcaacagcctgaagaccaagaaccccaagctgaagatcctgctgagcattggaggctacctgtttggcagcaagggcttccaccccatggtggacagcagcaccagccggctggagttcatcaacagcatcatcctcttcctgaggaaccacaactttgatggcctggatgtgtcctggatctacccagaccagaaggagaacacccacttcaccgtgctgatccacgagctggccgaggccttccagaaggacttcaccaagagcaccaaggagcggctgctgctgacagctggggtgtctgctggccggcagatgattgacaacagctaccaggtggagaagctggccaaggacctggacttcatcaacctgctgagctttgacttccacggctcctgggagaagcccctcatcaccggccacaacagccccctgagcaagggctggcaggaccggggccccagcagctactacaacgtggagtatgctgtgggctactggatccacaagggcatgcccagcgagaaggtggtgatgggcatccccacctacggccacagcttcaccctggccagcgctgagaccaccgtgggcgccccagccagcggccctggagctgctggccccatcacagagagcagcggcttcctggcctactatgagatctgccagttcctgaagggggccaagatcacccggctgcaggaccagcaggtgccctatgctgtgaagggcaaccagtgggtgggctatgatgatgtgaagtccatggagaccaaggtgcagttcctgaagaacctgaacctgggcggggccatgatctggagcattgacatggatgacttcaccgggaagagctgcaaccagggcccctaccccctggtgcaggccgtgaagaggagcctgggcagcctgtag

SEQ ID NO: 7415 - DNA, 2202 bp, synthetic construct
  misc_feature 1..2202: note = source = /note="Description of Artificial Sequence: Synthetic coding sequence"
  source 1..2202: mol_type = other DNA
atggccggcggccgggagacctgcctgcccctcatcggcttcatcctgatctgcctgaagatggtggccagcgccaagagcgcccctgagatccccaccatcgaccaggcctacagcaagctgagcaacagcatcaccgtggagtgggccaccgtgcctggggccaccagctacctgctgacagcagaagatggagacacagtgattgagaccaccgtggccaacagccctggcaccgtgacaggcctgaaggccgccacctggtatgagatcaccatccgcagcatctctgctgctggccgcagccaggccagcccccccaagcaggccaagacagtgctggccgcccccatcctggaggtgagcagccccagcagtgacagcatcctggtgcagtgggaggccgtgtacatggccatcgccttctctgtgtccatcatgagggccaacggcctgggcagcatctggaaggagaacaccaccaacaccagcctgaccttcaccagcctggaggccggcaccctgtacaccatcaaggcctatgcctggaatgccaaccgcatccctggagatgacagcacctgcaaccagaggaccagcccccgggccccagccaacatccaggtgtcctttgattctggggccctgaaggccagcttctcctgggcccgggcagagggcgccttcaactacacagtgatggccctgagtgacagcagcgagctgacctgcagcaccaccttcagcagctgcaccatcagcagcctgcagtgtggcacagagtacctgatctctgtgctggccagcaatgatgctggcagcagcaagagcagcagcgccatgaccctgaagacagtggcctgtgcccctggccgggtgaccatccaggaggaccccccaggccacctgtctgtggcctggagctctgtggacctgggggactactacgtggtgtttgtgaagagtgatgatggcctggaggtgcactgcaacaccagcctgacccagtgcaacttcctgtctgaatgtggcttcacctacttcatctctgtgtttgtgtacaacaaggccggccagagccccctgggggacatcttcaactacaccacagccccctgctgccccagcgacatcaaccctgtgctggtgtccagtgacagagtggagatcgtgtggagccctgtgagaggagctgagctgtatgagaccaaggctgtggatggctacaacatggtggagtgcaatgacaccaccccagcctgcaccctgagcgccctggagtgtgacaccaagtacaacatcaccgtgtacagcttcaatgaggtgcggggcagcaacatgagctgcaccccccagttcatcaccacagccccctgcagccctgagatcaagaatgtgtccagagatgccttctccatgatcaacgtgcactggaggagcaccaatgatgatgccacctacacagtgacagcccagggcgagaagggcctgtaccagtgcagcagcactggagagagctgcaccatgaggggcctgccctgtggcagcgtcttctctgtgacagctgtggccgagacccaggccggccgcagcctgcccagctacagcgtgcccctggagaccgtgccctgctgccccaccggcctgactgtgacccagatcacccagagcgtcatcaacgtgtcctggaccatcggccgggtggcccagacccacgtggccgtgctggagagccacacaggccagagcaagtgccacacccaccagaaccactgcctgctgggctgcatcacctgtggcatcaactacacagtgaccctgaaggccatcagcgccaccggcctgacagctgactgcagctaccagagctacttcagcggggcctgctgccccctgggcgtgaagctgtaccgcctgggccccaacggcatccgcatctactggcaggccagccggggcagcgccaactacagcacagacctgtatggcagcaagggcatcttcacctgcaccccatctgctggcctgtccttctgtgatgtgacagagatcccctgtggagatgtgtacacagtgatggtgtcccctgtggccaagacaggcctgaagctgaccttctgccccaagaagatctacagcgtgacctgcagcggcagcaccctgggcatggtgatctaccggggcaagagaaatgaggagtag

SEQ ID NO: 7416 - DNA, 555 bp, synthetic construct
  misc_feature 1..555: note = source = /note="Description of Artificial Sequence: Synthetic coding sequence"
  source 1..555: mol_type = other DNA
atgaggggccagggcaggaaggagagcctgagtgacagccgggacctggatggcagctatgaccagctgacagacagcgtggatgatgaatttgagctgagcacagtgtgccacaggcctgagggcctggagcagctgcaggagcagaccaagttcaccaggaaggagctgcaggtgctgtaccggggcttcaagaatgaatgtcccagcggcatcgtgaatgaggagaacttcaagcagatctacagccagttcttcccccagggcgacagcagcacctacgccaccttcctgttcaatgcctttgacaccaaccatgatggctctgtgtcctttgaggagatgctggacatcatgaagagcatctatgacatgatgggcaagtacacctacccagccctgcgggaggaggccccccgggagcacgtggagagcttcttccagaagatggacaggaacaaggatggagtggtgaccatcgaggagttcatcgagagctgccagaaggatgagaacatcatgaggtccatgcagctgtttgacaacgtcatctag

SEQ ID NO: 7417 - DNA, 759 bp, synthetic construct
  misc_feature 1..759: note = source = /note="Description of Artificial Sequence: Synthetic coding sequence"
  source 1..759: mol_type = other DNA
atgaggggccagggcaggaaggagagcctgagtgacagccgggacctggatggcagctatgaccagctgaccggccaccccccaggccccaccaagaaggccctgaagcagcgcttcctgaagctgctgccctgctgcggcccccaggccctgcccagcgtgtctgagagcaatgtggatgatgaatttgagctgagcacagtgtgccacaggcctgagggcctggagcagctgcaggagcagaccaagttcaccaggaaggagctgcaggtgctgtaccggggcttcaagaatgaatgtcccagcggcatcgtgaatgaggagaacttcaagcagatctacagccagttcttcccccagggcgacagcagcacctacgccaccttcctgttcaatgcctttgacaccaaccatgatggctctgtgtcctttgaagattttgtggccggcctgagcgtcatcctgcggggcaccgtggatgaccggctgaactgggccttcaacctgtatgacctgaacaaggatggctgcatcaccaaggaggagatgctggacatcatgaagagcatctatgacatgatgggcaagtacacctacccagccctgcgggaggaggccccccgggagcacgtggagagcttcttccagaagatggacaggaacaaggatggagtggtgaccatcgaggagttcatcgagagctgccagaaggatgagaacatcatgaggtccatgcagctgtttgacaacgtcatctag

SEQ ID NO: 7418 - DNA, 1377 bp, synthetic construct
  misc_feature 1..1377: note = source = /note="Description of Artificial Sequence: Synthetic coding sequence"
  source 1..1377: mol_type = other DNA
atgcaggccaccagcaacctgctgaacctgctgctgctgagcctgtttgctggcctggaccccagcaagacccagatcagccccaaggagggctggcaggtgtacagcagcgcccaggaccctgatggccgctgcatctgcaccgtggtggcccctgagcagaacctgtgcagcagagatgccaagagccggcagctgcggcagctgctggagaaggtgcagaacatgagccagagcattgaggtgctgaacctgcggacccagagggacttccagtatgtgctgaagatggagacccagatgaagggcctgaaggccaagttccggcagattgaagatgacaggaagaccctgatgaccaagcacttccaggagctgaaggagaagatggatgagctgctgcccctcatccctgtgctggagcagtacaagacagatgccaagctgatcacccagttcaaggaggagatccggaacctgtctgctgtgctgaccggcatccaggaggagattggagcctatgactatgaggagctgcaccagagggtgctgagcctggagacccggctgcgggactgcatgaagaagctgacctgtgggaagctgatgaagatcaccggccctgtgacagtgaagaccagcggcaccaggtttggagcctggatgacagaccccctggccagcgagaagaacaacagagtgtggtacatggacagctacaccaacaacaagatcgtgcgggagtacaagagcattgctgactttgtgtctggagctgagagcaggacctacaacctgcccttcaagtgggccggcaccaaccacgtggtgtacaacggcagcctgtacttcaacaagtaccagagcaacatcatcatcaagtacagctttgacatgggccgggtgctggcccagaggagcctggagtatgccggcttccacaacgtgtacccctacacctggggcggcttcagtgacatcgacctgatggctgatgagatcggcctgtgggccgtgtatgccaccaaccagaatgccggcaacatcgtcatcagccagctgaaccaggacaccctggaggtgatgaagtcctggagcacaggctaccccaagaggtctgctggggagagcttcatgatctgtggcaccctgtatgtgaccaacagccacctgaccggggccaaggtgtactacagctacagcaccaagaccagcacctatgagtacacagacatccccttccacaaccagtacttccacatctccatgctggactacaatgcccgggaccgggccctgtatgcctggaacaacggccaccaggtgctcttcaacgtgaccctcttccacatcatcaagacagaagatgacacctag

SEQ ID NO: 7419 - DNA, 915 bp, synthetic construct
  misc_feature 1..915: note = source = /note="Description of Artificial Sequence: Synthetic coding sequence"
  source 1..915: mol_type = other DNA
atgctgcccccacccaggcctgctgctgccctggccctgcctgtgctgctgctgctgctggtggtgctgaccccaccacccaccggggcccggcccagccctggccctgactacctgcggcggggctggatgaggctgctggccgagggggagggctgtgccccctgcaggcctgaggagtgtgccgccccccggggctgcctggccggccgggtgagagatgcctgtggctgctgctgggagtgtgccaacctggagggccagctgtgtgacctggaccccagcgcccacttctacggccactgtggggagcagctggagtgccgcctggacaccggcggggacctgagcagaggagaggtgcctgagcccctgtgtgcctgccgcagccagagccccctgtgtggcagtgatggccacacctacagccagatctgccgcctgcaggaggccgcccgggcccggccagatgccaacctgactgtggcccaccctggcccctgtgagagcggcccccagatcgtgagccacccctatgacacctggaatgtgacaggccaggacgtcatcttcggctgtgaggtgtttgcctaccccatggccagcattgagtggaggaaggatggcctggacatccagctgcctggagatgacccccacatctctgtgcagttccggggcggcccccagagatttgaggtgacaggctggctgcagatccaggccgtgcggcccagtgatgagggcacctaccgctgcctgggcagaaatgccctgggccaggtggaggccccagccagcctgactgtgctgaccccagaccagctgaacagcacaggcatcccccagctgcggagcctgaacctggtgcctgaggaggaggccgagagtgaagaaaatgatgactactactag

SEQ ID NO: 7420 - DNA, 327 bp, synthetic construct
  misc_feature 1..327: note = source = /note="Description of Artificial Sequence: Synthetic coding sequence"
  source 1..327: mol_type = other DNA
atgacccccagccggctgccctggctgctgtcctgggtgtctgccacagcctggagggctgcccggagccccctgctgtgccacagcctgaggaagaccagcagcagccagggcggcaagtctgagctggtgaagcagagcctgaagaagcccaagctgcctgagggccgctttgatgcccctgaggacagccacctggagaaggagcccctggagaagttcccagatgatgtgaaccctgtgaccaaggagaagggcggcccccggggccctgagcccacccgctacggggactgggagaggaagggccgctgcatcgacttctag

SEQ ID NO: 7421 - DNA, 663 bp, synthetic construct
  misc_feature 1..663: note = source = /note="Description of Artificial Sequence: Synthetic coding sequence"
  source 1..663: mol_type = other DNA
atggccggcctgagccggggcagcgcccgggccctgctggccgccctgctggccagcaccctgctggccctgctggtgtccccagcccggggccggggcggccgggaccatggagactgggatgaggccagccggctgccccccctgcccccaagagaagatgctgcccgggtggccaggtttgtgacccacgtgtctgactggggcgccctggccaccatcagcaccctggaggccgtgcggggccggccctttgctgatgtgctgagcctgagtgatggccccccaggggccggcagcggcgtgccctacttctacctgagccccctgcagctgtctgtgagcaacctgcaggagaacccctatgccaccctgaccatgaccctggcccagaccaacttctgcaagaagcacggctttgacccccagagccccctgtgtgtgcacatcatgctgtctggaacagtgaccaaggtgaatgaaacagagatggacatcgccaagcacagcctcttcatccgccaccctgagatgaagacctggcccagcagccacaactggttctttgccaagctgaacatcaccaacatctgggtgctggactactttggaggccccaagatcgtgaccccagaggagtactacaacgtgacagtgcagtag

SEQ ID NO: 7422 - DNA, 2760 bp, synthetic construct
  misc_feature 1..2760: note = source = /note="Description of Artificial Sequence: Synthetic coding sequence"
  source 1..2760: mol_type = other DNA
atgggcctcttccggggctttgtgttcctgctggtgctgtgcctgctgcaccagagcaacaccagcttcatcaagctgaacaacaatggatttgaggacatcgtcatcgtcatcgaccccagcgtgcctgaagatgagaagatcatcgagcagatcgaggacatggtgaccacagccagcacctacctgtttgaggccacagagaagcgcttcttcttcaagaatgtgtccatcctgatccctgagaactggaaggagaacccccagtacaagaggcccaagcatgagaaccacaagcatgctgatgtgattgtggccccacccaccctgcccggcagagatgagccctacaccaagcagttcacagaatgtggggagaagggggagtacatccacttcaccccagacctgctgctgggcaagaagcagaatgaatatggccccccaggcaagctgtttgtgcatgagtgggcccacctgcgctggggcgtgtttgatgagtacaatgaagaccagcccttctaccgggccaagagcaagaagattgaggccacccgctgcagcgctggcatcagcggcaggaacagagtgtacaagtgccagggcggcagctgcctgagccgggcctgcagaattgacagcaccaccaagctgtatggcaaggactgccagttcttcccagacaaggtgcagacagagaaggccagcatcatgttcatgcagagcattgattctgtggtggagttctgcaatgagaagacccacaaccaggaggcccccagcctgcagaacatcaagtgcaacttccgcagcacctgggaggtgatcagcaacagcgaggacttcaagaacaccatccccatggtgaccccacctcctcctcctgtgttcagcctgctgaagatcagccagagaattgtgtgcctggtgctggacaagagcggctccatgggcggcaaggaccggctgaacaggatgaaccaggccgccaagcacttcctgctgcagacagtggagaatggctcctgggtgggcatggtgcactttgacagcacagccaccatcgtgaacaagctgatccagatcaagagcagtgatgagaggaacaccctgatggccggcctgcccacctaccccctgggcggcaccagcatctgcagcggcatcaagtatgccttccaggtgattggagagctgcacagccagctggatggcagcgaggtgctgctgctgacagatggagaggacaacacagccagcagctgcattgatgaggtgaagcagagcggggccatcgtgcacttcatcgccctgggccgggcagcagatgaagctgtgattgagatgagcaagatcactggaggcagccacttctacgtgtctgatgaggcccagaacaacggcctgattgatgcctttggagccctgaccagcggcaacacagacctgagccagaagagcctgcagctggagagcaagggcctgaccctgaacagcaatgcctggatgaatgacaccgtcatcatcgacagcacagtgggcaaggacaccttcttcctgatcacctggaacagcctgcccccatccatcagcctgtgggaccccagcggcaccatcatggagaacttcaccgtggatgccaccagcaagatggcctacctgagcatccctggaacagccaaggtgggcacctgggcctacaacctgcaggccaaggccaaccctgagaccctgaccatcaccgtgaccagccgggccgccaacagctctgtgccccccatcaccgtgaatgccaagatgaacaaggatgtgaacagcttccccagccccatgattgtgtatgcagagatcctgcagggctacgtgcctgtgctgggcgccaacgtgacagccttcatcgagagccagaatggccacacagaggtgctggagctgctggacaacggggccggggctgacagcttcaagaatgatggagtgtacagccgctacttcaccgcctacacagaaaatggccgctacagcctgaaggtgcgggcccatggaggagccaacacagcccggctgaagctgcggccccccctgaacagagctgcctacatccctggctgggtggtgaatggagaaattgaggccaacccccccaggcctgagattgatgaggacacccagaccaccctggaggacttcagcaggacagccagcggcggggcctttgtggtgtcccaggtgcccagcctgcccctgcctgaccagtacccacccagccagatcacagacctggatgccaccgtgcatgaggacaagatcatcctgacctggacagcccctggggacaactttgatgtgggcaaggtgcagcgctacatcatccgcatcagcgccagcatcctggacctgcgggacagctttgatgatgccctgcaggtgaacaccacagacctgagccccaaggaggccaacagcaaggagagctttgccttcaagccagagaacatcagcgaggagaatgccacccacatcttcatcgccatcaagagcattgacaagagcaacctgaccagcaaggtgagcaacatcgcccaggtgaccctcttcatcccccaggccaacccagatgacatcgaccccacccccacccccacccccacccccaccccagacaagagccacaacagcggcgtgaacatcagcaccctggtgctgtctgtgattggctctgtggtgattgtgaacttcatcctgagcaccaccatctag

SEQ ID NO: 7423 - DNA, 1938 bp, synthetic construct
  misc_feature 1..1938: note = source = /note="Description of Artificial Sequence: Synthetic coding sequence"
  source 1..1938: mol_type = other DNA
atggcccccagcgctgaccccggcatgagcaggatgctgcccttcctgctgctgctgtggttcctgcccatcacagagggcagccagagagctgagcccatgttcaccgctgtgaccaacagcgtgctgcccccagactatgacagcaaccccacccagctgaactacggcgtggccgtgacagatgtggaccatgatggagactttgaaattgtggtggccggctacaacggccccaacctggtgctgaagtatgaccgggcccagaagaggctggtgaacattgctgtggatgagaggagcagcccctactatgccctgcgggaccggcagggcaatgccatcggcgtgacagcctgtgacattgatggagatggccgggaggagatctacttcctgaacaccaacaatgccttcagcggcgtggccacctacacagacaagctgttcaagttcaggaacaaccgctgggaggacatcctgagtgatgaggtgaatgtggcccggggcgtggccagcctgtttgctggccgctctgtggcctgtgtggacaggaagggcagcggccgctacagcatctacatcgccaactatgcctatggaaatgtgggcccagatgccctgattgagatggaccctgaggccagtgacctgagccggggcatcctggccctgagagatgtggccgctgaggccggcgtgtccaagtacacaggaggccggggcgtgtctgtgggccccatcctgagcagcagcgccagtgacatcttctgtgacaatgaaaatggccccaacttcctgttccacaacagaggagatggcacctttgtggatgctgctgccagcgctggggtggatgacccccaccagcacggccggggcgtggccctggccgacttcaacagagatggcaaggtggacatcgtgtatggcaactggaatggcccccaccggctgtacctgcagatgagcacccacggcaaggtgcgcttccgggacatcgccagccccaagttctccatgcccagccctgtgaggacagtcatcacagctgactttgacaatgaccaggagctggagatcttcttcaacaacatcgcctaccgcagcagcagcgccaacagactcttccgggtcatcagaagagagcacggggaccccctgattgaggagctgaaccctggagatgccctggagcctgagggccggggcactggaggagtggtgacagactttgatggagatggcatgctggacctgatcctgagccacggggagagcatggcccagcccctgtctgtgttccggggcaaccagggcttcaacaacaactggctgcgggtggtgcccaggaccaggtttggagcctttgcccggggggccaaggtggtgctgtacaccaagaagagcggggcccacctgcgcatcattgatggcggcagcggctacctgtgtgagatggagcctgtggcccacttcggcctgggcaaggatgaggccagctctgtggaggtgacctggccagatggcaagatggtgtccagaaatgtggccagcggggagatgaacagcgtgctggagatcctgtaccccagagatgaggacaccctgcaggaccctgcccccctggagtgtggccagggcttcagccagcaggagaatggccactgcatggacaccaatgaatgcatccagttcccctttgtgtgcccccgggacaagcctgtgtgtgtgaacacctacggcagctaccgctgcaggaccaacaagaagtgcagccggggctatgagcccaatgaagatggaacagcctgtgtggcccaggtggccttcctgggcggctacagcagcgctgccagccgcatcagcgagcccctgagccgggccagctacctgagcctgggcctgggcctgtgcctgcagctgtatgccctgtag

SEQ ID NO: 7424 - DNA, 1986 bp, synthetic construct
  misc_feature 1..1986: note = source = /note="Description of Artificial Sequence: Synthetic coding sequence"
  source 1..1986: mol_type = other DNA
atggcccccagcgctgaccccggcatgagcaggatgctgcccttcctgctgctgctgtggttcctgcccatcacagagggcagccagagagctgagcccatgttcaccgctgtgaccaacagcgtgctgcccccagactatgacagcaaccccacccagctgaactacggcgtggccgtgacagatgtggaccatgatggagactttgaaattgtggtggccggctacaacggccccaacctggtgctgaagtatgaccgggcccagaagaggctggtgaacattgctgtggatgagaggagcagcccctactatgccctgcgggaccggcagggcaatgccatcggcgtgacagcctgtgacattgatggagatggccgggaggagatctacttcctgaacaccaacaatgccttcagcggcgtggccacctacacagacaagctgttcaagttcaggaacaaccgctgggaggacatcctgagtgatgaggtgaatgtggcccggggcgtggccagcctgtttgctggccgctctgtggcctgtgtggacaggaagggcagcggccgctacagcatctacatcgccaactatgcctatggaaatgtgggcccagatgccctgattgagatggaccctgaggccagtgacctgagccggggcatcctggccctgagagatgtggccgctgaggccggcgtgtccaagtacacaggaggccggggcgtgtctgtgggccccatcctgagcagcagcgccagtgacatcttctgtgacaatgaaaatggccccaacttcctgttccacaacagaggagatggcacctttgtggatgctgctgccagcgctggggtggatgacccccaccagcacggccggggcgtggccctggccgacttcaacagagatggcaaggtggacatcgtgtatggcaactggaatggcccccaccggctgtacctgcagatgagcacccacggcaaggtgcgcttccgggacatcgccagccccaagttctccatgcccagccctgtgaggacagtcatcacagctgactttgacaatgaccaggagctggagatcttcttcaacaacatcgcctaccgcagcagcagcgccaacagactcttccgggtcatcagaagagagcacggggaccccctgattgaggagctgaaccctggagatgccctggagcctgagggccggggcactggaggagtggtgacagactttgatggagatggcatgctggacctgatcctgagccacggggagagcatggcccagcccctgtctgtgttccggggcaaccagggcttcaacaacaactggctgcgggtggtgcccaggaccaggtttggagcctttgcccggggggccaaggtggtgctgtacaccaagaagagcggggcccacctgcgcatcattgatggcggcagcggctacctgtgtgagatggagcctgtggcccacttcggcctgggcaaggatgaggccagctctgtggaggtgacctggccagatggcaagatggtgtccagaaatgtggccagcggggagatgaacagcgtgctggagatcctgtaccccagagatgaggacaccctgcaggaccctgcccccctggagtgtggccagggcttcagccagcaggagaatggccactgcatggacaccaatgaatgcatccagttcccctttgtgtgcccccgggacaagcctgtgtgtgtgaacacctacggcagctaccgctgcaggaccaacaagaagtgcagccggggctatgagcccaatgaagatggaacagcctgtgtgggcaccctgggccagagccctggcccccggcccaccacccccacagctgctgctgccacagctgctgctgctgctgctgctggagctgccacagctgcccctgtgctggtggatggagacctgaacctgggctctgtggtgaaggagagctgtgagcccagctgctag

SEQ ID NO: 7425 - DNA, 1230 bp, synthetic construct
  misc_feature 1..1230: note = source = /note="Description of Artificial Sequence: Synthetic coding sequence"
  source 1..1230: mol_type = other DNA
atggccctgaccccaggctggggcagcagcgctggccctgtgcggcctgagctgtggctgctgctgtgggccgccgcctggaggctgggcgccagcgcctgcccagccctgtgcacctgcaccggcaccaccgtggactgccacggcaccggcctgcaggccatccccaagaacatccccaggaacacagagcggctggagctgaatggaaacaacatcacccgcatccacaagaatgactttgctggcctgaagcagctgcgggtgctgcagctgatggagaaccagattggagctgtggagcggggggcctttgatgacatgaaggagctggagcggctgcggctgaacagaaaccagctgcacatgctgcctgagctgctcttccagaacaaccaggccctgagccggctggacctgtctgaaaatgccatccaggccatccccaggaaggccttccggggggccacagacctgaagaacctgcagctggacaagaaccagatcagctgcatcgaggagggcgccttccgggccctgcggggcctggaggtgctgaccctgaacaacaacaacatcaccaccatccctgtgagcagcttcaaccacatgcccaagctgcggaccttccggctgcacagcaaccacctgttctgtgactgccacctggcctggctgagccagtggctgcggcagaggcccaccatcggcctcttcacccagtgcagcggccctgccagcctgcggggcctgaatgtggccgaggtgcagaagtctgagttcagctgcagcggccagggcgaggccggccgggtgcccacctgcaccctgagcagcggcagctgcccagccatgtgcacctgcagcaatggcatcgtggactgccggggcaagggcctgacagccatcccagccaacctgcctgagaccatgacagagatccggctggagctgaatggcatcaagagcatccccccaggggccttcagcccctacaggaagctgcggagaattgacctgagcaacaaccagattgctgagatcgccccagatgccttccagggcctgcggagcctgaacagcctgcacacaggccctgtgacctgcccccacaccaccggcacccacagcagccactgccgggcctttgctgtggccgtgccccacagcagaaatgacctggaggccatgtttgaggaggaggtgccccgcatcttctacagcgcctag

SEQ ID NO: 7426 - DNA, 1143 bp, synthetic construct
  misc_feature 1..1143: note = source = /note="Description of Artificial Sequence: Synthetic coding sequence"
  source 1..1143: mol_type = other DNA
atggccctgaccccaggctggggcagcagcgctggccctgtgcggcctgagctgtggctgctgctgtgggccgccgcctggaggctgggcgccagcgcctgcccagccctgtgcacctgcaccggcaccaccgtggactgccacggcaccggcctgcaggccatccccaagaacatccccaggaacacagagcggctggagctgaatggaaacaacatcacccgcatccacaagaatgactttgctggcctgaagcagctgcgggtgctgcagctgatggagaaccagattggagctgtggagcggggggcctttgatgacatgaaggagctggagcggctggacctgtctgaaaatgccatccaggccatccccaggaaggccttccggggggccacagacctgaagaacctgcagctggacaagaaccagatcagctgcatcgaggagggcgccttccgggccctgcggggcctggaggtgctgaccctgaacaacaacaacatcaccaccatccctgtgagcagcttcaaccacatgcccaagctgcggaccttccggctgcacagcaaccacctgttctgtgactgccacctggcctggctgagccagtggctgcggcagaggcccaccatcggcctcttcacccagtgcagcggccctgccagcctgcggggcctgaatgtggccgaggtgcagaagtctgagttcagctgcagcggccagggcgaggccggccgggtgcccacctgcaccctgagcagcggcagctgcccagccatgtgcacctgcagcaatggcatcgtggactgccggggcaagggcctgacagccatcccagccaacctgcctgagaccatgacagagatccggctggagctgaatggcatcaagagcatccccccaggggccttcagcccctacaggaagctgcggagaattgacctgagcaacaaccagattgctgagatcgccccagatgccttccagggcctgcggagcctgaacagcctggtgctgtatggcaacaagatcacagacctgccccggggcgtgtttggaggcctgtacaccctgcagctgctgctgctgaatgccaacaagatcaactgcatccggccagatgccttccaggacctgtag

SEQ ID NO: 7427 - DNA, 2448 bp, synthetic construct
  misc_feature 1..2448: note = source = /note="Description of Artificial Sequence: Synthetic coding sequence"
  source 1..2448: mol_type = other DNA
atggccctgaccccaggctggggcagcagcgctggccctgtgcggcctgagctgtggctgctgctgtgggccgccgcctggaggctgggcgccagcgcctgcccagccctgtgcacctgcaccggcaccaccgtggactgccacggcaccggcctgcaggccatccccaagaacatccccaggaacacagagcggctggagctgaatggaaacaacatcacccgcatccacaagaatgactttgctggcctgaagcagctgcgggtgctgcagctgatggagaaccagattggagctgtggagcggggggcctttgatgacatgaaggagctggagcggctgcggctgaacagaaaccagctgcacatgctgcctgagctgctcttccagaacaaccaggccctgagccggctggacctgtctgaaaatgccatccaggccatccccaggaaggccttccggggggccacagacctgaagaacctgcagctggacaagaaccagatcagctgcatcgaggagggcgccttccgggccctgcggggcctggaggtgctgaccctgaacaacaacaacatcaccaccatccctgtgagcagcttcaaccacatgcccaagctgcggaccttccggctgcacagcaaccacctgttctgtgactgccacctggcctggctgagccagtggctgcggcagaggcccaccatcggcctcttcacccagtgcagcggccctgccagcctgcggggcctgaatgtggccgaggtgcagaagtctgagttcagctgcagcggccagggcgaggccggccgggtgcccacctgcaccctgagcagcggcagctgcccagccatgtgcacctgcagcaatggcatcgtggactgccggggcaagggcctgacagccatcccagccaacctgcctgagaccatgacagagatccggctggagctgaatggcatcaagagcatccccccaggggccttcagcccctacaggaagctgcggcgcatctgccccctgtccttctgcagcccctgccgggacctgagcaacaaccagattgctgagatcgccccagatgccttccagggcctgcggagcctgaacagcctggtgctgtatggcaacaagatcacagacctgccccggggcgtgtttggaggcctgtacaccctgcagctgctgctgctgaatgccaacaagatcaactgcatccggccagatgccttccaggacctgcagaacctgagcctgctgagcctgtatgacaacaagatccagagcctggccaagggcaccttcaccagcctgcgggccatccagaccctgcacctggcccagaaccccttcatctgtgactgcaacctgaagtggctggccgacttcctgcggaccaaccccatcgagaccagcggggcccgctgtgccagcccccggcggctggccaacaagagaattggccagatcaagagcaagaagttccgctgcagcgccaaggagcagtacttcatccctggaacagaggactaccagctgaacagcgagtgcaacagtgatgtggtgtgcccccacaagtgccgctgtgaggccaacgtggtggagtgcagcagcctgaagctgaccaagatccctgagcgcatcccccagagcacagctgagctgcggctgaacaacaatgagatcagcatcctggaggccaccggcatgttcaagaagctgacccacctgaagaagatcaacctgagcaacaacaaggtgtctgaaattgaagatggagcctttgaaggagctgcctctgtgtctgagctgcacctgacagccaaccagctggagagcatccgcagcggcatgttccggggcctggatggcctgcggaccctgatgctgaggaacaaccgcatcagctgcatccacaatgacagcttcaccggcctgagaaatgtgcggctgctgagcctgtatgacaaccagatcaccaccgtgtcccctggggcctttgacaccctgcagagcctgagcaccctgaacctgctggccaaccccttcaactgcaactgccagctggcctggctgggcggctggctgaggaagaggaagatcgtgactggaaacccccgctgccagaacccagacttcctgcggcagatccccctgcaggatgtggccttcccagacttccgctgtgaggagggccaggaggagggcggctgcctgccccggccccagtgcccccaggagtgtgcctgcctggacacagtggtgcgctgcagcaacaagcacctgcgggccctgcccaagggcatccccaagaatgtgacagagctgtacctggatggcaaccagttcaccctggtgcccggccagctgagcaccttcaagtacctgcagctggtgatcctgagctacaatgccctgcagtgcatcccccccctggccttccagtag

SEQ ID NO: 7428 - DNA, 4386 bp, synthetic construct
  misc_feature 1..4386: note = source = /note="Description of Artificial Sequence: Synthetic coding sequence"
  source 1..4386: mol_type = other DNA
atggccctgaccccaggctggggcagcagcgctggccctgtgcggcctgagctgtggctgctgctgtgggccgccgcctggaggctgggcgccagcgcctgcccagccctgtgcacctgcaccggcaccaccgtggactgccacggcaccggcctgcaggccatccccaagaacatccccaggaacacagagcggctggagctgaatggaaacaacatcacccgcatccacaagaatgactttgctggcctgaagcagctgcgggtgctgcagctgatggagaaccagattggagctgtggagcggggggcctttgatgacatgaaggagctggagcggctgcggctgaacagaaaccagctgcacatgctgcctgagctgctcttccagaacaaccaggccctgagccggctggacctgtctgaaaatgccatccaggccatccccaggaaggccttccggggggccacagacctgaagaacctgcagctggacaagaaccagatcagctgcatcgaggagggcgccttccgggccctgcggggcctggaggtgctgaccctgaacaacaacaacatcaccaccatccctgtgagcagcttcaaccacatgcccaagctgcggaccttccggctgcacagcaaccacctgttctgtgactgccacctggcctggctgagccagtggctgcggcagaggcccaccatcggcctcttcacccagtgcagcggccctgccagcctgcggggcctgaatgtggccgaggtgcagaagtctgagttcagctgcagcggccagggcgaggccggccgggtgcccacctgcaccctgagcagcggcagctgcccagccatgtgcacctgcagcaatggcatcgtggactgccggggcaagggcctgacagccatcccagccaacctgcctgagaccatgacagagatccggctggagctgaatggcatcaagagcatccccccaggggccttcagcccctacaggaagctgcggagaattgacctgagcaacaaccagattgctgagatcgccccagatgccttccagggcctgcggagcctgaacagcctggtgctgtatggcaacaagatcacagacctgccccggggcgtgtttggaggcctgtacaccctgcagctgctgctgctgaatgccaacaagatcaactgcatccggccagatgccttccaggacctgcagaacctgagcctgctgagcctgtatgacaacaagatccagagcctggccaagggcaccttcaccagcctgcgggccatccagaccctgcacctggcccagaaccccttcatctgtgactgcaacctgaagtggctggccgacttcctgcggaccaaccccatcgagaccagcggggcccgctgtgccagcccccggcggctggccaacaagagaattggccagatcaagagcaagaagttccgctgcagcgccaaggagcagtacttcatccctggaacagaggactaccagctgaacagcgagtgcaacagtgatgtggtgtgcccccacaagtgccgctgtgaggccaacgtggtggagtgcagcagcctgaagctgaccaagatccctgagcgcatcccccagagcacagctgagctgcggctgaacaacaatgagatcagcatcctggaggccaccggcatgttcaagaagctgacccacctgaagaagatcaacctgagcaacaacaaggtgtctgaaattgaagatggagcctttgaaggagctgcctctgtgtctgagctgcacctgacagccaaccagctggagagcatccgcagcggcatgttccggggcctggatggcctgcggaccctgatgctgaggaacaaccgcatcagctgcatccacaatgacagcttcaccggcctgagaaatgtgcggctgctgagcctgtatgacaaccagatcaccaccgtgtcccctggggcctttgacaccctgcagagcctgagcaccctgaacctgctggccaaccccttcaactgcaactgccagctggcctggctgggcggctggctgaggaagaggaagatcgtgactggaaacccccgctgccagaacccagacttcctgcggcagatccccctgcaggatgtggccttcccagacttccgctgtgaggagggccaggaggagggcggctgcctgccccggccccagtgcccccaggagtgtgcctgcctggacacagtggtgcgctgcagcaacaagcacctgcgggccctgcccaagggcatccccaagaatgtgacagagctgtacctggatggcaaccagttcaccctggtgcccggccagctgagcaccttcaagtacctgcagctggtggacctgagcaacaacaagatcagcagcctgagcaacagcagcttcaccaacatgagccagctgaccaccctcatcctgagctacaatgccctgcagtgcatcccccccctggccttccagggcctgcggagcctgcggctgctgagcctgcacggcaatgacatcagcaccctgcaggagggcatctttgctgatgtgaccagcctgagccacctggccatcggggccaaccccctgtactgtgactgccacctgcgctggctgagctcctgggtgaagacaggctacaaggagcccggcatcgcccgctgtgccggcccccaggacatggagggcaagctgctgctgaccaccccagccaagaagtttgagtgccagggcccccccaccctggccgtgcaggccaagtgtgacctgtgcctgagcagcccctgccagaaccagggcacctgccacaatgaccccctggaggtgtaccgctgtgcctgccccagcggctacaagggccgggactgtgaggtgtccctggacagctgcagcagcggcccctgtgaaaatggaggcacctgccacgcccaggagggagaagatgcccccttcacctgcagctgccccactggatttgagggccccacctgtggggtgaacacagatgactgtgtggaccacgcctgtgccaacggcggcgtgtgtgtggatggagtgggcaactacacctgccagtgccccctgcagtatgagggcaaggcctgtgagcagctggtggacctgtgcagcccagacctgaacccctgccagcacgaggcccagtgtgtgggcaccccagatggcccccgctgtgagtgcatgcctggctacgccggggacaactgcagcgagaaccaggatgactgccgggaccaccgctgccagaatggagcccagtgcatggatgaggtgaacagctacagctgcctgtgtgccgagggctacagcggccagctgtgtgagatccccccccacctgcctgcccccaagagcccctgtgagggcacagagtgccagaatggagccaactgtgtggaccagggcaacagacctgtgtgccagtgcctgcccggctttggaggcccagaatgtgagaagctgctgtctgtgaactttgtggaccgggacacctacctgcagttcacagacctgcagaactggccccgggccaacatcaccctgcaggtgtccacagctgaggacaatggcatcctgctgtacaacggggacaatgaccacatcgctgtggagctgtaccagggccacgtgcgggtgtcctatgaccccggcagctaccccagcagcgccatctacagcgctgagaccatcaatgatggccagttccacacagtggagctggtggcctttgaccagatggtgaacctgagcattgatggcggcagccccatgaccatggacaactttgggaagcactacaccctgaacagcgaggcccccctgtatgtgggcggcatgcctgtggatgtgaacagcgctgccttccggctgtggcagatcctgaatggcaccggcttccacggctgcatccggaacctgtacatcaacaatgagctgcaggacttcaccaagacccagatgaagccaggagtggtgcccggctgtgagccctgcaggaagctgtactgcctgcacggcatctgccagcccaatgccaccccaggccccatgtgccactgtgaggccggctgggtgggcctgcactgtgaccagcctgcagatggcccctgccacggccacaagtgtgtgcacggccagtgtgtgcccctggatgccctgagctacagctgccagtgccaggacggctacagcggggccctgtgcaaccagagccccagcgctgggggcaccctgagcggcaccttcaccaggagcagaggagccatgcccagcgcccggccccgggccccctgccacggctggagcgctggggcccgggcccaggcccgggccgccgcccgggccttcggctag

SEQ ID NO: 7429 - DNA, 570 bp, synthetic construct
  misc_feature 1..570: note = source = /note="Description of Artificial Sequence: Synthetic coding sequence"
  source 1..570: mol_type = other DNA
atggaggccaccggcacagatgaggtggacaagctgaagaccaagttcatcagcgcctggaacaacatgaagtacagctgggtgctgaagaccaagacctacttcagcaggaacagccctgtgctgctgctgggcaagtgctaccacttcaagtatgaagatgaggacaagaccctgcctgctgagagcggctgcaccatcgaggaccacgtgattgctggaaatgtggaggagttcaggaaggacttcatcagccgcatctggctgacctaccgggaggagttcccccagatcgagggcagcgccctgaccacagactgtggctggggctgcaccctgaggacaggccagatgctgctggcccagggcctcatcctgcacttcctgggccgggcctggacctggccagatgccctgaacatcgagaacagcgacagcgagagctggaccagccacacagtgaagaagttcaccgccagctttgaggccagcctgagcggggagcgggagttcaagacccccaccatcagcctgaaggagaccatcggcaagtacagtgatgaccactag

SEQ ID NO: 7430 - DNA, 1377 bp, synthetic construct; identical to SEQ ID NO: 7113
  misc_feature 1..1377: note = source = /note="Description of Artificial Sequence: Synthetic coding sequence"
  source 1..1377: mol_type = other DNA

SEQ ID NO: 7431 - DNA, 8178 bp, synthetic construct
  misc_feature 1..8178: note = source = /note="Description of Artificial Sequence: Synthetic coding sequence"
  source 1..8178: mol_type = other DNA
atggagcagacagactgcaagccctaccagcccctgcccaaggtgaagcatgagatggacctggcctacaccagcagcagtgatgaaagtgaagatggcaggaagccccggcagagctacaacagccgggagaccctgcacgagtacaaccaggagctgaggatgaactacaacagccagagcaggaagaggaaggaggtggagaagagcacccaggagatggagttctgtgagaccagccacaccctgtgcagcggctaccagacagacatgcacagcgtgtccagacatggctaccagctggagatgggcagtgatgtggacacagaaacagaaggagctgccagcccagaccacgccctgaggatgtggatccggggcatgaagtctgagcacagcagctgcctgagcagccgggccaacagcgccctgagcctgacagacacagaccacgagaggaagagtgatggagaaaatggcttcaagttcagccctgtgtgctgtgacatggaggcccaggccggcagcacccaggatgtgcagagcagcccccacaaccagttcaccttccggcccctgcccccacctcctcctcctcctcatgcctgcacctgtgccaggaagcccccacctgctgctgacagcctgcagaggaggtccatgaccaccaggagccagcccagccctgctgccccagccccacccaccagcacccaggacagcgtgcacctgcacaacagctgggtgctgaacagcaacatccccctggagaccaggcacttcctgttcaagcacggcagcggcagcagcgccatcttctctgctgccagccagaactaccccctgaccagcaacacagtgtacagccccccaccccggcccctgcccaggagcaccttcagcaggcctgccttcaccttcaacaagccctaccgctgctgcaactggaagtgcacagccctgagcgccacagccatcaccgtgaccctggccctgctgctggcctacgtgattgctgtgcacctgtttggcctgacctggcagctgcagcctgtggagggggagctgtatgccaatggagtgtccaaaggaaacagaggaacagagagcatggacaccacctacagccccatcggcggcaaggtgtctgacaagtctgagaagaaggtgttccagaagggccgggccatcgacacaggagaggtggacatcggggcccaggtgatgcagaccatccccccaggcctcttctggaggttccagatcaccatccaccaccccatctacctgaagttcaacatcagcctggccaaggacagcctgctgggcatctatggaagaagaaacatcccccccacccacacccagtttgattttgtgaagctgatggatggcaagcagctggtgaagcaggacagcaagggcagtgatgacacccagcacagccccaggaacctgatcctgaccagcctgcaggagaccggcttcatcgagtacatggaccagggcccctggtacctggccttctacaatgatggcaagaagatggagcaggtgtttgtgctgaccacagccatcgagatcatggatgactgcagcaccaactgcaatggaaatggagagtgcatcagcggccactgccactgcttccctggcttcctgggccctgactgtgcccgggacagctgccctgtgctgtgtggcggcaatggagaatatgagaagggccactgtgtgtgccgccacggctggaagggcccagaatgtgatgtgcctgaggagcagtgcatcgaccccacctgcttcggccacggcacctgcatcatgggcgtgtgcatctgtgtgcccggctacaagggggagatctgtgaggaggaggactgcctggaccccatgtgcagcaaccacggcatctgtgtgaagggggagtgccactgcagcacaggctggggcggcgtgaactgtgagacccccctgcctgtgtgccaggagcagtgcagcggccacggcaccttcctgctggatgctggggtgtgcagctgtgaccccaagtggacaggcagtgactgcagcacagagctgtgcaccatggagtgtggcagccacggcgtgtgcagccggggcatctgccagtgtgaggagggctgggtgggccccacctgtgaggagaggagctgccacagccactgcacagaacatggccagtgcaaggatggaaaatgtgagtgcagccctggctgggagggggaccactgcaccatcgcccactacctggatgctgtgagagatggctgccccggcctgtgctttggaaatggccgctgcaccctggaccagaatggctggcactgtgtgtgccaggtgggctggagcggcaccggctgcaatgtggtgatggagatgctgtgtggggacaacctggacaatgatggagatggcctgacagactgtgtggaccctgactgctgccagcagagcaactgctacatcagccccctgtgccagggcagcccagaccccctggacctgatccagcagagccagaccctcttcagccagcacaccagccgcctcttctatgaccgcatcaagttcctgattggcaaggacagcacccacgtgatccccccagaggtgtcctttgacagccggcgggcctgtgtgatccggggccaggtggtggccattgatggcacccccctggtgggcgtgaatgtgtccttcctgcaccacagcgactatggcttcaccatcagccggcaggacggcagctttgacctggtggccatcggcggcatcagcgtcatcctgatctttgacaggagccccttcctgcctgagaagaggaccctgtggctgccctggaaccagttcatcgtggtggagaaggtgaccatgcagagggtggtgtctgacccccccagctgtgacatcagcaacttcatcagccccaaccccatcgtgctgcccagccccctgaccagctttggaggcagctgcccagagcggggcaccatcgtgcctgagctgcaggtggtgcaggaggagatccccatccccagcagctttgtgcggctgagctacctgagcagcaggaccccaggctacaagaccctgctgcgcatcctgctgacccacagcaccatccctgtgggcatgatcaaggtgcacctgactgtggccgtggagggccgcctgacccagaagtggttccctgctgccatcaacctggtgtacacctttgcctggaacaagacagacatctacggccagaaggtgtggggcctggccgaggccctggtgtctgtgggctatgaatatgagacctgcccagacttcatcctgtgggagcagaggacagtggtgctgcagggctttgagatggatgccagcaacctgggcggctggagcctgaacaagcaccacatcctgaacccccagagcggcatcatccacaagggaaatggagagaacatgttcatcagccagcagccccctgtgatcagcaccatcatgggaaatggccaccagaggtctgtggcctgcaccaactgcaatggacctgcccacaacaacaagctgtttgcccctgtggccctggccagcggcccagatggctctgtgtatgtgggggacttcaactttgtgcggcgcatcttccccagcggcaacagcgtgtccatcctggagctgagcaccagccctgcccacaagtactacctggccatggaccctgtgtctgagagcctgtacctgagtgacaccaacaccaggaaggtgtacaagctgaagagcctggtggagaccaaggacctgagcaagaactttgaggtggtggccggcaccggggaccagtgcctgccctttgaccagagccactgtggagatggcggccgggccagcgaggccagcctgaacagcccccggggcatcaccgtggacagacatggcttcatctactttgtggatggcaccatgatcaggaagattgatgaaaatgctgtgatcaccaccgtcatcggcagcaatggcctgaccagcacccagcccctgagctgtgacagcggcatggacatcacccaggtgcggctggagtggcccacagacctggccgtgaaccccatggacaacagcctgtatgtgctggacaacaacatcgtgctgcagatcagcgagaacagaagagtgcgcatcatcgccggccggcccatccactgccaggtgcccggcatcgaccacttcctggtgtccaaggtggccatccacagcaccctggagagcgcccgggccatctctgtgagccacagcggcctgctcttcatcgccgagacagatgagaggaaggtgaaccgcatccagcaggtgaccaccaacggggagatctacatcatcgccggggcccccacagactgtgactgcaagattgaccccaactgtgactgcttctctggagatggcggctacgccaaggatgccaagatgaaggcccccagcagcctggccgtgtccccagatggcaccctgtatgtggccgacctgggcaatgtgcgcatccgcaccatcagcaggaaccaggcccacctgaatgacatgaacatctatgagatcgccagccctgctgaccaggagctgtaccagttcaccgtgaatggcacccacctgcacaccctgaacctgatcacccgggactatgtgtacaacttcacctacaacagcgagggggacctgggcgccatcaccagcagcaatggaaacagcgtgcacatcagaagagatgctgggggcatgcccctgtggctggtggtgcctgggggccaggtgtactggctgaccatcagcagcaatggagtgctgaagagggtgtctgcccagggctacaacctggccctgatgacctacccaggcaacacaggcctgctggccaccaagagcaatgaaaatggctggaccaccgtgtatgaatatgaccctgagggccacctgaccaatgccaccttccccaccggggaggtgtcctccttccacagcgacctggagaagctgaccaaggtggagctggacaccagcaaccgggagaatgtgctgatgagcaccaacctgacagccaccagcaccatctacatcctgaagcaggagaacacccagagcacctacagagtgaacccagatggcagcctgcgggtgacctttgccagcggcatggagatcggcctgagcagcgagccccacatcctggccggggctgtgaaccccaccctgggcaagtgcaacatcagcctgcctggagagcacaatgccaacctgattgagtggaggcagaggaaggagcagaacaagggaaatgtgtctgcctttgaaagaaggctgcgggcccacaacagaaacctgctgagcattgactttgaccacatcaccaggacaggcaagatctatgatgaccacaggaagttcaccctgcgcatcctgtatgaccagacaggccggcccatcctgtggagccctgtgagccgctacaatgaggtgaacatcacctacagccccagcggcctggtgaccttcatccagaggggcacctggaatgagaagatggagtatgaccagagcggcaagatcatcagcaggacctgggcagatggcaagatctggagctacacctacctggagaagtctgtgatgctgctgctgcacagccagaggcgctacatctttgaatatgaccagcctgactgcctgctgtctgtgaccatgcccagcatggtgcgccacagcctgcagaccatgctgtctgtgggctactacagaaacatctacaccccaccagacagcagcaccagcttcatccaggactacagcagagatggccgcctgctgcagaccctgcacctgggcaccggccggcgggtgctgtacaagtacaccaagcaggcccggctgtctgaggtgctgtatgacaccacccaggtgaccctgacctatgaggagagcagcggggtcatcaagaccatccacctgatgcatgatggcttcatctgcaccatccgctaccggcagacaggccccctcatcggccggcagatcttccgcttcagcgaggagggcctggtgaatgccaggtttgactacagctacaacaacttccgggtgacctccatgcaggccgtcatcaatgagacccccctgcccatcgacctgtaccgctacgtggatgtgtctggccgcacagagcagtttgggaagttcagcgtcatcaactatgacctgaaccaggtgatcaccaccaccgtgatgaagcacaccaagatcttcagcgccaacggccaggtgattgaggtgcagtatgagatcctgaaggccatcgcctactggatgaccatccagtatgacaacgtgggccgcatggtgatctgtgacatccgggtgggcgtggatgccaacatcacccgctacttctatgaatatgatgctgatggccagctgcagacagtgtctgtgaatgacaagacccagtggagatacagctatgacctgaatggaaacatcaacctgctgagccacggcaagagcgcccggctgacccccctgcgctatgacctgcgggaccgcatcacccggctgggggagatccagtacaagatggatgaagatggcttcctgcggcagagaggaaatgacatctttgagtacaacagcaatggcctgctgcagaaggcctacaacaaggccagcggctggacagtgcagtactactatgatggcctgggcagaagagtggccagcaagagcagcctgggccagcacctgcagttcttctacgccgacctgaccaaccccatccgggtgacccacctgtacaaccacaccagcagcgagatcaccagcctgtactatgacctgcagggccacctgattgccatggagctgagcagtggagaggagtactacgtggcctgtgacaacacaggcacccccctggccgtgttcagcagccggggccaggtgatcaaggagatcctgtacaccccctacggggacatctaccatgacacctacccagacttccaggtgatcatcggcttccacggcggcctgtatgacttcctgaccaagctggtgcacctgggccagagggactatgatgtggtggccggccgctggaccacccccaaccaccacatctggaagcagctgaacctgctgcccaagcccttcaacctgtacagctttgagaacaactaccctgtgggcaagatccaggatgtggccaagtacaccacagacatccgctcctggctggagctgtttggcttccagctgcacaacgtgctgcccggcttccccaagccagagctggagaacctggagctgacctatgagctgctgcggctgcagaccaagacccaggagtgggaccccgggaagaccatcctgggcatccagtgtgagctgcagaagcagctgaggaacttcatcagcctggaccagctgcccatgaccccccgctacaatgatggccgctgcctggagggcggcaagcagcccaggtttgctgctgtgcccagcgtgtttgggaagggcatcaagtttgccatcaaggatggcatcgtgacagctgacatcatcggcgtggccaatgaagacagccggcggctggccgccatcctgaacaatgcccactacctggagaacctgcacttcaccatcgagggccgggacacccactacttcatcaagctgggcagcctggaggaggacctggtgctgattggcaacacaggaggccgccgcatcctggagaatggagtgaatgtgacagtgtcccagatgacctctgtgctgaatggaagaacaagaagatttgctgacatccagctgcagcacggggccctgtgcttcaacatccgctatggcaccaccgtggaggaggagaagaaccacgtgctggagatcgcccggcagagagctgtggcccaggcctggaccaaggagcagaggcggctgcaggagggggaggagggcatccgggcctggacagaaggagagaagcagcagctgctgagcacaggccgggtgcagggctatgatggctactttgtgctgtctgtggagcagtacctggagctgagtgacagcgccaacaacatccacttcatgaggcagagcgagatcggcagaagatag

SEQ ID NO: 7432 - DNA, 204 bp, synthetic construct
  misc_feature 1..204: note = source = /note="Description of Artificial Sequence: Synthetic coding sequence"
  source 1..204: mol_type = other DNA
atgaagatccagctgttcttcttcatcctgcacttctgggtgaccatcctgcctgccaagaagaagtacccagaatatggcagcctggacctgcggcgggagtgcagaattggaaatggccagtgcaagaaccagtgccatgaaaatgagatcagaattgcctactgcatccggcccggcacccactgctgcctgcagcagtag

SEQ ID NO: 7433 - DNA, 831 bp, synthetic construct
  misc_feature 1..831: note = source = /note="Description of Artificial Sequence: Synthetic coding sequence"
  source 1..831: mol_type = other DNA
atgaagcagatcctgcacccagccctggagaccacagcctgcaccaaccacttcaatgctgacccctgcagcactggatttgtgtttcctgccatgaccctcttccctgtgctgctcttcctggtggccggcctgctgcccagcttccctgccaatgaagacaaggaccctgccttcaccgccctgctgaccacccagacccaggtgcagcgggagatcgtgaacaagcacaatgagctgcggcgggctgtgagccccccagccaggaacatgctgaagatggagtggaacaaggaggccgccgccaatgcccagaagtgggccaaccagtgcaactaccgccacagcaaccccaaggacaggatgaccagcctgaagtgtggagaaaatctctacatgagcagcgccagcagctcctggagccaggccatccagagctggtttgatgagtacaatgactttgattttggagtgggccccaagaccccaaatgctgtggtgggccactacacccaggtggtgtggtacagcagctacctggtgggctgtggaaatgcctactgccccaaccagaaggtgctgaagtactactacgtgtgccagtactgcccagctggcaactgggccaaccggctgtatgtgccctatgagcagggcgccccctgtgccagctgcccagacaactgtgatgatggcctgtgcaccaacggctgcaagtatgaagatctctacagcaactgcaagagcctgaagctgaccctgacctgcaagcaccagctggtgcgggacagctgcaaggccagctgcaactgcagcaacagcatctactag

SEQ ID NO: 7434 - DNA, 1350 bp, synthetic construct
  misc_feature 1..1350: note = source = /note="Description of Artificial Sequence: Synthetic coding sequence"
  source 1..1350: mol_type = other DNA
atgctggccgagtggggcgcctgcctgctgctggccgtggccctgctgggccctggcctgcaggcccaggccatggagggcgtgaagtgtggcggcgtgctgagcgcccccagcggcaacttcagcagccccaacttcccccggctgtacccctacaacacagaatgttcctggctgattgtggtggccgagggcagctctgtgctgctgaccttccacgcctttgacctggagtaccatgacacctgcagctttgacttcctggagatctacaacggggccagcccagacaagggcaacctgctgggccgcttctgtgggaaggtgcccccaccacccttcaccagctcctggcacgtgatgtctgtcatcttccacagcgacaagcacgtggccagccacggcttctctgctggctaccagaaggatgtgtgtggcggcgtgctgaccggcctgtctggagtgctgaccagccctgagtaccccaacaactaccccaacagcatggagtgccactgggtgatccgggccgccggccctgcccacgtgaagctggtgtttgtggacttccaggtggagggcaatgaagaatgtacctatgactatgtggccgtgctgggcggccctggccccacccggggccaccactactgcggcagcaccaggcctcccaccctggtgtccctgggccacgagctgcaggtggtgttcaagagtgacttcaacattggaggccggggcttcaaggcctactacttcagcggggagtgccaggaggtgtacatggccatgaggggcaacttcagcagcccccagtaccccagcagctaccccaacaacatccgctgccactggaccatccggctgcccccaggctaccaggtgaaggtgttcttcctggacctggacctggaggagcccaacagcctgaccaagacctgtgactttgaccacctggccgcctttgatggagccagcgaggaggcccccctgctgggcaactggtgtggccaccacctgcccccacctgtgaccagcagccacaaccagctgctgctgctgctgcacacagacaggagcaccacccggcggggcttctctgtggcctacatcggcggccagctgggctgcggcagcggcagcacagaaggagagggggaggccctgcagccccagagcctgcagagccccagcagcatcccccctgtgtgcccagccccacccatgaatggcctgctgcagctgctgctgcactggctgcacccctgccccctgagcggccccctgcggctggatggaacagccccagcctgcttccactactgccgggccagcttccccagcttctag

SEQ ID NO: 7435 - DNA, 1434 bp, synthetic construct; identical to SEQ ID NO: 6874
  misc_feature 1..1434: note = source = /note="Description of Artificial Sequence: Synthetic coding sequence"
  source 1..1434: mol_type = other DNA

SEQ ID NO: 7436 - DNA, 1479 bp, synthetic construct
  misc_feature 1..1479: note = source = /note="Description of Artificial Sequence: Synthetic coding sequence"
  source 1..1479: mol_type = other DNA
atgggcagcgccccctgggcccctgtgctgctgctggccctgggcctgcggggcctgcaggccggggcccggcgggccccagaccccggcttccaggagcgcttcttccagcagaggctggaccacttcaactttgagcgcttcggcaacaagaccttcccccagcgcttcctggtgtctgaccgcttctgggtgcggggggagggccccatcttcttctacacaggaaatgaaggagatgtgtgggcctttgccaacaacagcgcctttgtggccgagctggccgctgagcggggggccctgctggtgtttgctgagcaccgctactacggcaagagcctgccctttggagcccagagcacccagaggggccacacagagctgctgactgtggagcaggccctggccgactttgctgagctgctgcgggccctgcggcgggacctgggcgcccaggatgccccagccatcgcctttggaggcagctatggaggcatgctgagcgcctacctgaggatgaagtacccccacctggtggccggggccctggccgccagcgcccctgtgctggccgtggccggcctgggggacagcaaccagttcttcagagatgtgacagctgactttgagggccagagccccaagtgcacccagggcgtgcgggaggccttccggcagatcaaggacctcttcctgcagggcgcctatgacacagtgcgctgggagtttggcacctgccagcccctgagtgatgagaaggacctgacccagctgttcatgtttgccagaaatgccttcaccgtgctggccatgatggactacccctaccccacagacttcctgggccccctgcctgccaaccctgtgaaggtgggctgtgaccggctgctgtctgaggcccagaggatcaccggcctgcgggccctggccggcctggtgtacaatgccagcggcagcgagcactgctatgacatctaccgcctgtaccacagctgtgccgaccccaccggctgcggcaccggcccagatgcccgggcctgggactaccaggcctgcacagagatcaacctgacctttgccagcaacaacgtgacagacatgtttcctgacctgcccttcacagatgagctgcggcagcgctactgcctggacacctggggcgtgtggcccaggccagactggctgctgaccagcttctggggcggggacctgcgggccgccagcaacatcatcttcagcaatggaaacctggacccctgggccggcggcggcatcagaagaaacctgagcgcctctgtgattgctgtgaccatccagggcggggcccaccacctggacctgcgggccagccacccagaagatcctgcctctgtggtggaggccaggaagctggaggccaccatcattggagagtgggtgaaggccgcccggcgggagcagcagcctgccctgcggggcggcccccggctgagcctgtag

SEQ ID NO: 7437 - DNA, 2850 bp, synthetic construct
  misc_feature 1..2850: note = source = /note="Description of Artificial Sequence: Synthetic coding sequence"
  source 1..2850: mol_type = other DNA
atgatcctgagcctgctcttcagcctgggcggccccctgggctggggcctgctgggcgcctgggcccaggccagcagcaccagcctgagtgacctgcagagcagcaggaccccaggagtgtggaaggccgaggccgaggacaccgggaaggaccctgtgggcaggaactggtgcccctaccccatgagcaagctggtgaccctgctggccctgtgcaagacagagaagttcctgatccacagccagcagccctgcccccagggcgccccagactgccagaaggtgaaggtgatgtacaggatggcccacaagcctgtgtaccaggtgaagcagaaggtgctgaccagcctggcctggcgctgctgccccggctacacaggccccaactgtgagcaccacgacagcatggccatccctgagcctgctgaccccggggacagccaccaggagccccaggacggccctgtgtccttcaagccaggccacctggccgctgtgatcaatgaggtggaggtgcagcaggagcagcaggagcacctgctgggggacctgcagaatgatgtgcaccgggtggccgacagcctgcccggcctgtggaaggccctgcccggcaacctgacagctgctgtgatggaggccaaccagacaggccacgagttcccagacaggagcctggagcaggtgctgctgccccacgtggacaccttcctgcaggtgcacttcagccccatctggaggagcttcaaccagagcctgcacagcctgacccaggccatccggaacctgagcctggatgtggaggccaaccggcaggccatcagccgggtgcaggacagcgctgtggcccgggctgacttccaggagctgggcgccaagtttgaggccaaggtgcaggagaacacccagagggtgggccagctgcggcaggatgtggaggaccggctgcacgcccagcacttcaccctgcacaggagcatcagcgagctgcaggctgatgtggacaccaagctgaagaggctgcacaaggcccaggaggcccctggcaccaacggcagcctggtgctggccacccctggggccggggcccggcctgagccagacagcctgcaggcccggctgggccagctgcagaggaacctgtctgagctgcacatgaccacagcccggcgggaggaggagctgcagtacaccctggaggacatgagggccaccctgaccaggcatgtggatgagatcaaggagctgtacagcgagagtgatgagacctttgaccagatcagcaaggtggagcggcaggtggaggagctgcaggtgaaccacacagccctgcgggagctgcgggtcatcctgatggagaagagcctcatcatggaggagaacaaggaggaggtggagcggcagctgctggagctgaacctgaccctgcagcacctgcagggcggccatgctgacctgatcaagtatgtgaaggactgcaactgccagaagctgtacctggacctggatgtgatccgggagggccagagagatgccacccgggccctggaggagacccaggtgtccctggatgaaagacggcagctggatggcagcagcctgcaggccctgcagaatgctgtggatgctgtgtccctggccgtggatgcccacaaggccgagggggagcgggcccgggccgccaccagccggctgcggagccaggtgcaggccctggatgatgaggtgggcgccctgaaggctgctgctgctgaggcccggcatgaggtgcggcagctgcacagcgcctttgctgccctgctggaggatgccctgcggcatgaggccgtgctggccgccctgtttggagaggaggtgctggaggagatgtctgagcagaccccaggccccctgcccctgtcctatgagcagatccgggtggccctgcaggatgctgccagcggcctgcaggagcaggccctgggctgggatgagctggccgcccgggtgacagccctggagcaggccagcgagccccccaggcctgctgagcacctggagcccagccatgatgctggccgggaggaggccgccaccacagccctggccggcctggcccgggagctgcagagcctgagcaatgatgtgaagaatgtgggccgctgctgtgaggccgaggccggggccggggccgccagcctgaatgccagcctgcacggcctgcacaatgccctgtttgccacccagaggagcctggagcagcaccagaggctcttccacagcctgtttggaaacttccagggcctgatggaggccaacgtgtccctggacctgggcaagctgcagaccatgctgagcaggaagggcaagaagcagcagaaggacctggaggcccccaggaagagggacaagaaggaggccgagcccctggtggacatccgggtgacaggccctgtgcctggggccctgggcgccgccctgtgggaggccggcagccctgtggccttctacgccagcttcagcgagggcacagctgccctgcagacagtgaagttcaacaccacctacatcaacatcggcagcagctacttccctgagcacggctacttccgggcccctgagcggggcgtgtacctgtttgctgtgtctgtggagtttggacctggccctggcaccggccagctggtgtttggaggccaccacaggacccctgtgtgcaccaccggccagggcagcggcagcacagccaccgtgtttgccatggccgagctgcagaagggggagcgggtgtggtttgagctgacccagggcagcatcaccaagaggagcctgtctggaacagcctttggaggcttcctgatgttcaagacctag

SEQ ID NO: 7438 - DNA, 246 bp, synthetic construct
  misc_feature 1..246: note = source = /note="Description of Artificial Sequence: Synthetic coding sequence"
  source 1..246: mol_type = other DNA
atgaggctgctggtgctgagcagcctgctgtgcatcctgctgctgtgcttcagcatcttcagcacagagggcaagaggaggcctgccaaggcctggagcggccgccgcacccggctgtgctgccaccgggtgcccagccccaacagcaccaacctgaagggccaccacgtgcggctgtgcaagccctgcaagctggagcctgagccccggctgtgggtggtgcctggggccctgccccaggtgtag

SEQ ID NO: 7439 - DNA, 690 bp, synthetic construct
  misc_feature 1..690: note = source = /note="Description of Artificial Sequence: Synthetic coding sequence"
  source 1..690: mol_type = other DNA
atgtccttcctgcaggaccccagcttcttcaccatgggcatgtggagcattggagctggggccctgggcgctgctgccctggccctgctgctggccaacacagatgtgttcctgagcaagccccagaaggccgccctggagtacctggaggacatcgacctgaagaccctggagaaggagcccaggaccttcaaggccaaggagctgtgggagaagaatggagctgtgatcatggctgtgagaagacctggctgcttcctgtgccgggaggaggccgctgacctgagcagcctgaagtccatgctggaccagctgggcgtgcccctgtatgctgtggtgaaggagcacatcagaacagaggtgaaggacttccagccctacttcaagggggagatcttcctggatgagaagaagaagttctacggcccccagaggaggaagatgatgttcatgggcttcatccggctgggcgtgtggtacaacttcttccgggcctggaatggaggcttcagcggcaacctggagggggagggcttcatcctgggcggcgtgtttgtggtgggcagcggcaagcagggcatcctgctggagcaccgggagaaggagtttggagacaaggtgaacctgctgtctgtgctggaggccgccaagatgatcaagccccagaccctggccagcgagaagaagtag

SEQ ID NO: 7440 - DNA, 657 bp, synthetic construct
  misc_feature 1..657: note = source = /note="Description of Artificial Sequence: Synthetic coding sequence"
  source 1..657: mol_type = other DNA
atgggcatgtggagcatcggggccggggccctgggcgccgccgccctggccctgctgctggccaacacagatgtgttcctgagcaagccccagaaggccgccctggagtacctggaggacatcgacctgaagaccctggagaaggagcccaggaccttcaaggccaaggagctgtgggagaagaatggagctgtgatcatggctgtgcggcggcccggctgcttcctgtgccgggaggaggccgctgacctgagcagcctgaagtccatgctggaccagctgggcgtgcccctgtatgctgtggtgaaggagcacatcagaacagaggtgaaggacttccagccctacttcaagggggagatcttcctggatgagaagaagaagttctacggcccccagaggaggaagatgatgttcatgggcttcatccggctgggcgtgtggtacaacttcttccgggcctggaatggaggcttcagcggcaacctggagggggagggcttcatcctgggcggcgtgtttgtggtgggcagcggcaagcagggcatcctgctggagcaccgggagaaggagtttggagacaaggtgaacctgctgtctgtgctggaggccgccaagatgatcaagccccagaccctggccagcgagaagaagtag

SEQ ID NO: 7441 - DNA, 690 bp, synthetic construct; identical to SEQ ID NO: 7439
  misc_feature 1..690: note = source = /note="Description of Artificial Sequence: Synthetic coding sequence"
  source 1..690: mol_type = other DNA

SEQ ID NO: 7442 - DNA, 690 bp, synthetic construct; identical to SEQ ID NO: 7439
  misc_feature 1..690: note = source = /note="Description of Artificial Sequence: Synthetic coding sequence"
  source 1..690: mol_type = other DNA

SEQ ID NO: 7443 - DNA, 1248 bp, synthetic construct; identical to SEQ ID NO: 7151
  misc_feature 1..1248: note = source = /note="Description of Artificial Sequence: Synthetic coding sequence"
  source 1..1248: mol_type = other DNA

SEQ ID NO: 7444 - DNA, 240 bp, synthetic construct
  misc_feature 1..240: note = source = /note="Description of Artificial Sequence: Synthetic coding sequence"
  source 1..240: mol_type = other DNA
atggccccccagaccctgctgcctgtgctggtgctgtgtgtgctgctgctgcaggcccagggcggctacagagacaagaagaggatgcagaagacccagctgagccctgagatcaaggtgtgccagcagcagcccaagctgtacctgtgcaagcacctgtgtgagagccaccgggactgccaggccaacaacatctgctgcagcacctactgtggaaatgtgtgcatgagcatcctgtag

SEQ ID NO: 7445 - DNA, 486 bp, synthetic construct
  misc_feature 1..486: note = source = /note="Description of Artificial Sequence: Synthetic coding sequence"
  source 1..486: mol_type = other DNA
atgggcctgagcggcctgctgcccatcctggtgcccttcatcctgctgggggacatccaggagcccggccatgctgagggcatcctgggcaagccctgccccaagatcaaggtggagtgtgaggtggaggagattgaccagtgcaccaagccccgggactgcccagagaacatgaagtgctgccccttcagccggggcaagaagtgcctggacttcaggaagatctatgctgtgtgccaccggcggctggccccagcctggccaccctaccacactggaggcaccatcaagaagaccaagatctgcagcgagttcatctatggaggcagccagggcaacaacaacaacttccagacagaggccatctgcctggtgacctgcaagaagtaccacaagagcgccctgctgtacaccatccgccgcagcctgaacaacctgcaggacctggcccacaaccctggcctgagcccccgggtgcctgactag

SEQ ID NO: 7446 - DNA, 261 bp, synthetic construct
  misc_feature 1..261: note = source = /note="Description of Artificial Sequence: Synthetic coding sequence"
  source 1..261: mol_type = other DNA
atgggcctgagcggcctgctgcccatcctggtgcccttcatcctgctgggggacatccaggagcccggccatgctgagggcatcctgggcaagccctgccccaagatcaaggtggagtgtgaggtggaggagattgaccagtgcaccaagccccgggactgcccagagaacatgaagtgctgccccttcagccggggcaagaagtgcctggacttcaggaaggtgtccctgaccctgtaccacaaggaggagctggagtag

SEQ ID NO: 7447 - DNA, 375 bp, synthetic construct
  misc_feature 1..375: note = source = /note="Description of Artificial Sequence: Synthetic coding sequence"
  source 1..375: mol_type = other DNA
atgcctgcctgccgcctgggccccctggccgccgccctgctgctgagcctgctgctgtttggcttcaccctggtgtctggcaccggggctgagaagacaggagtgtgcccagagctgcaggccgaccagaactgcacccaggagtgtgtgtctgattctgaatgtgccgacaacctgaagtgctgcagcgctggctgtgccaccttctgcagcctgcccaatgacaaggagggcagctgcccccaggtgaacatcaacttcccccagctgggcctgtgccgggaccagtgccaggtggacagccagtgccccggccagatgaagtgctgcagaaatggctgtgggaaggtgtcctgtgtgacccccaacttctag

SEQ ID NO: 7448 - DNA, 1428 bp, synthetic construct
  misc_feature 1..1428: note = source = /note="Description of Artificial Sequence: Synthetic coding sequence"
  source 1..1428: mol_type = other DNA
atggctgacatgcagaacctggtggagcggctggagagagctgtgggccgcctggaggccgtgagccacaccagtgacatgcaccggggctacgccgacagccccagcaaggccggggccgccccctacgtgcaggcctttgacagcctgctggccggccctgtggccgagtacctgaagatcagcaaggagattggaggagatgtgcagaagcatgctgagatggtgcacacaggcctgaagctggagcgggccctgctggtgacagccagccagtgccagcagcctgctgagaacaagctgagtgacctgctggcccccatcagcgagcagatcaaggaggtgatcaccttccgggagaagaacagaggcagcaagctgttcaaccacctgtctgctgtgtctgagagcatccaggccctgggctgggtggccatggcccccaagccaggcccctacgtgaaggagatgaatgatgctgccatgttctacaccaacagagtgctgaaggagtacaaggatgtggacaagaagcacgtggactgggtgaaggcctacctgagcatctggacagagctgcaggcctacatcaaggagttccacaccaccggcctggcctggagcaagacaggccctgtggccaaggagctgagcggcctgcccagcggccccagcgctggcagctgccccccacctcctccaccctgccccccacctcctcctgtgtccaccatcagctgcagctatgaaagtgccagccgcagcagcctgtttgcccagatcaaccagggcgagagcatcacccacgccctgaagcacgtgtctgatgacatgaagacccacaagaacccagccctgaaggcccagagcggccctgtgcgcagcggccccaagcccttcagcgcccccaagccccagaccagccccagccccaagagggccaccaagaaggagcctgctgtgctggagctggagggcaagaagtggagggtggagaaccaggagaatgtgagcaacctggtgattgaggacacagagctgaagcaggtggcctacatctacaagtgtgtgaacaccaccctgcagatcaagggcaagatcaacagcatcaccgtggacaactgcaagaagctgggcctggtgtttgatgatgtggtgggcatcgtggagatcatcaacagcaaggatgtgaaggtgcaggtgatgggcaaggtgcccaccatcagcatcaacaagacagatggctgccacgcctacctgagcaagaacagcctggactgtgaaattgtgtctgccaagagcagcgagatgaatgtgctgatccccacagaaggaggagacttcaatgagttccctgtgcctgagcagttcaagaccctgtggaatggccagaagctggtgaccaccgtgacagaaattgctggatag

SEQ ID NO: 7449 - DNA, 438 bp, synthetic construct
  misc_feature 1..438: note = source = /note="Description of Artificial Sequence: Synthetic coding sequence"
  source 1..438: mol_type = other DNA
atggctgacatgcagaacctggtggagcggctggagagagctgtgggccgcctggaggccgtgagccacaccagtgacatgcaccggggctacgccgacagccccagcaaggccggggccgccccctacgtgcaggcctacatcaaggagttccacaccaccggcctggcctggagcaagacaggccctgtggccaaggagctgagcggcctgcccagcggccccagcgctggcagctgccccccacctcctccaccctgccccccacctcctcctgtgtccaccatcagctgcagctatgagagcgccagccgcagcagcctgtttgcccagatcaaccagggcgagagcatcacccacgccctgaagcacgtgtctgatgacatgaagacccacaagaacccagccctgaaggcccagagcggccctgtgaggtag

SEQ ID NO: 7450 - DNA, 1428 bp, synthetic construct; identical to SEQ ID NO: 7448
  misc_feature 1..1428: note = source = /note="Description of Artificial Sequence: Synthetic coding sequence"
  source 1..1428: mol_type = other DNA

SEQ ID NO: 7451 - DNA, 1425 bp, synthetic construct; identical to SEQ ID NO: 7240
  misc_feature 1..1425: note = source = /note="Description of Artificial Sequence: Synthetic coding sequence"
  source 1..1425: mol_type = other DNA

SEQ ID NO: 7452 - DNA, 1425 bp, synthetic construct; identical to SEQ ID NO: 7240
  misc_feature 1..1425: note = source = /note="Description of Artificial Sequence: Synthetic coding sequence"
  source 1..1425: mol_type = other DNA

SEQ ID NO: 7453 - DNA, 1428 bp, synthetic construct; identical to SEQ ID NO: 7448
  misc_feature 1..1428: note = source = /note="Description of Artificial Sequence: Synthetic coding sequence"
  source 1..1428: mol_type = other DNA

SEQ ID NO: 7454 - DNA, 1209 bp, synthetic construct
  misc_feature 1..1209: note = source = /note="Description of Artificial Sequence: Synthetic coding sequence"
  source 1..1209: mol_type = other DNA
atgacagccctgcccggccccctgtggctgctgggcctggccctgtgtgccctgggcggcggcggccctggcctgcggcccccacctggctgcccccagaggcggctgggcgcccgggagaggagagatgtgcagcgggagatcctggccgtgctgggcctgcccggccggccccggccccgggcccctcctgctgccagccggctgcctgccagcgcccccctcttcatgctggacctgtaccacgccatggctggagatgatgatgaagatggagccccagctgagcggcggctgggccgggctgacctggtgatgagctttgtgaacatggtggagcgggaccgggccctgggccaccaggagccccactggaaggagttccgctttgacctgacccagatcccagctggggaggccgtgacagctgctgagttccgcatctacaaggtgcccagcatccacctgctgaacagaaccctgcacgtgtccatgttccaggtggtgcaggagcagagcaaccgggagagtgacctcttcttcctggacctgcagaccctgcgggctggagatgagggctggctggtgctggatgtgacagctgccagtgactgctggctgctgaagaggcacaaggacctgggcctgcggctgtatgtggagacagaagatggccacagcgtggaccccggcctggccggcctgctgggccagagggcccccaggagccagcagccctttgtggtgaccttcttccgggccagccccagccccatccgcacccccagggctgtgcggcccctgcggcggcggcagcccaagaagagcaatgagctgccccaggccaaccggctgcccggcatctttgatgatgtgcacggcagccacggccggcaggtgtgcagaagacatgagctgtatgtgtccttccaggacctgggctggctggactgggtgattgccccccagggctacagcgcctactactgtgaaggagaatgttccttccccctggacagctgcatgaatgccaccaaccacgccatcctgcagagcctggtgcacctgatgatgccagatgctgtgcccaaggcctgctgtgcccccaccaagctgagcgccacctctgtgctgtactatgacagcagcaacaacgtcatcctgaggaagcacaggaacatggtggtgaaggcctgtggctgccactag

SEQ ID NO: 7455 - DNA, 804 bp, synthetic construct
  misc_feature 1..804: note = source = /note="Description of Artificial Sequence: Synthetic coding sequence"
  source 1..804: mol_type = other DNA
atggccgccatccgcatgggcaagctgaccaccatgcctgctggcctcatctatgcctctgtgtctgtgcatgctgccaagcaggaggagagcaagaagcagctggtgaagccagagcagctgcccatctacacagccccacccctgcagagcaaatatgtggaggagcagcccggccacctgcagatgggctttgccagcatcagaacagccaccggctgctacatcggctggtgcaagggcgtgtatgtgtttgtgaagaatggcatcatggacacagtgcagtttgggaaggatgcctacgtgtacctgaagaaccccccccgggacttcctgcccaagatgggcgtcatcaccgtgtctggcctggccggcctggtgtctgccaggaagggcagcaagttcaagaagatcacctaccccctgggcctggccaccctgggcgccaccgtgtgctaccctgtgcagagcgtcatcatcgccaaggtgacagccaagcgctacatgctgcaggccagcaagttcctggagcagctgaaccactgcggccagaaggccgccaagaagagccacagcctgaacctgaagaagaccaagctgggcagcagcagcgagattgaggtgcctgccaagaccacccacgtgctgaagcacagcgtgcccctgcccacagagctgagcagcgaggccaagaccaagtctgagagcaccagcggggccacccagttcatgccagaccccaagctgatggaccacggccagagccaccctgaggacatcgacatgtacagcaccaggagctag

SEQ ID NO: 7456 - DNA, 807 bp, synthetic construct
  misc_feature 1..807: note = source = /note="Description of Artificial Sequence: Synthetic coding sequence"
  source 1..807: mol_type = other DNA
atggccgccatccgcatgggcaagctgaccaccatgcctgctggcctcatctatgcctctgtgtctgtgcatgctgccaagcaggaggagagcaagaagcagctggtgaagccagagcagctgcccatctacacagccccacccctgcagagcaaatatgtggaggagcagcccggccacctgcagatgggctttgccagcatcagaacagccaccggctgctacatcggctggtgcaagggcgtgtatgtgtttgtgaagaatggcatcatggacacagtgcagtttgggaaggatgcctacgtgtacctgaagaaccccccccgggacttcctgcccaagatgggcgtcatcaccgtgtctggcctggccggcctggtgtctgccaggaagggcagcaagttcaagaagatcacctaccccctgggcctggccaccctgggcgccaccgtgtgctaccctgtgcagagcgtcatcatcgccaaggtgacagccaagaaggtgtatgccaccagccagcagatctttggagctgtgaagagcctgtggaccaagagcagcaaggaggagagcctgcccaagcccaaggagaagaccaagctgggcagcagcagcgagattgaggtgcctgccaagaccacccacgtgctgaagcacagcgtgcccctgcccacagagctgagcagcgaggccaagaccaagtctgagagcaccagcggggccacccagttcatgccagaccccaagctgatggaccacggccagagccacccagaagatattgacatgtacagcaccaggagctag

SEQ ID NO: 7457 - DNA, 3672 bp, synthetic construct
  misc_feature 1..3672: note = source = /note="Description of Artificial Sequence: Synthetic coding sequence"
  source 1..3672: mol_type = other DNA
atggcccccctgcgggccctgctgagctacctgctgcccctgcactgtgccctgtgtgccgccgccggcagcaggaccccagagctgcacctgagcggcaagctgagtgactatggagtgacagtgccctgcagcacagacttccggggccgcttcctgagccacgtggtgtctggccctgctgctgccagcgctggctccatggtggtggacaccccacccaccctgcccaggcacagcagccacctgcgggtggcccggagccccctgcaccctgggggcaccctgtggccaggccgggtgggccgccacagcctgtacttcaacgtgacagtgtttgggaaggagctgcacctgcggctgcggcccaacagaaggctggtggtgcccggcagctctgtggagtggcaggaggacttccgggagctgttccggcagcccctgcggcaggagtgtgtgtacacaggaggagtgacaggcatgcctggagctgctgtggccatcagcaactgtgatggcctggccggcctcatcagaacagacagcacagacttcttcatcgagcccctggagcggggccagcaggagaaggaggccagcggccgcacccacgtggtgtaccgccgggaggccgtgcagcaggagtgggccgagccagatggagacctgcacaatgaggccttcggcctgggggacctgcccaacctgctgggcctggtgggggaccagctgggggacacagagaggaagagaagacatgccaagccaggcagctacagcattgaggtgctgctggtggtggatgacagcgtggtgcgcttccacggcaaggagcacgtgcagaactacgtgctgaccctgatgaacatcgtggatgagatctaccatgatgagagcctgggcgtgcacatcaacatcgccctggtgcggctcatcatggtgggctaccggcagagcctgagcctgattgagcggggcaaccccagccgcagcctggagcaggtgtgccgctgggcccacagccagcagaggcaggaccccagccacgccgagcaccacgaccacgtggtgttcctgacccggcaggactttggccccagcggctacgcccctgtgacaggcatgtgccaccccctgcggagctgtgccctgaaccatgaagatggcttcagcagcgccttcgtcatcgcccacgagaccggccacgtgctgggcatggagcatgatggccagggcaatggctgtgctgatgagaccagcctgggctctgtgatggcccccctggtgcaggccgccttccaccgcttccactggagccgctgcagcaagctggagctgagccgctacctgcccagctatgactgcctgctggatgacccctttgatcctgcctggccccagcccccagagctgcccggcatcaactacagcatggatgagcagtgccgctttgattttggcagcggctaccagacctgcctggccttccgcacctttgagccctgcaagcagctgtggtgcagccacccagacaacccctacttctgcaagaccaagaagggcccccccctggatggaacagaatgtgcccctgggaagtggtgcttcaagggccactgcatctggaagagccctgagcagacctacggccaggacggcggctggagctcctggaccaagtttggcagctgcagccgcagctgtggcggcggcgtgcgcagccgcagccgcagctgcaacaaccccagccctgcctacggcggccgcctgtgcctgggccccatgtttgagtaccaggtgtgcaacagtgaagaatgtcctggcacctatgaggacttccgggcccagcagtgtgccaagagaaattcctactacgtgcaccagaatgccaagcacagctgggtgccctatgagccagatgatgatgcccagaagtgtgagctgatctgccagagcgctgacacaggagatgtggtgttcatgaaccaggtggtgcatgatggcacccgctgcagctacagagacccctacagcgtgtgtgcccggggggagtgtgtgcctgtgggctgtgacaaggaggtgggctccatgaaggcagatgacaagtgtggggtgtgtggcggggacaacagccactgcaggacagtgaagggcaccctgggcaaggccagcaagcaggccggggccctgaagctggtgcagatcccagctggggcccggcacatccagatcgaggccctggagaagagcccccaccgcatcgtggtgaagaaccaggtgacaggcagcttcatcctgaaccccaagggcaaggaggccaccagcaggaccttcaccgccatgggcctggagtgggaggatgctgtggaggatgccaaggagagcctgaagaccagcggccccctgcctgaggccatcgccatcctggccctgcccccaacagagggcggccccaggagcagcctggcctacaagtatgtgattcatgaggacctgctgcccctcatcggcagcaacaacgtgctgctggaggagatggacacctatgagtgggccctgaagtcctgggccccctgcagcaaggcctgtggcggcggcatccagttcaccaagtatggctgcagaagaagaagagaccaccacatggtgcagaggcacctgtgtgaccacaagaagaggcccaagcccatcagaagacgctgcaaccagcacccctgcagccagcctgtgtgggtgacagaggagtggggcgcctgcagccgcagctgtgggaagctgggcgtgcagacccggggcatccagtgcctgctgcccctgagcaatggcacccacaaggtgatgcctgccaaggcctgtgccggggacaggcctgaggcccggcggccctgcctgcgggtgccctgcccagcccagtggaggctgggcgcctggagccagtgcagcgccacctgtggggagggcatccagcagaggcaggtggtgtgcaggaccaatgccaacagcctgggccactgtgagggggacagaccagacacagtgcaggtgtgcagcctgcctgcctgtggcggcaaccaccagaacagcacagtgcgggcagatgtgtgggagctgggcaccccagagggccagtgggtgccccagagcgagcccctgcaccccatcaacaagatcagcagcacagagccctgcaccggggacaggagcgtcttctgccagatggaggtgctggaccgctactgcagcatccctggctaccaccggctgtgctgcgtgtcctgcatcaagaaggccagcggccccaaccctggccctgaccccggccccaccagcctgccccccttcagcaccccaggcagccccctgcccggcccccaggaccctgcagatgctgctgagcccccaggcaagcccaccggcagcgaggaccaccagcacggccgggccacccagctgcccggggccctggacaccagcagccctggcacccagcacccctttgcccctgagacccccatccctggggcctcctggagcatcagccccaccacccctgggggcctgccctggggctggacccagacccccacccctgtgcctgaggacaagggccagcctggagaggacctgcggcaccctggcaccagcctgcctgctgccagccctgtgacctag

SEQ ID NO: 7458 - DNA, 3681 bp, synthetic construct
  misc_feature 1..3681: note = source = /note="Description of Artificial Sequence: Synthetic coding sequence"
  source 1..3681: mol_type = other DNA
atggcccccctgcgggccctgctgagctacctgctgcccctgcactgtgccctgtgtgccgccgccggcagcaggaccccagagctgcacctgagcggcaagctgagtgactatggagtgacagtgccctgcagcacagacttccggggccgcttcctgagccacgtggtgtctggccctgctgctgccagcgctggctccatggtggtggacaccccacccaccctgcccaggcacagcagccacctgcgggtggcccggagccccctgcaccctgggggcaccctgtggccaggccgggtgggccgccacagcctgtacttcaacgtgacagtgtttgggaaggagctgcacctgcggctgcggcccaacagaaggctggtggtgcccggcagctctgtggagtggcaggaggacttccgggagctgttccggcagcccctgcggcaggagtgtgtgtacacaggaggagtgacaggcatgcctggagctgctgtggccatcagcaactgtgatggcctggccggcctcatcagaacagacagcacagacttcttcatcgagcccctggagcggggccagcaggagaaggaggccagcggccgcacccacgtggtgtaccgccgggaggccgtgcagcaggagtgggccgagccagatggagacctgcacaatgaggccttcggcctgggggacctgcccaacctgctgggcctggtgggggaccagctgggggacacagagaggaagagaagacatgccaagccaggcagctacagcattgaggtgctgctggtggtggatgacagcgtggtgcgcttccacggcaaggagcacgtgcagaactacgtgctgaccctgatgaacatcgtggatgagatctaccatgatgagagcctgggcgtgcacatcaacatcgccctggtgcggctcatcatggtgggctaccggcagagcctgagcctgattgagcggggcaaccccagccgcagcctggagcaggtgtgccgctgggcccacagccagcagaggcaggaccccagccacgccgagcaccacgaccacgtggtgttcctgacccggcaggactttggccccagcggcatgcagggctacgcccctgtgacaggcatgtgccaccccctgcggagctgtgccctgaaccatgaagatggcttcagcagcgcctttgtgattgcccatgaaacaggccacgtgctgggcatggagcatgatggccagggcaatggctgtgctgatgagaccagcctgggctctgtgatggcccccctggtgcaggccgccttccaccgcttccactggagccgctgcagcaagctggagctgagccgctacctgcccagctatgactgcctgctggatgacccctttgatcctgcctggccccagcccccagagctgcccggcatcaactacagcatggatgagcagtgccgctttgattttggaagtggctaccagacctgcctggccttccgcacctttgagccctgcaagcagctgtggtgcagccacccagacaacccctacttctgcaagaccaagaagggcccccccctggatggaacagaatgtgcccctgggaagtggtgcttcaagggccactgcatctggaagagccctgagcagacctacggccaggacggcggctggagctcctggaccaagtttggcagctgcagccgcagctgtggcggcggcgtgcgcagccgcagccgcagctgcaacaaccccagccctgcctatggaggccgcctgtgcctgggccccatgtttgagtaccaggtgtgcaacagcgaggagtgccccggcacctatgaggacttccgggcccagcagtgtgccaagaggaacagctactacgtgcaccagaatgccaagcacagctgggtgccctatgagccagatgatgatgcccagaagtgtgagctgatctgccagagcgctgacacaggagatgtggtgttcatgaaccaggtggtgcatgatggcacccgctgcagctacagagacccctacagcgtgtgtgcccggggagaatgtgtgcctgtgggctgtgacaaggaggtgggctccatgaaggcagatgacaagtgtggggtgtgtggcggggacaacagccactgcaggacagtgaagggcaccctgggcaaggccagcaagcaggccggggccctgaagctggtgcagatcccagctggggcccggcacatccagatcgaggccctggagaagagcccccacagaattgtggtgaagaaccaggtgacaggcagcttcatcctgaaccccaagggcaaggaggccaccagcaggaccttcaccgccatgggcctggagtgggaggatgctgtggaggatgccaaggagagcctgaagaccagcggccccctgcctgaggccatcgccatcctggccctgcccccaacagaaggaggccccaggagcagcctggcctacaagtatgtgattcatgaggacctgctgcccctgattggcagcaacaacgtgctgctggaggagatggacacctatgagtgggccctgaagtcctgggccccctgcagcaaggcctgtggcggcggcatccagttcaccaagtatggctgcagaagaagaagagaccaccacatggtgcagaggcacctgtgtgaccacaagaagaggcccaagcccatcagaagacgctgcaaccagcacccctgcagccagcctgtgtgggtgacagaggagtggggcgcctgcagccgcagctgtgggaagctgggcgtgcagacccggggcatccagtgcctgctgcccctgagcaatggcacccacaaggtgatgcctgccaaggcctgtgccggggacaggcctgaggcccggcggccctgcctgcgggtgccctgcccagcccagtggaggctgggcgcctggagccagtgcagcgccacctgtggggagggcatccagcagaggcaggtggtgtgcaggaccaatgccaacagcctgggccactgtgagggggacagaccagacacagtgcaggtgtgcagcctgcctgcctgtggcggcaaccaccagaacagcacagtgcgggcagatgtgtgggagctgggcaccccagagggccagtgggtgccccagagcgagcccctgcaccccatcaacaagatcagcagcacagagccctgcacaggagacagatctgtgttctgccagatggaggtgctggaccgctactgcagcatccctggctaccaccggctgtgctgcgtgtcctgcatcaagaaggccagcggccccaaccctggccctgaccccggccccaccagcctgccccccttcagcaccccaggcagccccctgcccggcccccaggaccctgcagatgctgctgagcccccaggcaagcccactggaagtgaggaccaccagcacggccgggccacccagctgcccggggccctggacaccagcagccctggcacccagcacccctttgcccctgagacccccatccctggggcctcctggagcatcagccccaccaccccaggcggcctgccctggggctggacccagacccccacccctgtgcctgaagataaaggccagcccggggaggacctgcggcaccctggcaccagcctgcctgctgccagccctgtgacctag

SEQ ID NO: 7459 - DNA, 762 bp, synthetic construct
  misc_feature 1..762: note = source = /note="Description of Artificial Sequence: Synthetic coding sequence"
  source 1..762: mol_type = other DNA
atggctgctgccacccggggctgccggccctggggcagcctgctgggcctgctgggcctggtgtctgctgctgctgctgcctgggacctggccagcctgcgctgcaccctgggcgccttctgtgaatgtgacttccggccagacctgcccggcctggagtgtgacctggcccagcacctggccggccagcacctggccaaggccctggtggtgaaggccctgaaggcctttgtgcgggaccctgcccccaccaagcccctggtgctgagcctgcacggctggacaggaacaggcaagagctatgtgagcagcctgctggcccactacctgttccagggcggcctgcggagcccccgggtgcaccacttcagccctgtgctgcacttcccccaccccagccacatcgagcgctacaagaaggacctgaagtcctgggtgcagggcaacctgacagcctgtggccgcagcctcttcctgtttgatgagatggacaagatgcctcctggcctgatggaggtgctgcggcccttcctgggcagctcctgggtggtgtatggcaccaactacaggaaggccatcttcatcttcatccgctggggccctgccctgcagtgggcccagtggggcggccacttcagcgaggtgcagctgtacagcctgagcctgtgcagccagcagaaccctgtgccccacggcctgtcctgggccttccctgtgcccagcgccaccctgagagatgacatcgtcatccccccaggatag

SEQ ID NO: 7460 - DNA, 966 bp, synthetic construct
  misc_feature 1..966: note = source = /note="Description of Artificial Sequence: Synthetic coding sequence"
  source 1..966: mol_type = other DNA
atggctgctgccacccggggctgccggccctggggcagcctgctgggcctgctgggcctggtgtctgctgctgctgctgcctgggacctggccagcctgcgctgcaccctgggcgccttctgtgaatgtgacttccggccagacctgcccggcctggagtgtgacctggcccagcacctggccggccagcacctggccaaggccctggtggtgaaggccctgaaggcctttgtgcgggaccctgcccccaccaagcccctggtgctgagcctgcacggctggacaggaacaggcaagagctatgtgagcagcctgctggcccactacctgttccagggcggcctgcggagcccccgggtgcaccacttcagccctgtgctgcacttcccccaccccagccacatcgagcgctacaagaaggacctgaagtcctgggtgcagggcaacctgacagcctgtggccgcagcctcttcctgtttgatgagatggacaagatgcctcctggcctgatggaggtgctgcggcccttcctgggcagctcctgggtggtgtatggcaccaactacaggaaggccatcttcatcttcatcagcaacacaggaggcaagcagatcaaccaggtggccctggaggcctggaggagccggcgggaccgggaggagatcctgctgcaggagctggagcctgtgatcagcagagctgtgctggacaacccccaccacggcttcagcaacagcggcatcatggaggagcggctgctggatgctgtggtgcccttcctgcccctgcagaggcaccacgtgcgccactgtgtgctgaatgagctggcccagctgggcctggagcccagagatgaggtggtgcaggccgtgctggacagcaccaccttcttcccagaagatgagcagctgttcagcagcaatggctgcaagacagtggccagcagaattgccttcttcctgtag

SEQ ID NO: 7461 - DNA, 576 bp, synthetic construct
  misc_feature 1..576: note = source = /note="Description of Artificial Sequence: Synthetic coding sequence"
  source 1..576: mol_type = other DNA
atgcaggtgtggtgtgaccagagacatgaccccggcggctggacagtcatccagaggcggctggatggctctgtgaacttcttcaggaactgggagacctacaagcagggcttcggcaacattgatggagagtactggctgggcctggagaacatctactggctgaccaaccagggcaactacaagctgctggtgaccatggaggactggagcggcaggaaggtgtttgctgaatatgccagcttccggctggagcctgagagcgagtactacaagctgcggctgggccgctaccatggaaatgctggggacagcttcacctggcacaacgggaagcagttcaccaccctggaccgggaccatgatgtgtacacaggcaactgtgcccactaccagaagggcggctggtggtacaatgcctgtgcccacagcaacctgaatggagtgtggtacagaggaggccactaccgcagccgctaccaggatggagtgtactgggccgagttccggggcggcagctacagcctgaagaaggtggtgatgatgatccggcccaaccccaacaccttccactag

SEQ ID NO: 7462 - DNA, 1482 bp, synthetic construct
  misc_feature 1..1482: note = source = /note="Description of Artificial Sequence: Synthetic coding sequence"
  source 1..1482: mol_type = other DNA
atgaggcccctgtgtgtgacctgctggtggctgggcctgctggccgccatgggcgctgtggccggccaggaggatggctttgagggcacagaggagggcagcccccgggagttcatctacctgaaccgctacaagagagctggggagagccaggacaagtgcacctacaccttcatcgtgccccagcagagggtgactggagccatctgtgtgaacagcaaggagcctgaggtgctgctggagaacagagtgcacaagcaggagctggagctgctgaacaatgagctgctgaagcagaagaggcagatcgagaccctgcagcagctggtggaggtggatggcggcatcgtgtctgaggtgaagctgctgaggaaggagagcaggaacatgaacagccgggtgacccagctgtacatgcagctgctgcacgagatcatcaggaagagggacaatgccctggagctgagccagctggagaaccgcatcctgaaccagacagctgacatgctgcagctggccagcaagtacaaggacctggagcacaagtaccagcacctggccaccctggcccacaaccagagcgagatcatcgcccagctggaggagcactgccagagggtgcccagcgcccggcctgtgccccagcccccacctgctgccccaccccgggtgtaccagccccccacctacaaccgcatcatcaaccagatcagcaccaatgagatccagagcgaccagaacctgaaggtgctgcccccacccctgcccaccatgcccaccctgaccagcctgcccagcagcacagacaagcccagcggcccctggagggactgcctgcaggccctggaggatggccatgacaccagcagcatctacctggtgaagccagagaacaccaaccggctgatgcaggtgtggtgtgaccagagacatgaccccggcggctggacagtcatccagaggcggctggatggctctgtgaacttcttcaggaactgggagacctacaagcagggcttcggcaacattgatggagagtactggctgggcctggagaacatctactggctgaccaaccagggcaactacaagctgctggtgaccatggaggactggagcggcaggaaggtgtttgctgaatatgccagcttccggctggagcctgagagcgagtactacaagctgcggctgggccgctaccatggaaatgctggggacagcttcacctggcacaacgggaagcagttcaccaccctggaccgggaccatgatgtgtacacaggcaactgtgcccactaccagaagggcggctggtggtacaatgcctgtgcccacagcaacctgaatggagtgtggtacagaggaggccactaccgcagccgctaccaggatggagtgtactgggccgagttccggggcggcagctacagcctgaagaaggtggtgatgatgatccggcccaaccccaacaccttccactag

SEQ ID NO: 7463 - DNA, 1959 bp, synthetic construct
  misc_feature 1..1959: note = source = /note="Description of Artificial Sequence: Synthetic coding sequence"
  source 1..1959: mol_type = other DNA
atggctgctgctgccctgcccccccggcccctgctgctgctgcccctggtgctgctgctgagcggccggcccaccagggctgacagcaaggtgtttggagacctggaccaggtgaggatgaccagcgagggcagtgactgccgctgcaagtgcatcatgaggcccctgagcaaggatgcctgcagccgggtgcgcagcggccgggcccgggtggaggacttctacacagtggagaccgtgagcagcggcacagactgccgctgcagctgcacagccccacccagcagcctgaacccctgtgaaaatgagtggaagatggagaagctgaagaagcaggcccctgagctgctgaagctgcagagcatggtggacctgctggagggcaccctgtacagcatggacctgatgaaggtgcacgcctacgtgcacaaggtggccagccagatgaacaccctggaggagagcatcaaggccaacctgagcagagaaaatgaggtggtgaaggacagcgtgcgccacctgtctgagcagctgcggcactatgagaaccacagcgccatcatgctgggcatcaagaaggagctgagccggctgggcctgcagctgctgcagaaggatgctgctgctgccccagccaccccagccaccggcaccggcagcaaggcccaggacacagcccggggcaagggcaaggacatcagcaaatatggctctgtgcagaagagctttgctgaccggggcctgcccaagccacccaaggagaagctgctgcaggtggagaagctgaggaaggagagcggcaagggcagcttcctgcagcccacagccaagccccgggccctggcccagcagcaggccgtcatccggggcttcacctactacaaggccggcaagcaggaggtgacagaggccgtggccgacaacaccctgcagggcacctcctggctggagcagctgccccccaaggtggagggccgcagcaacagcgctgagcccaacagcgctgagcaggatgaggccgagcccaggagcagcgagcgggtggacctggccagcggcacccccaccagcatcccagccaccaccaccacagccaccaccacccccacccccaccaccagcctgctgcccacagagccccccagcggccctgaggtgagcagccagggccgggaggccagctgtgagggcaccctgcgggctgtggacccccctgtgcgccaccacagctatggaagacatgagggcgcctggatgaaggaccctgctgccagagatgaccgcatctacgtgaccaactactactacggcaacagcctggtggagttcaggaacctggagaacttcaagcagggccgctggagcaacatgtacaagctgccctacaactggattggaactggacatgtggtgtaccagggcgccttctactacaacagagccttcaccaagaacatcatcaagtatgacctgcggcagagatttgtggcctcctgggccctgctgcctgatgtggtgtatgaggacaccaccccctggaagtggaggggccacagcgacatcgactttgctgtggatgagagcggcctgtgggtgatctacccagctgtggatgacagagatgaggcccagcctgaggtgattgtgctgagccggctggaccccggggacctgtctgtgcaccgggagaccacctggaagacccggctgcggaggaacagctatggcaactgcttcctggtgtgtggcatcctgtatgctgtggacacctacaaccagcaggagggccaggtggcctatgcctttgacacccacactggaacagatgcccggccccagctgcccttcctgaatgagcacgcctacaccacccagattgactacaaccccaaggagcgggtgctgtatgcctgggacaatggccaccagctgacctacaccctgcactttgtggtgtag

SEQ ID NO: 7464 - DNA, 1641 bp, synthetic construct
  misc_feature 1..1641: note = source = /note="Description of Artificial Sequence: Synthetic coding sequence"
  source 1..1641: mol_type = other DNA
atgaagaaccaggacaagaagaatggagctgccaagcagagcaaccccaagagcagccctggccagcctgaggccggccctgagggcgcccaggagcggcccagccaggccgccccagctgtggaggccgagggccctggcagcagccaggcccccaggaagccagagggcgcccaggccaggacagcccagagcggggccctgagagatgtgtctgaggagctgagccggcagctggaggacatcctgagcacctactgtgtggacaacaaccagggcggccctggagaagatggagcccagggcgagcctgctgagccagaagatgctgagaagagcaggacctacgtggccagaaatggagagcctgagcccacccctgtggtgaatggagagaaggagcccagcaaaggagaccccaacacagaggagatccggcagagtgatgaggtgggggaccgggaccacagaagaccccaggagaagaagaaggccaagggcctgggcaaggagatcaccctgctgatgcagaccctgaacaccctgagcaccccagaggagaagctggccgccctgtgcaagaagtatgcagagctgctggaggagcacaggaacagccagaagcagatgaagctgctgcagaagaagcagagccagctggtgcaggagaaggaccacctgcggggggagcacagcaaggctgtgctggcccggagcaagctggagagcctgtgccgggagctgcagaggcacaacagaagcctgaaggaggagggcgtgcagagggcccgggaggaggaggagaagaggaaggaggtgaccagccacttccaggtgaccctgaatgacatccagctgcagatggagcagcacaatgaaagaaacagcaagctgcggcaggagaacatggagctggccgagcggctgaagaagctgattgagcagtatgagctgcgggaggagcacatcgacaaggtgttcaagcacaaggacctgcagcagcagctggtggatgccaagctgcagcaggcccaggagatgctgaaggaggccgaggagcggcaccagcgggagaaggacttcctgctgaaggaggccgtggagagccagaggatgtgtgagctgatgaagcagcaggagacccacctgaagcagcagctggccctgtacacagagaagtttgaggagttccagaacaccctgagcaagagcagcgaggtgttcaccaccttcaagcaggagatggagaagatgaccaagaagatcaagaagctggagaaggagaccaccatgtaccgcagccgctgggagagcagcaacaaggccctgctggagatggccgaggagaagacagtgcgggacaaggagctggagggcctgcaggtgaagatccagaggctggagaagctgtgccgggccctgcagacagaaagaaatgacctgaacaagagggtgcaggacctgtctgctgggggccagggcagcctgacagattctggccctgagaggaggcctgagggccctggggcccaggcccccagcagcccccgggtgacagaggccccctgctacccaggggcccccagcacagaggccagcggccagacaggcccccaggagcccaccagcgcccgggcctag

SEQ ID NO: 7465 - DNA, 1641 bp, synthetic construct; identical to SEQ ID NO: 7464
  misc_feature 1..1641: note = source = /note="Description of Artificial Sequence: Synthetic coding sequence"
  source 1..1641: mol_type = other DNA

SEQ ID NO: 7466 - DNA, 1392 bp, synthetic construct
  misc_feature 1..1392: note = source = /note="Description of Artificial Sequence: Synthetic coding sequence"
  source 1..1392: mol_type = other DNA
atgcacggcagctgcagcttcctgatgctgctgctgcccctgctgctgctgctggtggccaccaccggccctgtgggcgccctgacagatgaggagaagaggctgatggtggagctgcacaacctgtaccgggcccaggtgagccccacagccagtgacatgctgcacatgcgctgggatgaggagctggccgcctttgccaaggcctatgcccggcagtgtgtgtggggccacaacaaggagcggggcagaagaggagagaacctgtttgccatcacagatgagggcatggatgtgcccctggccatggaggagtggcaccacgagcgggagcactacaacctgtctgctgccacctgcagccctggccagatgtgtggccactacacccaggtggtgtgggccaagacagagcgcatcggctgcggcagccacttctgtgagaagctgcagggcgtggaggagaccaacatcgagctgctggtgtgcaactatgagcccccaggaaatgtgaagggcaagaggccctaccaggagggcaccccctgcagccagtgccccagcggctaccactgcaagaacagcctgtgtgagcccatcggcagcccagaagatgcccaggacctgccctacctggtgacagaggcccccagcttccgggccacagaggccagtgacagcaggaagatgggcacccccagcagcctggccaccggcatcccagccttcctggtgacagaggtgtctggcagcctggccaccaaggccctgcctgctgtggagacccaggcccccaccagcctggccaccaaggaccccccatccatggccacagaggccccaccctgtgtgaccacagaggtgcccagcatcctggccgcccacagcctgcccagcctggatgaggagcctgtgaccttccccaagagcacccacgtgcccatccccaagtctgctgacaaggtgacagacaagaccaaggtgcccagccgcagccctgagaacagcctggaccccaagatgagcctgaccggggcccgggagctgctgccccacgcccaggaggaggccgaggccgaggccgagctgccccccagcagcgaggtgctggccagcgtcttccctgcccaggacaagccaggagagctgcaggccaccctggaccacacaggccacaccagcagcaagagcctgcccaacttccccaacaccagcgccacagccaatgccactggaggccgggccctggccctgcagagcagcctgcctggagctgagggccctgacaagcccagcgtggtgtctggcctgaacagcggccctggccacgtgtggggccccctgctgggcctgctgctgctgccccccctggtgctggccggcatcttctag

SEQ ID NO: 7467 - DNA, 459 bp, synthetic construct
  misc_feature 1..459: note = source = /note="Description of Artificial Sequence: Synthetic coding sequence"
  source 1..459: mol_type = other DNA
atgatgctgccccagtggctgctgctgctcttcctgctcttcttcttcctgttcctgctgacccggggcagcctgagccccaccaagtacaacctgctggagctgaaggagagctgcatccggaaccaggactgtgaaacaggctgctgccagagggccccagacaactgtgagagccactgtgccgagaagggcagcgagggcagcctgtgccagacccaggtgttcttcggccagtaccgggcctgcccctgcctgaggaacctgacctgcatctacagcaagaatgagaagtggctgagcatcgcctacggccgctgccagaagattggccggcagaagctggccaagaagatgttcctggtgctgccccccagctgctgcctgctgctgctgcacctgctgagcagcctgccccgggccctgtgcagcccctgcagccctgagcccccaccctag

SEQ ID NO: 7468 - DNA, 366 bp, synthetic construct
  misc_feature 1..366: note = source = /note="Description of Artificial Sequence: Synthetic coding sequence"
  source 1..366: mol_type = other DNA
atgatgctgccccagtggctgctgctgctcttcctgctcttcttcttcctgttcctgctgacccggggcagcctgagccccaccaagtacaacctgctggagctgaaggagagctgcatccggaaccaggactgtgaaacaggctgctgccagagggccccagacaactgtgagagccactgtgccgagaagggcagcgagggcagcctgtgccagacccaggtgttcttcggccagtaccgggcctgcccctgcctgaggaacctgacctgcatctacagcaagaatgagaagtggctgagcatcgcctacggccgctgccagaagattggccggcagaagctggccaagaagatgttcttctag

SEQ ID NO: 7469 - DNA, 1122 bp, synthetic construct
  misc_feature 1..1122: note = source = /note="Description of Artificial Sequence: Synthetic coding sequence"
  source 1..1122: mol_type = other DNA
atgaggctgctggcctggctgatcttcctggccaactggggcggggcccgggcagagcccgggaagttctggcacatcgctgacctgcacctggaccctgactacaaggtgtccaaggaccccttccaggtgtgccccagcgctggcagccagcctgtgcctgatgctggcccctggggagactacctgtgtgacagcccctgggccctgatcaacagcagcatctatgccatgaaggagattgagcctgagccagacttcatcctgtggacaggagatgacacccctcatgtgcctgatgagaagctgggggaggccgctgtgctggagatcgtggagcggctgaccaagctgatccgggaggtgtttcctgacaccaaggtgtatgctgccctgggcaaccacgacttccaccccaagaaccagtttcctgctggcagcaacaacatctacaaccagattgctgagctgtggaagccctggctgagcaatgaaagcatcgccctcttcaagaagggggccttctactgtgagaagctgcccggccccagcggggccggcagaattgtggtgctgaacaccaacctgtactacaccagcaatgccctgacagctgacatggctgaccccggccagcagttccagtggctggaggatgtgctgacagatgccagcaaggccggggacatggtgtacatcgtgggccacgtgcccccaggcttctttgagaagacccagaacaaggcctggttccgggagggcttcaatgagaagtacctgaaggtggtgaggaagcaccaccgggtgattgctggccagttcttcggccaccaccacacagacagcttcaggatgctgtatgatgatgctggggtgcccatcagcgccatgttcatcaccccaggagtgaccccctggaagaccaccctgcccggggtggtgaatggagccaacaacccagccatccgggtgtttgaatatgaccgggccaccctgagcctgaaggtgcgcagccctgctgaggcccggggcggcggctgggagggcctgaagtgcatcaccaccttcccccacagccagctgatccacctgcccctgaccacagagccccaggagggctag

SEQ ID NO: 7470 - DNA, 810 bp, synthetic construct
  misc_feature 1..810: note = source = /note="Description of Artificial Sequence: Synthetic coding sequence"
  source 1..810: mol_type = other DNA
atgaggctgctggcctggctgatcttcctggccaactggggcggggcccgggcagagcctgaggaggcccagggcccctgtgcccaggagaagggcaaaggacctccacccaccagcatcctggccagcctggcccctggcctggaggccggcaagttctggcacatcgctgacctgcacctggaccctgactacaaggtgtccaaggaccccttccaggtgtgccccagcgctggcagccagcctgtgcctgatgctggcccctggggagactacctgtgtgacagcccctgggccctgatcaacagcagcatctatgccatgaaggagattgagcctgagccagacttcatcctgtggacaggagatgacacccctcatgtgcctgatgagaagctgggggaggccgctgtgctggagatcgtggagcggctgaccaagctgatccgggaggtgtttcctgacaccaaggtgtatgctgccctgggcaaccacgacttccaccccaagaaccagtttcctgctggcagcaacaacatctacaaccagattgctgagctgtggaagccctggctgagcaatgaaagcatcgccctcttcaagaagggggccttctactgtgagaagctgcccggccccagcggggccggcagaattgtggtgctgaacaccaacctgtactacaccagcaatgccctgacagctgacatggctgaccccggccagcagttccagtggctggaggatgtgctgacagatgccagcaaggccggggacatggtgtacatcgtgggccacgtgcccccatag

SEQ ID NO: 7471 - DNA, 1368 bp, synthetic construct
  misc_feature 1..1368: note = source = /note="Description of Artificial Sequence: Synthetic coding sequence"
  source 1..1368: mol_type = other DNA
atgaggctgctggcctggctgatcttcctggccaactggggcggggcccgggcagagcccgggaagttctggcacatcgctgacctgcacctggaccctgactacaaggtgtccaaggaccccttccaggtgtgccccagcgctggcagccagcctgtgcctgatgctggcccctggggagactacctgtgtgacagcccctgggccctgatcaacagcagcatctatgccatgaaggagattgagcctgagccagacttcatcctgtggacaggagatgacacccctcatgtgcctgatgagaagctgggggaggccgctgtgctggagatcgtggagcggctgaccaagctgatccgggaggtgtttcctgacaccaaggtgtatgctgccctgggcaaccacgacttccaccccaagaaccagtttcctgctggcagcaacaacatctacaaccagattgctgagctgtggaagccctggctgagcaatgaaagcatcgccctcttcaagaagggggccttctactgtgagaagctgcccggccccagcggggccggcagaattgtggtgctgaacaccaacctgtactacaccagcaatgccctgacagctgacatggctgaccccggccagcagttccagtggctggaggatgtgctgacagatgccagcaaggccggggacatggtgtacatcgtgggccacgtgcccccaggcttctttgagaagacccagaacaaggcctggttccgggagggcttcaatgagaagtacctgaaggtggtgaggaagcaccaccgggtgattgctggccagttcttcggccaccaccacacagacagcttcaggatgctgtatgatgatgctggggtgcccatcagcgccatgttcatcaccccaggagtgaccccctggaagaccaccctgcccggggtggtgaatggagccaacaacccagccatccgggtgtttgaatatgaccgggccaccctgagcctgaaggacatggtgacctacttcatgaacctgagccaggccaatgcccagggcaccccccgctgggagctggagtaccagctgacagaggcctatggagtgcctgatgccagcgcccacagcatgcacacagtgctggacagaattgctggggaccagagcaccctgcagcgctactacgtgtacaacagcgtgtcctacagcgctggggtgtgtgatgaggcctgcagcatgcagcacgtgtgtgccatgaggcaggtggacattgatgcctacaccacctgcctgtatgccagcggcaccacccctgtgccccagctgcccctgctgctgatggccctgctgggcctgtgcaccctggtgctgtag

SEQ ID NO: 7472 - DNA, 867 bp, synthetic construct
  misc_feature 1..867: note = source = /note="Description of Artificial Sequence: Synthetic coding sequence"
  source 1..867: mol_type = other DNA
atggccctggcccccccaccccggggcctgtggcaggccaaggacatcagccccatcgtgaaggccgccaggagagatggagagctgctgctgagcgcccagctggacagcgaggagcgggaccccggggtgccccggcccagcccctatgccccctacatcctggtgtatgccaatgacctggccatcagcgagcccaacagcgtggccgtgaccctgcagagatatgaccccttccctgctggggaccctgagccccgggccgcccccaacaacagcgctgacccccgggtgagaagagctgcccaggccaccggccccctgcaggacaatgagctgcccggcctggatgagcggcccccccgggcccacgcccagcacttccacaagcaccagctgtggcccagccccttccgggccctgaagcccaggcctggcaggaaggacaggaggaagaagggccaggaggtgttcatggccgccagccaggtgctggactttgatgagaagaccatgcagaaggcccggaggaagcagtgggatgagccccgggtgtgcagccgccgctacctgaaggtggactttgctgacatcggctggaatgagtggatcatcagccccaagagctttgatgcctactactgtgccggggcctgtgagttccccatgcccaagatcgtgcggcccagcaaccacgccaccatccagagcatcgtgcgggctgtgggcatcatccctggcatccctgagccctgctgcgtgcctgacaagatgaacagcctgggcgtgctcttcctggatgagaacagaaatgtggtgctgaaggtgtaccccaacatgtctgtggacacctgtgcctgcaggtag

SEQ ID NO: 7473 - DNA, 1626 bp, synthetic construct
  misc_feature 1..1626: note = source = /note="Description of Artificial Sequence: Synthetic coding sequence"
  source 1..1626: mol_type = other DNA
atgcccttccggctgctgatccccctgggcctgctgtgtgccctgctgccccagcaccacggggcccctggcccagatggcagcgccccagaccctgcccactacagcttcagcctgaccctgattgatgccctggacaccctgctgatcctgggcaatgtgtctgagttccagagggtggtggaggtgctgcaggacagcgtggactttgatattgatgtgaatgcctctgtgtttgagaccaacatccgggtggtgggcggcctgctgagcgcccacctgctgagcaagaaggccggcgtggaggtggaggccggctggccctgcagcggccccctgctgaggatggccgaggaggccgccaggaagctgctgcctgccttccagacccccaccggcatgccctacggcaccgtgaacctgctgcatggagtgaaccctggagagacccctgtgacctgcacagctggcatcggcaccttcatcgtggagtttgccaccctgagcagcctgaccggggaccctgtgtttgaagatgtggcccgggtggccctgatgaggctgtgggagagcagaagtgacatcggcctggtgggcaaccacattgatgtgctgaccgggaagtgggtggcccaggatgctggcatcggggccggcgtggacagctactttgagtacctggtgaagggggccatcctgctgcaggacaagaagctgatggccatgttcctggagtacaacaaggccatccggaactacaccaggtttgatgactggtacctgtgggtgcagatgtacaagggcaccgtgtccatgcctgtgttccagagcctggaggcctactggccaggcctgcagagcctgattggagacatcgacaatgccatgaggaccttcctgaactactacacagtgtggaagcagtttggaggcctgcctgagttctacaacatcccccagggctacacagtggagaagcgggagggctaccccctgcggcctgagctgattgaaagtgccatgtacctgtaccgggccactggagaccccaccctgctggagctgggcagagatgctgtggagagcattgagaagatcagcaaggtggagtgtggctttgccaccatcaaggacctgcgggaccacaagctggacaacaggatggagagcttcttcctggccgagaccgtgaagtacctgtacctgctgtttgaccccaccaacttcatccacaacaacggcagcacctttgatgctgtgatcaccccctacggggagtgcatcctgggcgccggcggctacatcttcaacacagaggcccaccccattgatcctgctgccctgcactgctgccagaggctgaaggaggagcagtgggaggtggaggacctgatgagggagttctacagcctgaagaggagccgcagcaagttccagaagaacacagtgagcagcggcccctgggagcccccagcccggcccggcaccctcttctccccagaaaatcatgaccaggcccgggagaggaagccagccaagcagaaggtgcccctgctgagctgccccagccagcccttcaccagcaagctggccctgctgggccaggtgttcctggacagcagctag

SEQ ID NO: 7474 - DNA, 1737 bp, synthetic construct
  misc_feature 1..1737: note = source = /note="Description of Artificial Sequence: Synthetic coding sequence"
  source 1..1737: mol_type = other DNA
atgcccttccggctgctgatccccctgggcctgctgtgtgccctgctgccccagcaccacggggcccctggcccagatggcagcgccccagaccctgcccactaccgggagcgggtgaaggccatgttctaccacgcctatgacagctacctggagaatgccttcccctttgatgagctgcggcccctgacctgtgatggccatgacacctggggcagcttcagcctgaccctgattgatgccctggacaccctgctgatcctgggcaatgtgtctgagttccagagggtggtggaggtgctgcaggacagcgtggactttgatattgatgtgaatgcctctgtgtttgagaccaacatccgggtggtgggcggcctgctgagcgcccacctgctgagcaagaaggccggcgtggaggtggaggccggctggccctgcagcggccccctgctgaggatggccgaggaggccgccaggaagctgctgcctgccttccagacccccaccggcatgccctatggaacagtgaacctgctgcacggcgtgaaccctggagagacccctgtgacctgcacagctggcatcggcaccttcatcgtggagtttgccaccctgagcagcctgactggagaccctgtgtttgaagatgtggcccgggtggccctgatgaggctgtgggagagcagaagtgacatcggcctggtgggcaaccacattgatgtgctgaccgggaagtgggtggcccaggatgctggcattggagctggggtggacagctactttgagtacctggtgaagggggccatcctgctgcaggacaagaagctgatggccatgttcctggagtacaacaaggccatccggaactacaccaggtttgatgactggtacctgtgggtgcagatgtacaagggcaccgtgtccatgcctgtgttccagagcctggaggcctactggccaggcctgcagagcctcatcggggacatcgacaatgccatgaggaccttcctgaactactacacagtgtggaagcagtttggaggcctgcctgagttctacaacatcccccagggctacacagtggagaagcgggagggctaccccctgcggcctgagctgattgagagcgccatgtacctgtaccgggccaccggggaccccaccctgctggagctgggcagagatgctgtggagagcattgagaagatcagcaaggtggagtgtggctttgccaccatcaaggacctgcgggaccacaagctggacaacaggatggagagcttcttcctggccgagaccgtgaagtacctgtacctgctgtttgaccccaccaacttcatccacaacaacggcagcacctttgatgctgtgatcaccccctatggagagtgcatcctgggcgctgggggctacatcttcaacacagaggcccaccccatcgaccctgctgccctgcactgctgccagaggctgaaggaggagcagtgggaggtggaggacctgatgagggagttctacagcctgaagaggagccgcagcaagttccagaagaacacagtgagcagcggcccctgggagcccccagcccggcccggcaccctcttcagccctgagaaccacgaccaggcccgggagaggaagccagccaagcagaaggtgcccctgctgagctgccccagccagcccttcaccagcaagctggccctgctgggccaggtgttcctggacagcagctag

SEQ ID NO: 7475 - DNA, 495 bp, synthetic construct
  misc_feature 1..495: note = source = /note="Description of Artificial Sequence: Synthetic coding sequence"
  source 1..495: mol_type = other DNA
atgaggagctgctacgtggcccaggccggcctgaagctgcccggcagcagtgaccccccagccagcgccagccagagcacccgcatcacagccagcggctacggcccccccagcagccggcccagcagccgggtggtgaatggagaagatgctgtgccctacagctggccctggcaggtgtccctgcagtatgagaagagcggcagcttctaccacacctgtggcggcagcctgattgccccagactgggtggtgacagctggccactgcatcagcagcagcaggacctaccaggtggtgctgggggagtatgacagagctgtgaaggagggccctgagcaggtgatccccatcaacagcggggacctgtttgtgcaccccctgtggaacagaagctgtgtggcctgtggaaatgacatcgccctgatcaagctgagccgcagcgcccagctgggagatgctgtgcagctggccagcctgcccccagctggatag

SEQ ID NO: 7476 - DNA, 3663 bp, synthetic construct
  misc_feature 1..3663: note = source = /note="Description of Artificial Sequence: Synthetic coding sequence"
  source 1..3663: mol_type = other DNA
atgcctggcctgctgaactggatcactggagctgccctgcccctgacagccagtgatgtgaccagctgtgtgtctggctacgccctgggcctgacagccagcctgacctacggcaacctggaggcccagcccttccagggcctgtttgtgtaccccctggatgaatgtaccaccgtcatcggctttgaggccgtgattgctgacagagtggtgacagtgcagatcaaggacaaggccaagctggagagcggccactttgatgccagccacgtgcgcagccccaccgtgactggaaacatcctgcaggatggagtgtccatcgccccccacagctgcacccctgggaaggtgaccctggatgaggacctggagcgcatcctgtttgtggccaacctgggcaccatcgcccccatggagaatgtgaccatcttcatcagcaccagcagcgagctgcccaccctgcccagcggggctgtgcgggtgctgctgcctgctgtgtgtgcccccaccgtgccccagttctgcaccaagagcacaggcaccagcaaccagcaggcccagggcaaggacagacactgcttcggggcctgggcccctggctcctggaacaagctgtgcctggccaccctgctgaacacagaggtgagcaaccccatggagtatgagttcaacttccagctggagatccggggcccctgcctgctggccggcgtggagagccccacccatgagatccgggcagatgctgcccccagcgcccggagcgccaagagcatcatcatcaccctggccaacaagcacacctttgacaggcctgtggagatcctgatccaccccagcgagccccacatgccccacgtgctgattgaaaaaggagacatgaccctgggggagtttgaccagcacctgaagggccgcacagacttcatcaagggcatgaagaagaagagcagagctgagaggaagacagagatcatcaggaagaggctgcacaaggacatcccccaccacagcgtcatcatgctgaacttctgcccagacctgcagagcgtgcagccctgcctgaggaaggcccatggagagttcatcttcctgattgacaggagcagctccatgagcggcatctccatgcaccgggtgaaggatgccatgctggtggccctgaagagcctgatgcctgcctgcctcttcaacatcatcggcttcggcagcaccttcaagagcctcttccccagcagccagacctacagcgaggacagcctggccatggcctgtgatgacatccagaggatgaaggctgacatgggcggcaccaacatcctgagccccctgaagtgggtgatccggcagcctgtgcaccggggccacccccggctgctgtttgtgatcacagatggagctgtgaacaacacaggcaaggtgctggagctggtgagaaatcatgccttcagcacccgctgctacagctttggcatcggccccaacgtgtgccaccggctggtgaagggcctggcctctgtgtctgagggcagcgctgagctgctgatggagggggagcggctgcagcccaagatggtgaagagcctgaagaaggccatggcccctgtgctgagtgatgtgacagtggagtggatcttccctgagaccacagaggtgctggtgtcccctgtgtctgccagcagcctcttccctggagagcggctggtgggctatggaattgtgtgtgatgccagcctgcacatcagcaaccccaggagtgacaagagaagacgctacagcatgctgcacagccaggagagcggcagctctgtgttctaccacagccaggatgatggccctggcctggagggcggggactgtgccaagaacagcggggcccccttcatcctgggccaggccaagaatgcccggctggccagcggggacagcaccaccaagcatgacctgaacctgagccagaggagaagagcctacagcaccaaccagatcaccaaccacaagcccctgccccgggccaccatggccagtgaccccatgcctgctgccaagcgctaccccctgaggaaggcccggctgcaggacctgaccaaccagaccagcctggatgtgcagcgctggcagattgacctgcagcccctgctgaacagcggccaggacctgaaccagggccccaagctgcggggccctggggcccggcggcccagcctgctgccccagggctgccagcccttcctgccctggggccaggagacccaggcctggagccctgtgcgggagaggaccagtgacagccgcagccctggggacctggagcccagccaccaccccagcgcctttgaaacagagaccagcagtgactgggaccccccagctgagagccaggagcgggccagccccagcaggcctgccaccccagcccctgtgctgggcaaggccctggtgaagggcctgcatgacagccagaggctgcagtgggaggtgtcctttgagctgggcaccccaggccctgagcggggcggggcccaggatgctgacctgtggagcgagaccttccaccacctggccgcccgggccatcatccgggactttgagcagctggccgagcgggagggggagattgagcagggcagcaacagacgctaccaggtgtctgccctgcacaccagcaaggcctgcaacatcatcagcaagtacacagcctttgtgcctgtggatgtgtccaagagccgctacctgcccaccgtggtggagtaccccaacagcgctgccctgaggatgctgggcagccgggccctggcccagcagtggaggggcaccagcagcggcttcggccggccccagaccatgctgggggaggacagcgcccctggaaatggcaagttccaggccctgaacatggaggccagccccacagccctcttcagcgaggcccggagccctggccgggagaagcatggagccagcgagggcccccagaggagcctggccaccaacaccctgagctccatgaaggccagcgagaacctgtttggctcctggctgaacctgaacaagagccggctgctgaccagggctgccaagggcttcctgagcaagcccctcatcaaggctgtggagagcaccagcggcaaccagagctttgactacatccccctggtgtccctgcagctggccagcggggccttcctgctgaatgaggccttctgtgaggccacccacatccccatggagaagctgaagtggaccagccccttcacctgccaccgggtgtccctgaccacccggcccagcgagagcaagacccccagcccccagctgtgcaccagcagccccccaagacaccccagctgtgacagcttcagcctggagcccctggccaagggcaagctgggcctggagcccagggctgtggtggagcacacaggcaagctgtgggccaccgtggtgggcctggcctggctggagcacagcagcgccagctacttcacagagtgggagctggtggccgccaaggccaacagctggctggagcagcaggaggtgcctgagggccgcacccagggcaccctgaaggctgctgcccggcagctgtttgtgctgctgcggcactgggatgagaacctggagttcaacatgctgtgctacaaccccaactacgtgtag

SEQ ID NO: 7477 - DNA, 3051 bp, synthetic construct
  misc_feature 1..3051: note = source = /note="Description of Artificial Sequence: Synthetic coding sequence"
  source 1..3051: mol_type = other DNA
atgcctggcctgctgaactggatcactggagctgccctgcccctgacagccagtgatgtgaccagctgtgtgtctggctacgccctgggcctgacagccagcctgacctacggcaacctggaggcccagcccttccagggcctgtttgtgtaccccctggatgaatgtaccaccgtcatcggctttgaggccgtgattgctgacagagtggtgacagtgcagatcaaggacaaggccaagctggagagcggccactttgatgccagccacgtgcgcagccccaccgtgactggaaacatcctgcaggatggagtgtccatcgccccccacagctgcacccctgggaaggtgaccctggatgaggacctggagcgcatcctgtttgtggccaacctgggcaccatcgcccccatggagaatgtgaccatcttcatcagcaccagcagcgagctgcccaccctgcccagcggggctgtgcgggtgctgctgcctgctgtgtgtgcccccaccgtgccccagttctgcaccaagagcacaggcaccagcaaccagcaggcccagggcaaggacagacactgcttcggggcctgggcccctggctcctggaacaagctgtgcctggccaccctgctgaacacagaggtgagcaaccccatggagtatgagttcaacttccagctggagatccggggcccctgcctgctggccggcgtggagagccccacccatgagatccgggcagatgctgcccccagcgcccggagcgccaagagcatcatcatcaccctggccaacaagcacacctttgacaggcctgtggagatcctgatccaccccagcgagccccacatgccccacgtgctgattgaaaaaggagacatgaccctgggggagtttgaccagcacctgaagggccgcacagacttcatcaagggcatgaagaagaagagcagagctgagaggaagacagagatcatcaggaagaggctgcacaaggacatcccccaccacagcgtcatcatgctgaacttctgcccagacctgcagagcgtgcagccctgcctgaggaaggcccatggagagttcatcttcctgattgacaggagcagctccatgagcggcatctccatgcaccgggtgaaggatgccatgctggtggccctgaagagcctgatgcctgcctgcctcttcaacatcatcggcttcggcagcaccttcaagagcctcttccccagcagccagacctacagcgaggacagcctggccatggcctgtgatgacatccagaggatgaaggctgacatgggcggcaccaacatcctgagccccctgaagtgggtgatccggcagcctgtgcaccggggccacccccggctgctgtttgtgatcacagatggagctgtgaacaacacaggcaaggtgctggagctggtgagaaatcatgccttcagcacccgctgctacagctttggcatcggccccaacgtgtgccaccggctggtgaagggcctggcctctgtgtctgagggcagcgctgagctgctgatggagggggagcggctgcagcccaagatggtgaagagcctgaagaaggccatggcccctgtgctgagtgatgtgacagtggagtggatcttccctgagaccacagaggtgctggtgtcccctgtgtctgccagcagcctcttccctggagagcggctggtgggctatggaattgtgtgtgatgccagcctgcacatcagcaaccccaggagtgacaagagaagacgctacagcatgctgcacagccaggagagcggcagctctgtgttctaccacagccaggatgatggccctggcctggagggcggggactgtgccaagaacagcggggcccccttcatcctgggccaggccaagaatgcccggctggccagcggggacagcaccaccaagcatgacctgaacctgagccagaggagaagagcctacagcaccaaccagatcaccaaccacaagcccctgccccgggccaccatggccagtgaccccatgcctgctgccaagcgctaccccctgaggaaggcccggctgcaggacctgaccaaccagaccagcctggatgtgcagcgctggcagattgacctgcagcccctgctgaacagcggccaggacctgaaccagggccccaagctgcggggccctggggcccggcggcccagcctgctgccccagggctgccagcccttcctgccctggggccaggagacccaggcctggagccctgtgcgggagaggaccagtgacagccgcagccctggggacctggagcccagccaccaccccagcgcctttgaaacagagaccagcagtgactgggaccccccagctgagagccaggagcgggccagccccagcaggcctgccaccccagcccctgtgctgggcaaggccctggtgaagggcctgcatgacagccagaggctgcagtgggaggtgtcctttgagctgggcaccccaggccctgagcggggcggggcccaggatgctgacctgtggagcgagaccttccaccacctggccgcccgggccatcatccgggactttgagcagctggccgagcgggagggggagattgagcagggcagcaacagacgctaccaggtgtctgccctgcacaccagcaaggcctgcaacatcatcagcaagtacacagcctttgtgcctgtggatgtgtccaagagccgctacctgcccaccgtggtggagtaccccaacagcgctgccctgaggatgctgggcagccgggccctggcccagcagtggaggggcaccagcagcggcttcggccggccccagaccatgctgggggaggacagcgcccctggaaatggccccaggaagtgcagccagaccctgatgggcttcaagaccaagacagaaacagagcacagcgtgcggggctggaagcccaggggggccctgcagaaccagagcgtgctgagcacctcctggagccactggccacccaagcccaggaggaccagcagcaccccagagcccagctag

SEQ ID NO: 7478 - DNA, 3663 bp, synthetic construct; identical to SEQ ID NO: 7476
  misc_feature 1..3663: note = source = /note="Description of Artificial Sequence: Synthetic coding sequence"
  source 1..3663: mol_type = other DNA

SEQ ID NO: 7479 - DNA, 5235 bp, synthetic construct
  misc_feature 1..5235: note = source = /note="Description of Artificial Sequence: Synthetic coding sequence"
  source 1..5235: mol_type = other DNA
atgaggctgctgtggggcctcatctgggccagcagcttcttcaccctgagcctgcagaagccccggctgctgctcttcagccccagcgtggtgcacctgggcgtgcccctgtctgtgggcgtgcagctgcaggatgtgccccggggccaggtggtgaagggctctgtgttcctgaggaaccccagcagaaataatgtgccctgcagccccaaggtggacttcaccctgagcagcgagcgggactttgccctgctgagcctgcaggtgcccctgaaggatgccaagagctgtggcctgcaccagctgctgcggggccctgaggtgcagctggtggcccacagcccctggctgaaggacagcctgagcaggaccaccaacatccagggcatcaacctgctcttcagcagcagaagaggccacctgttcctgcagacagaccagcccatctacaaccctggccagagggtgcgctacagagtgtttgccctggaccagaagatgaggcccagcacagacaccatcaccgtgatggtggagaacagccacggcctgcgggtgaggaagaaggaggtgtacatgcccagcagcatcttccaggatgactttgtgatcccagacatcagcgagcccggcacctggaagatcagcgcccgcttcagtgatggcctggagagcaacagcagcacccagtttgaggtgaagaagtatgtgctgcccaactttgaggtgaagatcaccccaggcaagccctacatcctgactgtgcccggccacctggatgagatgcagctggacatccaggcccgctacatctacggcaagcctgtgcagggcgtggcctacgtgcgcttcggcctgctggatgaagatggcaagaagaccttcttccggggcctggagagccagaccaagctggtgaatggccagagccacatcagcctgagcaaggccgagttccaggatgccctggagaagctgaacatgggcatcacagacctgcagggcctgcggctgtatgtggccgccgccatcatcgagtacccaggaggagagatggaggaggccgagctgacctcctggtactttgtgagcagccccttcagcctggacctgagcaagaccaagaggcacctggtgcctggggcccccttcctgctgcaggccctggtgcgggagatgagcggcagccctgccagcggcatccctgtgaaggtgtctgccaccgtgagcagccctggctctgtgcctgaggtgcaggacatccagcagaacacagatggcagcggccaggtgtccatccccatcatcatcccccagaccatcagcgagctgcagctgtctgtgtctgctggcagcccccacccagccatcgcccggctgactgtggccgcccctccttctgggggccctggcttcctgagcattgaaagaccagacagccggcccccccgggtgggggacaccctgaacctgaacctgcgggctgtgggcagcggggccaccttcagccactactactacatgatcctgagccggggccagatcgtgttcatgaaccgggagcccaagaggaccctgacctctgtgtctgtgtttgtggaccaccacctggcccccagcttctactttgtggccttctactaccatggagaccaccctgtggccaacagcctgcgggtggatgtgcaggccggggcctgtgagggcaagctggagctgtctgtggatggagccaagcagtacagaaatggagagagcgtgaagctgcacctggagacagacagcctggccctggtggccctgggcgccctggacacagccctgtatgctgctggcagcaagagccacaagcccctgaacatgggcaaggtgtttgaggccatgaacagctatgacctgggctgcggccctgggggcggggacagcgccctgcaggtgttccaggccgccggcctggccttcagtgatggagaccagtggaccctgagcaggaagaggctgagctgccccaaggagaagaccaccaggaagaagagaaatgtgaacttccagaaggccatcaatgagaagctgggccagtatgccagccccacagccaagcgctgctgccaggatggagtgacccggctgcccatgatgaggagctgtgagcagagagctgcccgggtgcagcagcctgactgccgggagcccttcctgagctgctgccagtttgctgagagcctgaggaagaagagccgggacaagggccaggccggcctgcagagggccctggagatcctgcaggaggaggacctgattgatgaagatgacatccctgtgcgctccttcttccctgagaactggctgtggagggtggagaccgtggaccgcttccagatcctgaccctgtggctgcctgacagcctgaccacctgggagatccacggcctgagcctgagcaagaccaagggcctgtgtgtggccacccctgtgcagctgcgggtcttccgggagttccacctgcacctgcggctgcccatgtctgtgagaagatttgagcagctggagctgcggcctgtgctgtacaactacctggacaagaacctgactgtgtctgtgcacgtgtcccctgtggagggcctgtgcctggccggcggcggcggcctggcccagcaggtgctggtgcctgctggcagcgcccggcctgtggccttctctgtggtgcccacagctgctgctgctgtgtccctgaaggtggtggcccggggcagctttgagttccctgtgggagatgctgtgtccaaggtgctgcagatcgagaaggagggcgccatccaccgggaggagctggtgtatgagctgaaccccctggaccaccggggccgcaccctggagatccctggcaacagcgaccccaacatgatcccagatggagacttcaacagctatgtgcgggtgacagccagtgaccccctggacaccctgggcagcgagggcgccctgagccctggaggagtggccagcctgctgcggctgccccggggctgtggggagcagaccatgatctacctggcccccaccctggccgccagccgctacctggacaagacagagcagtggagcaccctgcccccagagaccaaggaccatgctgtggacctgatccagaagggctacatgaggatccagcagttcaggaaggcagatggcagctatgctgcctggctgagccggggcagcagcacctggctgacagcctttgtgctgaaggtgctgagcctggcccaggagcaggtgggcggcagccctgagaagctgcaggagaccagcaactggctgctgagccagcagcaggctgatggcagcttccaggacctgagccctgtgatccaccgctccatgcagggcggcctggtgggcaatgatgagaccgtggccctgacagcctttgtgaccatcgccctgcaccacggcctggccgtgttccaggatgagggcgctgagcccctgaagcagagggtggaggccagcatcagcaaggccagcagcttcctgggggagaaggccagcgctggcctgctgggcgcccacgccgccgccatcacagcctatgccctgaccctgaccaaggccccagctgacctgcggggcgtggcccacaacaacctgatggccatggcccaggagaccggggacaacctgtactggggctctgtgacaggcagccagagcaatgctgtgagccccaccccagcccccaggaaccccagcgaccccatgccccaggccccagccctgtggattgagaccacagcctatgccctgctgcacctgctgctgcacgagggcaaggccgagatggctgaccaggccgccgcctggctgacccggcagggcagcttccagggcggcttccgcagcacccaggacacagtgattgccctggatgccctgagcgcctactggatcgccagccacaccacagaggagcggggcctgaatgtgaccctgagcagcactggaagaaatggcttcaagagccacgccctgcagctgaacaaccggcagatccggggcctggaggaggagctgcagttcagcctgggcagcaagatcaacgtgaaggtgggcggcaacagcaagggcaccctgaaggtgctgcggacctacaacgtgctggacatgaagaacaccacctgccaggacctgcagatcgaggtgacagtgaagggccacgtggagtacaccatggaggccaatgaagattatgaggactatgaatatgatgagctgcctgccaaggatgatcctgatgcccccctgcagcctgtgacccccctgcagctgtttgagggcagaagaaacagaagaagaagagaggcccccaaggtggtggaggagcaggagagccgggtgcactacacagtgtgcatctggagaaatggcaaggtgggcctgagcggcatggccatcgcagatgtgaccctgctgagcggcttccacgccctgcgggctgacctggagaagctgaccagcctgagtgacagatatgtgagccactttgaaacagagggcccccacgtgctgctgtactttgacagcgtgcccaccagccgggagtgtgtgggctttgaggccgtgcaggaggtgcctgtgggcctggtgcagcctgccagcgccaccctgtatgactactacaaccctgagcggcgctgcagcgtcttctacggggcccccagcaagagccggctgctggccaccctgtgcagcgctgaggtgtgccagtgtgccgagggcaagtgcccccggcagaggcgggccctggagcggggcctgcaggatgaagatggctacaggatgaagtttgcctgctactacccccgggtggagtatggcttccaggtgaaggtgctgcgggaggacagccgggccgccttccggctgtttgagaccaagatcacccaggtgctgcacttcaccaaggatgtgaaggccgccgccaaccagatgaggaacttcctggtgcgggccagctgccgcctgcggctggagcccgggaaggagtacctgatcatgggcctggatggagccacctatgacctggagggccacccccagtacctgctggacagcaacagctggattgaggagatgcccagcgagcggctgtgccgcagcacccggcagagagctgcctgtgcccagctgaatgacttcctgcaggagtatggcacccagggctgccaggtgtag

SEQ ID NO: 7480 - DNA, 1242 bp, synthetic construct
  misc_feature 1..1242: note = source = /note="Description of Artificial Sequence: Synthetic coding sequence"
  source 1..1242: mol_type = other DNA
atgaagggggccctgggcagccctgtggccgccgccggggccgccatgcaggagagctttggctgtgtggtggccaaccgcttccaccagctgctggatgatgaaagtgacccctttgacatcctgcgggaggccgagcggcggcggcagcagcagctgcagaggaagagaagagatgaagctgctgctgctgctggagctggcccccggggcggccgcagccctgctggggccagcggccacagagctggagctgggggccggcgggagagccagaaggagaggaagagcctgcctgcccctgtggcccagaggccagacagccctgggggcggcctgcaggcccctggccagaagaggaccccaagaagaggagagcagcagggctggaatgacagccggggccctgagggcatgctggagagagctgagaggaggagctaccgggagtaccggccctatgaaacagagcggcaggccgacttcaccgctgagaagttcccagatgagaagccaggggacagatttgaccgggaccggcccctgcggggccggggcggcccccggggcggcatgaggggccggggccggggcggccctggcaacagagtgtttgatgcctttgaccagaggggcaagcgggagtttgaaagatatggaggaaatgacaagattgctgtgaggacagaggacaacatgggcggctgcggcgtgaggacctggggcagcggcaaggacaccagtgatgtggagcccacagcccccatggaggagcccaccgtggtggaggagagccagggcaccccagaggaggagagccctgccaaggtgcctgagctggaggtggaggaggagacccaggtgcaggagatgaccctggatgagtggaagaacctgcaggagcagacccggcccaagccagagttcaacatcaggaagccagagagcacagtgcccagcaaggctgtggtgatccacaagagcaagtacagagatgacatggtgaaggatgattatgaagatgacagccacgtgttcaggaagccagccaatgacatcaccagccagctggagatcaactttggaaacctgcccaggcctggccgcggggcccggggcggcacccggggcggccggggccgcatcagaagagctgagaactacggccccagggctgaggtggtgatgcaggatgtggcccccaacccagatgatcctgaggacttccctgccctgtcctag

SEQ ID NO: 7481 - DNA, 927 bp, synthetic construct
  misc_feature 1..927: note = source = /note="Description of Artificial Sequence: Synthetic coding sequence"
  source 1..927: mol_type = other DNA
atgaagggggccctgggcagccctgtggccgccgccggggccgccatgcaggagagctttggctgtgtggtggccaaccgcttccaccagctgctggatgatgaaagtgacccctttgacatcctgcgggaggccgagcggcggcggcagcagcagctgcagaggaagagaagagatgaagctgctgctgctgctggagctggcccccggggcggccgcagccctgctggggccagcggccacagagctggagctgggggccggcgggagagccagaaggagaggaagagcctgcctgcccctgtggcccagaggccagacagccctgggggcggcctgcaggcccctggccagaagaggaccccaagaagaggagagcagcagggctggaatgacagccggggccctgagggcatgctggagagagctgagaggaggagctaccgggagtaccggccctatgaaacagagcggcaggccgacttcaccgctgagaagttcccagatgagaaggtgcctgagctggaggtggaggaggagacccaggtgcaggagatgaccctggatgagtggaagaacctgcaggagcagacccggcccaagccagagttcaacatcaggaagccagagagcacagtgcccagcaaggctgtggtgatccacaagagcaagtacagagatgacatggtgaaggatgattatgaagatgacagccacgtgttcaggaagccagccaatgacatcaccagccagctggagatcaactttggaaacctgccccggcccggccgcggggcccggggcggcacccggggcggccggggccgcatccggcgggcagaaaattatggccccagggctgaggtggtgatgcaggatgtggcccccaacccagatgatcctgaggacttccctgccctgtcctag

SEQ ID NO: 7482 - DNA, 1437 bp, synthetic construct
  misc_feature 1..1437: note = source = /note="Description of Artificial Sequence: Synthetic coding sequence"
  source 1..1437: mol_type = other DNA
atgccccggcggggctacagcaagccaggctcctggggcagcttctgggccatgctgaccctggtgggcctggtgacccacgccgcccagagagcagatgtgggcggggaggccgccggcaccagcatcaaccacagccaggccgtgctgcagaggctgcaggagctgctgcggcagggcaatgccagtgatgtggtgctgcgggtgcaggccgccggcacagatgaggtgcgggtcttccacgcccaccggctgctgctgggcctgcacagcgagctgttcctggagctgctgagcaaccagagcgaggccgtgctgcaggagccccaggactgtgccgctgtgtttgacaagttcatccgctacctgtactgtggggagctgactgtgctgctgacccaggccatccccctgcaccggctggccaccaagtatggagtgagcagcctgcagaggggcgtggccgactacatgagggcccacctggccggcggggccggccctgctgtgggctggtaccactatgctgtgggcactggagatgaggccctgcgggagagctgcctgcagttcctggcctggaacctgtctgctgtggccgccagcacagagtggggcgctgtgtccccagagctgctgtggcagctgctgcagaggagtgacctggtgctgcaggatgagctggagctgttccacgccctggaggcctggctgggccgggcccggcccccacctgctgtggccgagcgggccctgcgggccatccgctaccccatgatccccccagcccagctgttccagctgcaggcccggtctgctgccctggcccggcacggccctgctgtggccgacctgctgctgcaggcctaccagttccacgccgccagccccctgcactacgccaagttctttgatgtgaatggaagtgccttcctgcccaggaactacctggccccagcctggggcgccccctgggtgatcaacaacccagccagagatgacaggagcaccagcttccagacccagctgggccccagcggccatgatgctggccggcgggtgacctggaatgtgctcttcagcccccgctggctgcctgtgtccctgcggcctgtgtatgcagatgctgctggaacagccctgcctgctgcccggccagaagatggccggccccggctggtggtgaccccagccagcagtggaggagatgctgctggggtgtccttccagaagacagtgctggtgggcgcccggcagcagggccgcctgctggtgagacatgcctacagcttccaccagagcagcgaggaggccggggacttcctggcccatgctgacctgcagaggaggaacagcgagtacctggtggagaatgccctgcacctgcacctgattgtgaagcctgtgtaccacaccctcatccgcacccccaagtag

SEQ ID NO: 7483 - DNA, 477 bp, synthetic construct
  misc_feature 1..477: note = source = /note="Description of Artificial Sequence: Synthetic coding sequence"
  source 1..477: mol_type = other DNA
atgtgctgccctgggggccactacaccctcatcctgcggcggggcaaccgcttcagaagagagaagaggcctgccaaggtgactggagcccagacagaggtgcagctggccccacccctgccccggggccgggcccggcgcagcccctggagcgtgcccatcagcctgagcattgaccggctggagtttgacctgctgtacccagccatcaagggggacaccatccagctgtacctgggcgccaagctgctggacagccagggcaaggtgaccaagtggttcaacaacagcgctgccagcctgaccatgcccaccctggacaacatccccttcagcctcatcgtgtcccaggatgtggtgaaggctgctgtggccgctgtgctgagccctgaggagttcatggtgctgctggacagcgtgctgcctgagagcgcccaccggctgaagagcagcatcggcctcatcaatgagaagtag

SEQ ID NO: 7484 - DNA, 771 bp, synthetic construct; identical to SEQ ID NO: 7291
  misc_feature 1..771: note = source = /note="Description of Artificial Sequence: Synthetic coding sequence"
  source 1..771: mol_type = other DNA

SEQ ID NO: 7485 - DNA, 771 bp, synthetic construct; identical to SEQ ID NO: 7291
  misc_feature 1..771: note = source = /note="Description of Artificial Sequence: Synthetic coding sequence"
  source 1..771: mol_type = other DNA

SEQ ID NO: 7486 - DNA, 657 bp, synthetic construct
  misc_feature 1..657: note = source = /note="Description of Artificial Sequence: Synthetic coding sequence"
  source 1..657: mol_type = other DNA
atgatgtgccccctgtggaggctgctgatcttcctgggcctgctggccctgcccctggccccccacaagcagccctggccaggcctggcccaggcccaccgggacaacaagagcaccctggcccgcatcatcgcccagggcctcatcaagcacaatgctgagagccgcatccagaacatccactttggagaccggctgaatgccagcgcccaggtggcccctggcctggtgggctggctgatcagcggcaggaagcaccagcagcagcaggagagccgcagctttgacaacaacatcgtgaagatgtgtgcccacatgagcatcgtggtggagttctggctggagaaggatgaatttggaagaagagacctggtgattggaaaatgtgatgctgagcccagctctgtgcacgtggccatcctgacagaggccatcccccccaagatgaaccagttcctgtacaacctgaaggagaacctgcagaaggtgctgccccacatggtggagagccaggtgtgccccctcatcggggagatcctgggccagctggatgtgaagctgctgaagagcctcatcgagcaggaggccgcccacgagcccacccaccacgagaccagccagcccagcgcctgccaggccggggagagccccagctag

SEQ ID NO: 7487 - DNA, 765 bp, synthetic construct
  misc_feature 1..765: note = source = /note="Description of Artificial Sequence: Synthetic coding sequence"
  source 1..765: mol_type = other DNA
atgatgtgccccctgtggaggctgctgatcttcctgggcctgctggccctgcccctggccccccacaagcagccctggccaggcctggcccaggcccaccgggacaacaagagcaccctggcccgcatcatcgcccagggcctcatcaagcacaatgctgagagccgcatccagaacatccactttggagaccggctgaatgccagcgcccaggtggcccctggcctggtgggctggctgatcagcggcaggaagcaccagcagcagcaggagagcagcatcaacatcaccaacatccagctggactgtggcggcatccagatctccttccacaaggagtggttcagcgccaacatcagcctggagtttgacctggagctgcggcccagctttgacaacaacatcgtgaagatgtgtgcccacatgagcatcgtggtggagttctggctggagaaggatgaatttggaagaagagacctggtgattggaaaatgtgatgctgagcccagctctgtgcacgtggccatcctgacagaggccatcccccccaagatgaaccagttcctgtacaacctgaaggagaacctgcagaaggtgctgccccacatggtggagagccaggtgtgccccctcatcggggagatcctgggccagctggatgtgaagctgctgaagagcctcatcgagcaggaggccgcccacgagcccacccaccacgagaccagccagcccagcgcctgccaggccggggagagccccagctag

SEQ ID NO: 7488 - DNA, 1635 bp, synthetic construct
  misc_feature 1..1635: note = source = /note="Description of Artificial Sequence: Synthetic coding sequence"
  source 1..1635: mol_type = other DNA
atgaagatctccatgatcaactacaagagcctgctggccctgctcttcatcctggcctcctggatcatcttcaccgtcttccagaacagcaccaaggtgtggagcgccctgaacctgagcatcagcctgcactactggaacaacagcaccaagagcctcttccccaagacccccctcatcagcctgaagcccctgacagaaacagagctgcgcatcaaggagatcatcgagaagctggaccagcagatccccccccggcccttcacccacgtgaacaccaccaccagcgccacccacagcacagccaccatcctgaacccccgggacacctactgccgcggggaccagctgcacatcctgctggaggtgcgggaccacctgggccgcaggaagcagtatggaggagacttcctgcgggccaggatgagcagccctgccctgatggccggggccagcggcaaggtgacagacttcaacaacggcacctacctggtgtccttcaccctcttctgggagggccaggtgtccctgagcctgctgctgatccaccccagcgagggcgtgtctgccctgtggagcgccaggaaccagggctatgacagagtcatcttcaccggccagtttgtgaatggcaccagccaggtgcacagtgaatgtggcctcatcctgaacaccaatgctgagctgtgccagtacctggacaacagagaccaggagggcttctactgtgtgcggccccagcacatgccctgtgccgccctgacccacatgtacagcaagaacaagaaggtgtcctacctgagcaagcaggagaagagcctgtttgagaggagcaatgtgggcgtggagatcatggagaagttcaacaccatctctgtgtccaagtgcaacaaggagaccgtggccatgaaggagaagtgcaagtttggcatgaccagcaccatccccagcggccacgtgtggaggaacacctggaaccctgtgtcctgcagcctggccaccgtgaagatgaaggaatgtctgcggggcaagctgatctacctgatgggagacagcaccatccggcagtggatggagtacttcaaggccagcatcaacaccctgaagtctgtggacctgcacgagagcggcaagctgcagcaccagctggccgtggacctggacaggaacatcaacatccagtggcagaagtactgctaccccctgattggctccatgacctacagcgtgaaggagatggagtacctgacccgggccatcgacagaactggaggagagaagaacacagtgattgtcatcagcctgggccagcacttccggcccttccccattgatgtgttcatcagaagagccctgaatgtgcacaaggccatccagcacctgctgctgcggagcccagacaccatggtgatcatcaagacagagaacatccgggagatgtacaatgatgctgagcgcttcagtgacttccacggctacatccagtacctgatcatcaaggacatcttccaggacctgtctgtgtccatcattgatgcctgggacatcaccatcgcctacggcaccaacaacgtgcaccccccccagcacgtggtgggcaaccagatcaacatcctgctgaactacatctgctag

SEQ ID NO: 7489 - DNA, 1845 bp, synthetic construct
  misc_feature 1..1845: note = source = /note="Description of Artificial Sequence: Synthetic coding sequence"
  source 1..1845: mol_type = other DNA
atgtggatggcctggtgtgtggccgccctgtctgtggtggccgtgtgtggcaccagccatgagaccaacacagtgctgcgggtgaccaaggatgtgctgagcaatgccatcagcggcatgctgcagcagagtgatgccctgcacagcgccctgcgggaggtgcccctgggcgtgggggacatcccctacaatgacttccacgtgcggggccccccacctgtgtacaccaacgggaagaagctggatggcatctaccagtatggccacatcgagaccaatgacaacacagcccagctgggcggcaagtaccgctatggagagatcctggagagcgagggcagcatccgggacctgagaaattctggctacagatctgcagaaaatgcctacggcggccaccggggcctgggccgctacagagctgcccctgtgggccgcctgcacagaagagagctgcagcccggggagatccccccaggagtggccactggagctgtgggccctgggggcctgctgggcaccggcggcatgctggccgcagatggcatcctggccggccagggcggcctgctgggcggcggcggcctgctgggagatggcggcctgctgggcggcggcggcgtgctgggcgtgctgggggagggcggcatcctgagcacagtgcagggcatcaccggcctgagaattgtggagctgaccctgccccgggtgtctgtgcggctgctgcccggggtgggcgtgtacctgagcctgtacaccagggtggccatcaacgggaagagcctgattggcttcctggacattgctgtggaggtgaacatcacagccaaggtgcggctgaccatggacagaacaggctacccccggctggtgattgaaagatgtgacaccctgctgggcggcatcaaggtgaagctgctgcggggcctgctgcccaacctggtggacaacctggtgaacagagtgctggctgatgtgctgcctgacctgctgtgccccatcgtggatgtggtgctgggcctggtgaatgaccagctgggcctggtggacagcctcatccccctgggcatcctgggctctgtgcagtacaccttcagcagcctgcccctggtgactggagagttcctggagctggacctgaacaccctggtgggggaggccggcggcggcctgattgactaccccctgggctggccagctgtgagccccaagcccatgcctgagctgccccccatgggagacaacaccaagagccagctggccatgtctgccaacttcctgggctctgtgctgaccctgctgcagaagcagcacgccctggacctggacatcaccaacggcatgtttgaggagctgccccccctgaccacagccaccctgggcgccctgatccccaaggtgttccagcagtacccagagagctgccccctcatcatccgcatccaggtgctgaacccccccagcgtgatgctgcagaaggacaaggccctggtgaaggtgctggccacagctgaggtgatggtgtcccagcccaaggacctggagaccaccatctgcctgattgatgtggacacagagttcctggccagcttcagcacagaaggagacaagctgatgattgatgccaagctggagaagaccagcctgaacctgcggaccagcaatgtgggcaactttgatattggcctgatggaggtgctggtggagaagatctttgacctggccttcatgcctgccatgaatgctgtgctgggcagcggcgtgcccctgcccaagatcctgaacatcgacttcagcaatgctgacattgatgtgctggaggacctgctggtgctgagcgcctag

SEQ ID NO: 7490 - DNA, 1431 bp, synthetic construct
  misc_feature 1..1431: note = source = /note="Description of Artificial Sequence: Synthetic coding sequence"
  source 1..1431: mol_type = other DNA
atgcagcctgtgatgctggccctgtggagcctgctgctgctgtggggcctggccaccccctgccaggagctgctggagaccgtgggcaccctggccagaattgacaaggatgagctgggcaaggccatccagaacagcctggtgggggagcccatcctgcagaatgtgctgggctctgtgacagctgtgaacagaggcctgctgggcagcggcggcctgctgggcggcggcggcctgctgggccacggcggcgtgtttggagtggtggaggagctgagcggcctgaagattgaggagctgaccctgcccaaggtgctgctgaagctgctgcccggctttggagtgcagctgagcctgcacaccaaggtgggcatgcactgcagcggccccctgggcggcctgctgcagctggccgctgaggtgaatgtgaccagccgggtggccctggccgtgagcagccggggcacccccatcctgatcctgaagcgctgcagcaccctgctgggccacatcagcctcttcagcggcctgctgcccacccccctgtttggagtggtggagcagatgctgttcaaggtgctgcccggcctgctgtgccctgtggtggacagcgtgctgggcgtggtgaatgagctgctgggcgctgtgctgggcctggtgtccctgggcgccctgggctctgtggagttcagcctggccaccctgcccctcatcagcaaccagtacatcgagctggacatcaaccccatcgtgaagtctgtggccggggacatcatcgacttccccaagagccgggccccagccaaggtgccccccaagaaggaccacaccagccaggtgatggtgcccctgtacctgttcaacaccaccttcggcctgctgcagaccaatggagccctggacatggacatcaccccagagctggtgcccagtgatgtgcccctgaccaccacagacctggccgccctgctgcctgaggccctgggcaagctgcccctgcaccagcagctgctgctcttcctgcgggtgcgggaggcccccaccgtgaccctgcacaacaagaaggccctggtgtccctgcctgccaacatccacgtgctcttctacgtgcccaagggcaccccagagagcctgtttgagctgaacagcgtgatgacagtgcgggcccagctggcccccagcgccaccaagctgcacatcagcctgagcctggagcggctgtctgtgaaggtggccagcagcttcacccacgcctttgatggcagccggctggaggagtggctgagccacgtggtgggcgctgtgtatgcccccaagctgaatgtggccctggatgtgggcatccccctgcccaaggtgctgaacatcaacttcagcaacagcgtgctggagatcgtggagaatgctgtggtgctgactgtggccagctag

SEQ ID NO: 7491 - DNA, 585 bp, synthetic construct
  misc_feature 1..585: note = source = /note="Description of Artificial Sequence: Synthetic coding sequence"
  source 1..585: mol_type = other DNA
atgcaggatgcccccctgagctgcctgagccccaccaagtggagctctgtgtcctctgctgacagcacagagaagagcgccagcggggccggcaccaggaacctgcccttccagttctgcctgcggcaggccctgaggatgaaggccgccggcatcctgaccctcatcggctgcctggtgactggagctgagagcaagatctacacccgctgcaagctggccaagatcttcagccgggccggcctggacaactactggggcttcagcctgggcaactggatctgcatggcctactatgaaagtggctacaacaccacagcccagacagtgctggatgatggcagcattgattatggcatcttccagatcaacagctttgcctggtgccggcggggcaagctgaaggagaacaaccactgccacgtggcctgcagcgccctgatcacagatgacctgacagatgccatcatctgtgccaggaagatcgtgaaggagacccagggcatgaactactggcagggctggaagaagcactgtgagggccgggacctgtctgagtggaagaagggctgtgaggtgtcctag

SEQ ID NO: 7492 - DNA, 1266 bp, synthetic construct
  misc_feature 1..1266: note = source = /note="Description of Artificial Sequence: Synthetic coding sequence"
  source 1..1266: mol_type = other DNA
atgggcttcctgagccccatctacgtgatcttcttcttcttcggcgtgaaggtgcactgccagtatgagacctaccagtgggatgaagattatgaccaggagccagatgatgactaccagacaggcttccccttccggcagaatgtggactatggagtgcccttccaccagtacaccctgggctgtgtgtctgagtgcttctgccccaccaacttccccagctccatgtactgtgacaacaggaagctgaagaccatccccaacatccccatgcacatccagcagctgtacctgcagttcaatgaaattgaagctgtgacagccaacagcttcatcaatgccacccacctgaaggagatcaacctgagccacaacaagatcaagagccagaagattgattatggagtgtttgccaagctgcccaacctgctgcagctgcacctggagcacaacaacctggaggagttccccttccccctgcccaagagcctggagcggctgctgctgggctacaatgagatcagcaagctgcagaccaatgccatggatggcctggtgaacctgaccatgctggacctgtgctacaactacctgcatgacagcctgctgaaggacaagatctttgccaagatggagaagctgatgcagctgaacctgtgcagcaaccggctggagagcatgcctcctggcctgcccagcagcctgatgtacctgagcctggagaacaacagcatcagcagcatccctgagaagtactttgacaagctgcccaagctgcacaccctgaggatgagccacaacaagctgcaggacatcccctacaacatcttcaacctgcccaacatcgtggagctgtctgtgggccacaacaagctgaagcaggccttctacatccccaggaacctggagcacctgtacctgcagaacaatgaaattgagaagatgaacctgactgtgatgtgccccagcattgaccccctgcactaccaccacctgacctacatccgggtggaccagaacaagctgaaggagcccatcagcagctacatcttcttctgcttcccccacatccacaccatctactacggggagcagaggagcaccaacggccagaccatccagctgaagacccaggtgttccgccgcttcccagatgatgatgatgaaagtgaagatcatgatgatcctgacaatgcccacgagagccctgagcaggagggcgctgagggccactttgacctgcactactatgagaaccaggagtag

SEQ ID NO: 7493 - DNA, 252 bp, synthetic construct
  misc_feature 1..252: note = source = /note="Description of Artificial Sequence: Synthetic coding sequence"
  source 1..252: mol_type = other DNA
atgctgtgctgctgccccctggctgatgccctgctgatcttcctggagaccggcagctgcttccagcccggccagcagagcgagaccctgagccagaagcagaacaagaccaacaacaagaagtgggccggcggggccggctgccggcccttccggctgtggtgggtgggccgcagcagaggagctggggtgcagctgtacagcaccaagaagggctggatcctgcggggcaagggcggcacagaggcctag

SEQ ID NO: 7494 - DNA, 2559 bp, synthetic construct
  misc_feature 1..2559: note = source = /note="Description of Artificial Sequence: Synthetic coding sequence"
  source 1..2559: mol_type = other DNA
atgctgcccacagaggtgccccagagccaccctggccccagcgccctgctgctgctgcagctgctgctgccccccaccagcgccttcttccccaacatctggagcctgctggccgcccctggcagcatcacccaccaggacctgacagaggaggccgccctgaatgtgaccctgcagctgttcctggagcagcccccacctggccggccccccctgcggctggaggacttcctgggccgcaccctgctggctgatgacctgtttgctgcctacttcggccctggcagcagccgccgcttccgggccgccctgggggaggtgtcccgggccaatgctgcccaggacttcctgcccaccagcagaaatgaccctgacctgcactttgatgctgagcggctgggccagggccgggcccggctggtgggcgccctgcgggagaccgtggtggccgcccgggccctggaccacaccctggcccggcagaggctgggcgccgccctgcacgccctgcaggacttctacagccacagcaactgggtggagctgggggagcagcagccccacccccacctgctgtggccccggcaggagctgcagaacctggcccaggtggccgaccccacctgcagcgactgtgaggagctgagctgccccaggaactggctgggcttcaccctgctgaccagcggctacttcggcacccacccccccaagcccccaggcaagtgcagccatggaggccactttgacaggagcagcagccagcccccccggggcggcatcaacaaggacagcaccagccctggcttcagcccccaccacatgctgcacctgcaggccgccaagctggccctgctggccagcatccaggccttcagcctgctgcggagccggctgggggaccgggacttcagccggctgctggacatcaccccagccagcagcctgagctttgtgctggacaccaccggctccatgggagaggagatcaatgctgccaagatccaggcccggcacctggtggagcagaggcggggcagccccatggagcctgtgcactacgtgctggtgcccttccatgaccccggcttcggccctgtgttcaccaccagtgaccctgacagcttctggcagcagctgaatgagatccacgccctgggcggcggagatgagcctgagatgtgcctgagcgccctgcagctggccctgctgcacaccccacccctgagtgacatctttgtgttcacagatgccagccccaaggatgccttcctgaccaaccaggtggagagcctgacccaggagcggcgctgccgggtgaccttcctggtgacagaggacaccagccgggtgcagggccgggcccggcgggagatcctgagccccctgcgctttgagccctacaaggctgtggccctggccagcggcggggaggtgatcttcaccaaggaccagcacatcagagatgtggccgccatcgtgggggagagcatggccgccctggtgaccctgcccctggacccccctgtggtggtgcccggccagcccctggtgttttctgtggatggcctgctgcagaagatcaccgtgcgcatccatggagacatcagcagcttctggatcaagaacccagctggggtgtcccagggccaggaggagggcggcggccccctgggccacacccggcgcttcggccagttctggatggtgaccatggatgatcctccccagacaggcacctgggagatccaggtgacagctgaggacaccccaggagtgcgggtgcaggcccagaccagcctggacttcctgttccacttcggcatccccatggaggatggcccccaccctggcctgtaccccctgacccagcctgtggccggcctgcagacccagctgctggtggaggtgacaggcctgggcagccgggccaaccctggggacccccagccccacttcagccacgtgatcctgcggggcgtgcctgagggcgctgagctgggccaggtgcccctggagcctgtgggccccccagagcggggcctgctggccgccagcctgagccccaccctgctgagcaccccccggcccttcagcctggagctgattggccaggatgctgctggccggcggctgcacagagctgccccccagcccagcacagtggtgcctgtgctgctggagctgagcggccccagcggcttcctggcccctggcagcaaggtgcccctgagcctgcgcatcgccagcttcagcggcccccaggacctggacctgcggacctttgtgaaccccagcttcagcctgaccagcaacctgagccgggcccacctggagctgaatgaaagtgcctggggccgcctgtggctggaggtgcctgattctgctgccccagacagcgtggtgatggtgacagtgacagctgggggccgggaggccaaccctgtgccccccacccacgccttcctgcggctgctggtgtctgccccagccccccaggtgaggaaccactacttccccagccagggccctgcccaccacccctaccgcctcatctag

SEQ ID NO: 7495 - DNA, 2676 bp, synthetic construct
  misc_feature 1..2676: note = source = /note="Description of Artificial Sequence: Synthetic coding sequence"
  source 1..2676: mol_type = other DNA
atgctgcccacagaggtgccccagagccaccctggccccagcgccctgctgctgctgcagctgctgctgccccccaccagcgccttcttccccaacatctggagcctgctggccgcccctggcagcatcacccaccaggacctgacagaggaggccgccctgaatgtgaccctgcagctgttcctggagcagcccccacctggccggccccccctgcggctggaggacttcctgggccgcaccctgctggctgatgacctgtttgctgcctacttcggccctggcagcagccgccgcttccgggccgccctgggggaggtgtcccgggccaatgctgcccaggacttcctgcccaccagcagaaatgaccctgacctgcactttgatgctgagcggctgggccagggccgggcccggctggtgggcgccctgcgggagaccgtggtggccgcccgggccctggaccacaccctggcccggcagaggctgggcgccgccctgcacgccctgcaggacttctacagccacagcaactgggtggagctgggggagcagcagccccacccccacctgctgtggccccggcaggagctgcagaacctggcccaggtggccgaccccacctgcagcgactgtgaggagctgagctgccccaggaactggctgggcttcaccctgctgaccagcggctacttcggcacccacccccccaagcccccaggcaagtgcagccatggaggccactttgacaggagcagcagccagcccccccggggcggcatcaacaaggacagcaccagccctggcttcagcccccaccacatgctgcacctgcaggccgccaagctggccctgctggccagcatccaggccttcagcctgctgcggagccggctgggggaccgggacttcagccggctgctggacatcaccccagccagcagcctgagctttgtgctggacaccaccggctccatgggagaggagatcaatgctgccaagatccaggcccggcacctggtggagcagaggcggggcagccccatggagcctgtgcactacgtgctggtgcccttccatgaccccggcttcggccctgtgttcaccaccagtgaccctgacagcttctggcagcagctgaatgagatccacgccctgggcggcggagatgagcctgagatgtgcctgagcgccctgcagctggccctgctgcacaccccacccctgagtgacatctttgtgttcacagatgccagccccaaggatgccttcctgaccaaccaggtggagagcctgacccaggagcggcgctgccgggtgaccttcctggtgacagaggacaccagccgggtgcagggccgggcccggcgggagatcctgagccccctgcgctttgagccctacaaggctgtggccctggccagcggcggggaggtgatcttcaccaaggaccagcacatcagagatgtggccgccatcgtgggggagagcatggccgccctggtgaccctgcccctggacccccctgtggtggtgcccggccagcccctggtgttttctgtggatggcctgctgcagaagatcaccgtgcgcatccatggagacatcagcagcttctggatcaagaacccagctggggtgtcccagggccaggaggagggcggcggccccctgggccacacccggcgcttcggccagttctggatggtgaccatggatgatcctccccagacaggcacctgggagatccaggtgacagctgaggacaccccaggagtgcgggtgcaggcccagaccagcctggacttcctgttccacttcggcatccccatggaggatggcccccaccctggcctgtaccccctgacccagcctgtggccggcctgcagacccagctgctggtggaggtgacaggcctgggcagccgggccaaccctggggacccccagccccacttcagccacgtgatcctgcggggcgtgcctgagggcgctgagctgggccaggtgcccctggagcctgtgggccccccagagcggggcctgctggccgccagcctgagccccaccctgctgagcaccccccggcccttcagcctggagctgattggccaggatgctgctggccggcggctgcacagagctgccccccagcccagcacagtggtgcctgtgctgctggagctgagcggccccagcggcttcctggcccctggcagcaaggtgcccctgagcctgcgcatcgccagcttcagcggcccccaggacctggacctgcggacctttgtgaaccccagcttcagcctgaccagcaacctgagccgggcccacctggagctgaatgaaagtgcctggggccgcctgtggctggaggtgcctgattctgctgccccagacagcgtggtgatggtgacagtgacagctgggggccgggaggccaaccctgtgccccccacccacgccttcctgcggctgctggtgtctgccccagccccccaggacagacacaccacccccaccggcagcagtgaccccatcctgaccacagccaccccagccttcagccccttcaccctggtgacccagggccgggccggggccggcctggccgccggcagcccctggtggggcaccgtgggcggcgtgctgctgctgctgggcctggcctcctggtag

SEQ ID NO: 7496 - DNA, 552 bp, synthetic construct
  misc_feature 1..552: note = source = /note="Description of Artificial Sequence: Synthetic coding sequence"
  source 1..552: mol_type = other DNA
atggtgcgcatctggaccaccatcatgattgtgctgatcctgctgctgcgcatcggccccaacaagcccagcctgagcggccggcaggccccagcccaggcccagaccagtgacctggtgcccagcctcttccccctgggcctgtgggcccctggcttctgcacctggagcagcccagatgaggacaagaggcccaggaagcctgtgcccggcaccggcaacagagattctggcacccggcggcggctgcaggatgccacagagcaggaccccaggcctggaaatgatgtggccagcgctgagacagctggcccccccagccccagcggcatccgggcccaggaccgggcccccaggcacagaagagcccccccagccaggatgcctgtggccccagcccccagcgcagatggagagcccctgcaggagcagggcggcggcctcttccacaggaccaggtctgtgtacaacggcctggagctgaacacctggatgaaggtggagcggctgtttgtggagaagttccaccagagcttcagcctggacaactag

SEQ ID NO: 7497 - DNA, 444 bp, synthetic construct
  misc_feature 1..444: note = source = /note="Description of Artificial Sequence: Synthetic coding sequence"
  source 1..444: mol_type = other DNA
atggccggccctgctggcagccagagcctgggccccctgtgcttccacagcagcccccaggccctgtacacagtgctgctgattgtgctggtgatgatgagcctggtgtttgggaagtttgtgcctgtgaactgggagcccccccagcccctgcccttccccaagtacctgcgctgctaccgctgcctgctggagaccaaggagctgggctgcctgctgggcagtgacatctgcctgaccccagctggcagcagctgcatcaccctgcacaagaagaacagcagcggcagtgatgtgatggtgtctgactgccgcagcaaggagcagatgtctgactgcagcaacaccaggaccagccctgtgtctggcttctggatcttcagccagtactgcttcctggacttctgcaatgacccccagaacagaggcctgtacaccccctag

SEQ ID NO: 7498 - DNA, 447 bp, synthetic construct
  misc_feature 1..447: note = source = /note="Description of Artificial Sequence: Synthetic coding sequence"
  source 1..447: mol_type = other DNA
atgcagaccttccctgtggccggggccctggaccctgccatcctggacaccagcagcccccaggccctgtacacagtgctgctgattgtgctggtgatgatgagcctggtgtttgggaagtttgtgcctgtgaactgggagcccccccagcccctgcccttccccaagtacctgcgctgctaccgctgcctgctggagaccaaggagctgggctgcctgctgggcagtgacatctgcctgaccccagctggcagcagctgcatcaccctgcacaagaagaacagcagcggcagtgatgtgatggtgtctgactgccgcagcaaggagcagatgtctgactgcagcaacaccaggaccagccctgtgtctggcttctggatcttcagccagtactgcttcctggacttctgcaatgacccccagaacagaggcctgtacaccccctag

SEQ ID NO: 7499 - DNA, 606 bp, synthetic construct
  misc_feature 1..606: note = source = /note="Description of Artificial Sequence: Synthetic coding sequence"
  source 1..606: mol_type = other DNA
atgaaggtgcacatgctggtgggcgtgctggtgatggtgggcttcaccgtgggcaaggtgcctgtgcctgacatccgcacctgccacttctgcctggtggaggaccccagcgtgggctgcatcagcggcagcgagaagtgcaccatcagcagcagcagcctgtgcatggtgatcaccatctactatgatgtgaaggtgcgcttcatcgtgcggggctgcggccagtacatctcctaccgctgccaggagaagaggaacacctactttgctgagtactggtaccaggcccagtgctgccagtatgactactgcaacagctggagcagcccccagctgcagagcagcctgcctgagccccatgaccggcccctggccctgcccctgagtgacagccagatccagtggttctaccaggccctgaacctgagcctgcccctgcccaacttccacgccggcacagagccagatggcctggaccccatggtgaccctgagcctgaacctgggcctgagctttgctgagctgcggaggatgtacctgttcctgaacagcagcggcctgctggtgctgccccaggccggcctgctgaccccccaccccagctag

SEQ ID NO: 7500 - DNA, 345 bp, synthetic construct
  misc_feature 1..345: note = source = /note="Description of Artificial Sequence: Synthetic coding sequence"
  source 1..345: mol_type = other DNA
atgctgggcggggaggaggcccggcccaacagctggccctggcaggtgtccctgcagtacagcagcaatggccagtggtaccacacctgtggcggcagcctgattgccaacagctgggtgctgacagctgcccactgcatccggcagatcatcaaggcccacaaggtgctgcagcgctgcagcctcatcctcttctttgtgcgggacctgtgcagcagccagctggagctgactggagtgtctgctggcagcagcggcatctacagagtgatgctgggccagcacaacctgtatgtggccgagagcggcagcctggccgtgtctgtgtccaagatcgtggtgtag

SEQ ID NO: 7501 - DNA, 810 bp, synthetic construct
  misc_feature 1..810: note = source = /note="Description of Artificial Sequence: Synthetic coding sequence"
  source 1..810: mol_type = other DNA
atgatccgcaccctgctgctgagcaccctggtggccggggccctgagctgtggggtgtccacctacgccccagacatgagcaggatgctgggcggggaggaggcccggcccaacagctggccctggcaggtgtccctgcagtacagcagcaatggccagtggtaccacacctgtggcggcagcctgattgccaacagctgggtgctgacagctgcccactgcatcagcagcagcggcatctacagagtgatgctgggccagcacaacctgtatgtggccgagagcggcagcctggccgtgtctgtgtccaagatcgtggtgcacaaggactggaacagcgaccaggtgtccaaaggaaatgacatcgccctgctgaagctggccaaccctgtgtccctgacagacaagatccagctggcctgcctgcccccagctggcaccatcctgcccaacaactacccctgctacgtgacaggctggggccgcctgcagaccaacggggccctgcctgatgacctgaagcagggccagctgctggtggtggactatgccacctgcagcagcagcggctggtggggcagcacagtgaagaccaacatgatctgtgctggaggagatggagtcatctgcacctgcaatggagacagcggcggccccctgaactgccaggccagtgatggccgctgggaggtgcacggcatcggcagcctgacctctgtgctgggctgcaactactactacaagcccagcatcttcaccagggtgagcaactacaatgactggatcaacagcgtcatcgccaacaactag

SEQ ID NO: 7502 - DNA, 567 bp, synthetic construct
  misc_feature 1..567: note = source = /note="Description of Artificial Sequence: Synthetic coding sequence"
  source 1..567: mol_type = other DNA
atgttccaccagatctgggccgccctgctgtacttctacggcatcatcctgaacagcatctaccagtgcccagagcacagccagctgaccaccctgggcgtggatggcaaggagttccctgaggtgcacctgggccagtggtacttcatcgccggggccgcccccaccaaggaggagctggccacctttgatcctgtggacaacatcgtgttcaacatggctgctggcagcgcccccatgcagctgcacctgcgggccaccatccgcatgaaggatggcctgtgtgtgcccaggaagtggatctaccacctgacagagggcagcacagacctgaggacagagggccgcccagacatgaagacagagctgttcagcagcagctgccctgggggcatcatgctgaatgaaacaggccagggctaccagcgcttcctgctgtacaacagaagcccccaccccccagagaagtgtgtggaggagttcaagagcctgaccagctgcctggacagcaaggccttcctgctgacccccaggaaccaggaggcctgtgagctgagcaacaactag

SEQ ID NO: 7503 - DNA, 390 bp, synthetic construct
  misc_feature 1..390: note = source = /note="Description of Artificial Sequence: Synthetic coding sequence"
  source 1..390: mol_type = other DNA
atggctgctggcagcgcccccatgcagctgcacctgcgggccaccatccgcatgaaggatggcctgtgtgtgcccaggaagtggatctaccacctgacagagggcagcacagacctgaggacagagggccgcccagacatgaagacagagctgttcagcagcagctgccctgggggcatcatgctgaatgaaacaggccagggctaccagcgcttcctgctgtacaacagaagcccccaccccccagagaagtgtgtggaggagttcaagagcctgaccagctgcctggacagcaaggccttcctgctgacccccaggaaccagggcaagggcctgaagagccacaagacaggcctgggcctgaccaagagcagtggagtgactggatag

SEQ ID NO: 7504 - DNA, 351 bp, synthetic construct
  misc_feature 1..351: note = source = /note="Description of Artificial Sequence: Synthetic coding sequence"
  source 1..351: mol_type = other DNA
atggctgctggcagcgcccccatgcagctgcacctgcgggccaccatccgcatgaaggatggcctgtgtgtgcccaggaagtggatctaccacctgacagagggcagcacagacctgaggacagagggccgcccagacatgaagacagagctgttcagcagcagctgccctgggggcatcatgctgaatgaaacaggccagggctaccagcgcttcctgctgtacaacagaagcccccaccccccagagaagtgtgtggaggagttcaagagcctgaccagctgcctggacagcaaggccttcctgctgacccccaggaaccaggaggcctgtgagctgagcaacaactag

SEQ ID NO: 7505 - DNA, 435 bp, synthetic construct
  misc_feature 1..435: note = source = /note="Description of Artificial Sequence: Synthetic coding sequence"
  source 1..435: mol_type = other DNA
atgatccgcaccctgctgctgagcaccctggtggccggggccctgagctgtggggaccccacctacccaccctacgtgaccagggtggtgggcggggaggaggcccggcccaacagctggccctggcaggtgtccctgcagtacagcagcaatggcaagtggtaccacacctgtggcggcagcctgattgccaacagctgggtgctgacagctgcccactgcatcagccagagcatggtgcagtgtgcccacaaggtgctgcagcgctgcagcctcatcctcttctttgtgcgggacctgtgcagcagccagctggagctgactggagtgtctgctggcagcagcaggacctacagagtgggcctgggccgccacaacctgtatgtggccgagagcggcagcctggccgtgtctgtgtccaagatcgtggtgtag

SEQ ID NO: 7506 - DNA, 204 bp, synthetic construct
  misc_feature 1..204: note = source = /note="Description of Artificial Sequence: Synthetic coding sequence"
  source 1..204: mol_type = other DNA
atgaagctgctgctgctgaccctgactgtgctgctgctgctgagccagctgaccccaggcggcacccagcgctgctggaacctgtatggaaaatgtcgctaccgctgcagcaagaaggagcgggtgtatgtgtactgcatcaacaacaagatgtgctgcgtgaagcccaagtaccagcccaaggagcgctggtggcccttctag

SEQ ID NO: 7507 - DNA, 231 bp, synthetic construct
  misc_feature 1..231: note = source = /note="Description of Artificial Sequence: Synthetic coding sequence"
  source 1..231: mol_type = other DNA
atgaagctgctgctgctgctgctgactgtgaccctgctgctggcccaggtgacccctgtgatgaagtgctggggcaagagcggccgctgcaggaccacctgcaaggagagcgaggtgtactacatcctgtgcaagacagaggccaagtgctgcgtggaccccaagtatgtgcctgtgaagcccaagctgacagacaccaacaccagcctggagagcaccagcgctgtgtag

SEQ ID NO: 7508 - DNA, 267 bp, synthetic construct
  misc_feature 1..267: note = source = /note="Description of Artificial Sequence: Synthetic coding sequence"
  source 1..267: mol_type = other DNA
atgaagctgctgtacctgttcctggccatcctgctggccatcgaggagcctgtgatctctgtggagtgctggatggatggccactgccgcctgctgtgcaaggatggagaagattccatcatccgctgcaggaacaggaagcgctgctgcgtgcccagccgctacctgaccatccagcctgtgaccatccacggcatcctgggctggaccaccccccagatgagcaccacagcccccaagatgaagaccaacatcaccaacagatag

SEQ ID NO: 7509 - DNA, 255 bp, synthetic construct
  misc_feature 1..255: note = source = /note="Description of Artificial Sequence: Synthetic coding sequence"
  source 1..255: mol_type = other DNA
atgaagctgctgtacctgttcctggccatcctgctggccatcgaggagcctgtgatcagcggcaagaggcacatcctgcgctgcatgggcaacagcggcatctgccgggccagctgcaagaagaatgagcagccctacctgtactgcaggaactgccagagctgctgcctgcagagctacatgaggatcagcatcagcggcaaggaggagaacacagactggagctatgagaagcagtggccccggctgccctag

SEQ ID NO: 7510 - DNA, 2631 bp, synthetic construct; identical to SEQ ID NO: 6925
  misc_feature 1..2631: note = source = /note="Description of Artificial Sequence: Synthetic coding sequence"
  source 1..2631: mol_type = other DNA

SEQ ID NO: 7511 - DNA, 2742 bp, synthetic construct; identical to SEQ ID NO: 7141
  misc_feature 1..2742: note = source = /note="Description of Artificial Sequence: Synthetic coding sequence"
  source 1..2742: mol_type = other DNA

SEQ ID NO: 7512 - DNA, 2631 bp, synthetic construct; identical to SEQ ID NO: 6925
  misc_feature 1..2631: note = source = /note="Description of Artificial Sequence: Synthetic coding sequence"
  source 1..2631: mol_type = other DNA

SEQ ID NO: 7513 - DNA, 2631 bp, synthetic construct; identical to SEQ ID NO: 6925
  misc_feature 1..2631: note = source = /note="Description of Artificial Sequence: Synthetic coding sequence"
  source 1..2631: mol_type = other DNA

SEQ ID NO: 7514 - DNA, 2760 bp, synthetic construct
  misc_feature 1..2760: note = source = /note="Description of Artificial Sequence: Synthetic coding sequence"
  source 1..2760: mol_type = other DNA
atgggccctgaggccctgagcagcctgctgctgctgctgctggtggccagcggagatgctgacatgaagggccactttgatcctgccaagtgccgctatgccctgggcatgcaggacaggaccatcccagacagcgacatcagcgccagcagctcctggagcgacagcacagctgcccggcacagccggctggagagcagtgatggagatggagcctggtgcccagctggcagcgtcttccccaaggaggaggagtacctgcaggtggacctgcagaggctgcacctggtggccctggtgggcacccagggcagacatgctgggggcctgggcaaggagttcagccgcagctaccgcctgcgctacagcagagatggaagacgctggatgggctggaaggaccgctggggccaggaggtgatctctggaaatgaagatcctgagggcgtggtgctgaaggacctgggcccccccatggtggcccggctggtgcgcttctaccccagggctgacagagtgatgtctgtgtgcctgcgggtggagctgtatggctgcctgtggagagatggcctgctgagctacacagcccctgtgggccagaccatgtacctgtctgaggccgtgtacctgaatgacagcacctatgatggccacacagtgggcggcctgcagtatggaggcctgggccagctggctgatggagtggtgggcctggatgacttcaggaagagccaggagctgcgggtgtggccaggctatgactatgtgggctggagcaaccacagcttcagcagcggctacgtggagatggagtttgaatttgaccggctgcgggccttccaggccatgcaggtgcactgcaacaacatgcacaccctgggcgcccggctgcccggcggcgtggagtgccgcttccggcggggccctgccatggcctgggagggggagcccatgaggcacaacctgggcggcaacctgggggacccccgggcccgggctgtgtctgtgcccctgggcggccgggtggcccgcttcctgcagtgccgcttcctgtttgctggcccctggctgctcttcagcgagatctccttcatcagtgatgtggtgaacaacagcagccctgccctgggcggcaccttccccccagccccctggtggcccccaggccccccacccaccaacttcagcagcctggagctggagccccggggccagcagcctgtggccaaggccgagggcagccccacagccatcctgattggctgcctggtggccatcatcctgctgctgctgctgatcatcgccctgatgctgtggaggctgcactggaggcggctgctgagcaaggccgagcggcgggtgctggaggaggagctgactgtgcacctgtctgtgcctggggacaccatcctgatcaacaaccggcccggcccccgggagcccccaccctaccaggagccccggccccggggcaaccccccccacagcgccccctgtgtgcccaacggcagcgccctgctgctgagcaacccagcctaccgcctgctgctggccacctacgcccggcccccccggggccctggcccccccaccccagcctgggccaagcccaccaacacccaggcctacagcggggactacatggagcctgagaagccaggggcccccctgctgcccccaccaccccagaacagcgtgccccactacgccgaggccgacatcgtgaccctgcagggcgtgactggaggcaacacctatgctgtgcctgccctgcccccaggagctgtgggagatggccccccccgggtggacttccccaggagccggctgcgcttcaaggagaagctgggggagggccagtttggagaggtgcacctgtgtgaggtggacagcccccaggacctggtgtccctggacttccccctgaatgtgaggaagggccaccccctgctggtggccgtgaagatcctgcggccagatgccaccaagaatgccagcttcagcctcttcagcagaaatgacttcctgaaggaggtgaagatcatgagccggctgaaggaccccaacatcatccggctgctgggcgtgtgtgtgcaggatgaccccctgtgcatgatcacagactacatggagaatggagacctgaaccagttcctgagcgcccaccagctggaggacaaggctgctgagggcgcccctggagatggccaggccgcccagggccccaccatctcctaccccatgctgctgcacgtggccgcccagatcgccagcggcatgagatacctggccaccctgaactttgtgcaccgggacctggccaccaggaactgcctggtgggggagaacttcaccatcaagattgctgactttggcatgagcaggaacctgtatgctggggactactacagagtgcagggccgggctgtgctgcccatccgctggatggcctgggagtgcatcctgatgggcaagttcaccacagccagtgatgtgtgggcctttggagtgaccctgtgggaggtgctgatgctgtgccgggcccagcccttcggccagctgacagatgagcaggtgattgaaaatgctggggagttcttccgggaccagggccggcaggtgtacctgagccggcccccagcctgcccccagggcctgtatgagctgatgctgcgctgctggagccgggagagcgagcagaggcctcccttcagccagctgcaccgcttcctggctgaagatgccctgaacacagtgtag

SEQ ID NO: 7515 - DNA, 1041 bp, synthetic construct
  misc_feature 1..1041: note = source = /note="Description of Artificial Sequence: Synthetic coding sequence"
  source 1..1041: mol_type = other DNA
atgctgaagaagcccctgtctgctgtgacctggctgtgcatcttcatcgtggcctttgtgagccacccagcctggctgcagaagctgagcaagcacaagaccccagcccagccccagctgaaggccgccaactgctgtgaggaggtgaaggagctgaaggcccaggtggccaacctgagcagcctgctgtctgagctgaacaagaagcaggagcgggactgggtgtctgtggtgatgcaggtgatggagctggagagcaacagcaagaggatggagagccggctgacagatgctgagagcaagtacagcgagatgaacaaccagattgacatcatgcagctgcaggccgcccagacagtgacccagaccagcgcagatgccatctatgactgcagcagcctgtaccagaagaactaccgcatcagcggcgtgtacaagctgcccccagatgacttcctgggcagccctgagctggaggtgttctgtgacatggagaccagcggcggcggctggaccatcatccagaggaggaagagcggcctggtgtccttctacagagactggaagcagtacaagcagggcttcggcagcatccggggggacttctggctgggcaatgagcacatccaccggctgagccggcagcccacccggctgcgggtggagatggaggactgggagggcaacctgcgctatgcagagtacagccactttgtgctgggcaatgagctgaacagctaccgcctcttcctgggcaactacacaggaaatgtgggcaatgatgccctgcagtaccacaacaacacagccttcagcaccaaggacaaggacaatgacaactgcctggacaagtgtgcccagctgaggaagggcggctactggtacaactgctgcacagacagcaacctgaatggagtgtactaccgcctgggggagcacaacaagcacctggatggcatcacctggtacggctggcacggcagcacctacagcctgaagagggtggagatgaagatccggcctgaggacttcaagccctag

SEQ ID NO: 7516 - DNA, 1056 bp, synthetic construct
  misc_feature 1..1056: note = source = /note="Description of Artificial Sequence: Synthetic coding sequence"
  source 1..1056: mol_type = other DNA
atgaagggccgggctgtgtcctttgaccccctggcctgccagggcctgaatgccagccctggcagcctgaccagccccctgcggcgcatccgcagcctgaccggccgggaggtgctgacccccttccctggcctgggcacagctgctgccccagcccagggcggggcccacctgaagccccacagcctggtgctgcccatcacagccctgcccccaccacccctggccctgcggggccggcaggccaccagcaagctgccccccttcctgagcagccccttcccccccagcctgtgcccctgggtgcctgaccccggcttcaaggagacagccttcctgtatgctgtgagcagcgctgccctgacccacaccctggcccgggcctgcagcgctggccgcatggagcgctgcacctgtgatgacagccctggcctggagagccggcaggcctggcagtggggcgtgtgtggggacaacctgaagtacagcaccaagttcctgagcaacttcctgggcagcaagaggggcaacaaggacctgcgggcccgggcagatgcccacaacacccacgtgggcatcaaggctgtgaagagcggcctgcggaccacctgcaagtgccacggcgtgtctggcagctgtgctgtgaggacctgctggaagcagctgagccccttccgggagaccggccaggtgctgaagctgcgctatgacagcgctgtgaaggtgagcagcgccaccaatgaggccctgggccgcctggagctgtgggccccagcccggcagggcagcctgaccaagggcctggcccccaggtctggggacctggtgtacatggaggacagccccagcttctgccggcccagcaagtacagccctggaacagctggccgggtgtgcagccgggaggccagctgcagcagcctgtgctgcggccggggctatgacacccagagccggctggtggccttcagctgccactgccaggtgcagtggtgctgctacgtggagtgccagcagtgtgtgcaggaggagctggtgtacacctgcaagcactag

SEQ ID NO: 7517 - DNA, 462 bp, synthetic construct
  misc_feature 1..462: note = source = /note="Description of Artificial Sequence: Synthetic coding sequence"
  source 1..462: mol_type = other DNA
atgaagcacctgcggccccagttccccctcatcctggccatctactgcttctgcatgctgcagatccccagcagcggcttcccccagcccctggccgaccccagtgatggcctggacatcgtgcagctggagcagctggcctactgcctgagccagtgggcccccctgagccggcagcccaaggacaaccaggacatctacaagcgcttcctgttccactacagcaggacccaggaggccacccaccctgtgaagacaggcttcccccctgtgcaccccctgatgcacctggccgccaagctggccaacagaaggatgaagaggatcctgcagaggggcagcggcacagctgctgtggacttcaccaagaaggaccacacagccacctggggccggcccttcttcctgttccggcccagaaatggaagaaatattgaagatgaggcccagatccagtggtag

SEQ ID NO: 7518 - DNA, 765 bp, synthetic construct
  misc_feature 1..765: note = source = /note="Description of Artificial Sequence: Synthetic coding sequence"
  source 1..765: mol_type = other DNA
atggctgctgccagcgctggggccacccggctgctgctgctgctgctgatggctgtggccgcccccagccgggcccggggcagcggctgccgggccggcaccggggcccggggagctggagctgagggccgggagggggaggcctgtggcaccgtgggcctgctgctggagcacagctttgaaattgatgattctgccaacttcaggaagaggggcagcctgctgtggaaccagcaggacggcaccctgagcctgagccagaggcagctgtctgaggaggagcggggccgcctgagagatgtggccgccctgaatggcctgtacagagtgcgcatcccccggcggcctggggccctggatggcctggaggccggcggctacgtgagcagctttgtgcctgcctgcagcctggtggagagccacctgagtgaccagctgaccctgcacgtggatgtggccggaaatgtggtgggcgtgtctgtggtgacccaccctgggggctgccggggccacgaggtggaggatgtggacctggagctgttcaacacctctgtgcagctgcagccccccaccacagcccctggccctgagacagctgccttcatcgagcggctggagatggagcaggcccagaaggccaagaacccccaggagcagaagagcttctttgccaagtactggcacatcatcctgggcggcgctgtgctgctgacagccctgcggcctgctgcccctggccctgcccccccaccccaggaggcctag

SEQ ID NO: 7519 - DNA, 810 bp, synthetic construct
  misc_feature 1..810: note = source = /note="Description of Artificial Sequence: Synthetic coding sequence"
  source 1..810: mol_type = other DNA
atggctgctgccagcgctggggccacccggctgctgctgctgctgctgatggctgtggccgcccccagccgggcccggggcagcggctgccgggccggcaccggggcccggggagctggagctgagggccgggagggggaggcctgtggcaccgtgggcctgctgctggagcacagctttgaaattgatgattctgccaacttcaggaagaggggcagcctgctgtggaaccagcaggacggcaccctgagcctgagccagaggcagctgtctgaggaggagcggggccgcctgagagatgtggccgccctgaatggcctgtacagagtgcgcatcccccggcggcctggggccctggatggcctggaggccggcggctacgtgagcagctttgtgcctgcctgcagcctggtggagagccacctgagtgaccagctgaccctgcacgtggatgtggccggaaatgtggtgggcgtgtctgtggtgacccaccctgggggctgccggggccacgaggtggaggatgtggacctggagctgttcaacacctctgtgcagctgcagccccccaccacagcccctggccctgagacagctgccttcatcgagcggctggagatggagcaggcccagaaggccaagaacccccaggagcagaagagcttctttgccaagtactggatgtacatcatccctgtggtgctcttcctgatgatgtctggggccccagacacaggaggccagggcggcggcggcggcggcggcggcggcggcggcagcggccgctgctgcgtgccccccagcctgtag

SEQ ID NO: 7520 - DNA, 480 bp, synthetic construct
  misc_feature 1..480: note = source = /note="Description of Artificial Sequence: Synthetic coding sequence"
  source 1..480: mol_type = other DNA
atgagcagcccccagaggaggaaggccatgccctgggccctgagcctgctgctgatgggcttccagctgctggtgacctacgcctggtgcagcgaggaggagatgggcggcaacaacaagatcgtgcaggaccccatgttcctggccaccgtggagtttgccctgaacaccttcaacgtgcagagcaaggaggagcacgcctaccgcctgctgcgggtgctgagctcctggagagaagattccatggacaggaagtggaggggcaagatggtgttctccatgaacctgcagctgcggcagacagtgtgcaggaagtttgaagatgacatcgacaactgccccttccaggagagcctggagctgaacaacgtgcggcagggcatctccttcccccaggtgcacagctgtggctgctgcatgggctgcggcgtgggcaccggggctgctgacaaggccatcccccgggacaagggcaagtag

SEQ ID NO: 7521 - DNA, 1737 bp, synthetic construct
  misc_feature 1..1737: note = source = /note="Description of Artificial Sequence: Synthetic coding sequence"
  source 1..1737: mol_type = other DNA
atgctgctgctgctgctgctggcccccctcttcctgcggcccccaggagctggaggagcccagaccccaaatgccaccagcgagggctgccagatcatccaccccccctgggagggcggcatccgctaccggggcctgacccgggaccaggtgaaggccatcaacttcctgcctgtggactatgaaattgaatatgtgtgccgcggggagcgggaggtggtgggccccaaggtgaggaagtgcctggccaacggctcctggacagacatggacacccccagccgctgtgtgcgcatctgcagcaagagctacctgaccctggagaatggcaaggtgttcctgactggaggagacctgcctgccctggatggagcccgggtggacttccgctgtgaccctgacttccacctggtgggcagcagccgcagcatctgcagccagggccagtggagcacccccaagccccactgccaggtgaacagaacaccccacagcgagaggagagctgtgtacatcggggccctcttccccatgtctgggggctggccaggcggccaggcctgccagcctgctgtggagatggccctggaggatgtgaacagccggcgggacatcctgcctgactatgagctgaagctgatccaccacgacagcaaatgtgaccccggccaggccaccaagtacctgtatgagctgctgtacaatgaccccatcaagatcatcctgatgcctggctgcagctctgtgtccaccctggtggccgaggccgccaggatgtggaacctgattgtgctgtcctatggcagcagcagccctgccctgagcaaccggcagcgcttccccaccttcttccgcacccaccccagcgccaccctgcacaaccccaccagggtgaagctgtttgagaagtggggctggaagaagatcgccaccatccagcagaccacagaggtgttcaccagcaccctggatgacctggaggagcgggtgaaggaggccggcatcgagatcaccttccggcagagcttcttcagtgaccctgctgtgcctgtgaagaacctgaagaggcaggatgcccgcatcatcgtgggcctcttctatgaaacagaggccaggaaggtgttctgtgaggtgtacaaggagcggctgtttgggaagaagtatgtgtggttcctgattggctggtatgctgacaactggttcaagatctatgaccccagcatcaactgcaccgtggatgagatgacagaggccgtggagggccacatcaccacagaaattgtgatgctgaacccagccaacaccaggagcatcagcaacatgaccagccaggagtttgtggagaagctgaccaagaggctgaagaggcaccctgaggagactggaggcttccaggaggcccccctggcctatgatgccatctgggccctggccctggccctgaacaagaccagcggcggcggcggccgctctggagtgcggctggaggacttcaactacaacaaccagaccatcacagaccagatctaccgggccatgaacagcagcagctttgagggcgtgtctggccacgtggtgtttgatgccagcggcagcaggatggcctggaccctgattgagcagctgcagggcggcagctacaagaagattggctactatgacagcaccaaggatgacctgtcctggagcaagacagacaagtggatcgtcatcagcaggacccacagccccacctag

SEQ ID NO: 7522 - DNA, 444 bp, synthetic construct
  misc_feature 1..444: note = source = /note="Description of Artificial Sequence: Synthetic coding sequence"
  source 1..444: mol_type = other DNA
atgctgggcctgccctggaagggcggcctgtcctgggccctgctgctgctgctgctgggcagccagatcctgctgatctatgcctggcacttccacgagcagagggactgtgatgagcacaacgtgatggcccgctacctgcctgccaccgtggagtttgctgtgcacaccttcaaccagcagagcaaggactactatgcctaccgcctgggccacatcctgaacagctggaaggagcaggtggagagcaagacagtgttctccatggagctgctgctgggccgcacccgctgtgggaagtttgaagatgacatcgacaactgccacttccaggagagcacagagctgaacaacaccttcacctgcttcttcaccatcagcacccggccctggatgacccagttcagcctgctgaacaagacctgcctggagggcttccactag

SEQ ID NO: 7523 - DNA, 444 bp, synthetic construct
  misc_feature 1..444: note = source = /note="Description of Artificial Sequence: Synthetic coding sequence"
  source 1..444: mol_type = other DNA
atgtggagcctgccccccagccgggccctgagctgtgcccccctgctgctgctcttctccttccagttcctggtgacctacgcctggaggttccaggaggaggaggagtggaatgaccagaagcagattgctgtgtacctgccccccaccctggagtttgctgtgtacaccttcaacaagcagagcaaggactggtacgcctacaagctggtgcctgtgctggcctcctggaaggagcagggctatgacaagatgaccttctccatgaacctgcagctgggccgcaccatgtgtgggaagtttgaagatgacatcgacaactgccccttccaggagagccctgagctgaacaacacctgcacctgcttcttcaccatcggcatcgagccctggaggaccaggtttgacctgtggaacaagacctgcagcggcggccacagctag

SEQ ID NO: 7524 - DNA, 2535 bp, synthetic construct; identical to SEQ ID NO: 7302
  misc_feature 1..2535: note = source = /note="Description of Artificial Sequence: Synthetic coding sequence"
  source 1..2535: mol_type = other DNA

SEQ ID NO: 7525 - DNA, 2700 bp, synthetic construct
  misc_feature 1..2700: note = source = /note="Description of Artificial Sequence: Synthetic coding sequence"
  source 1..2700: mol_type = other DNA
atgctgctgctgctgctgctggcccccctcttcctgcggcccccaggagctggaggagcccagaccccaaatgccaccagcgagggctgccagatcatccaccccccctgggagggcggcatccgctaccggggcctgacccgggaccaggtgaaggccatcaacttcctgcctgtggactatgaaattgaatatgtgtgccgcggggagcgggaggtggtgggccccaaggtgaggaagtgcctggccaacggctcctggacagacatggacacccccagccgctgtgtgaacagaacaccccacagcgagaggagagctgtgtacatcggggccctcttccccatgtctgggggctggccaggcggccaggcctgccagcctgctgtggagatggccctggaggatgtgaacagccggcgggacatcctgcctgactatgagctgaagctgatccaccacgacagcaaatgtgaccccggccaggccaccaagtacctgtatgagctgctgtacaatgaccccatcaagatcatcctgatgcctggctgcagctctgtgtccaccctggtggccgaggccgccaggatgtggaacctgattgtgctgtcctatggcagcagcagccctgccctgagcaaccggcagcgcttccccaccttcttccgcacccaccccagcgccaccctgcacaaccccaccagggtgaagctgtttgagaagtggggctggaagaagatcgccaccatccagcagaccacagaggtgttcaccagcaccctggatgacctggaggagcgggtgaaggaggccggcatcgagatcaccttccggcagagcttcttcagtgaccctgctgtgcctgtgaagaacctgaagaggcaggatgcccgcatcatcgtgggcctcttctatgaaacagaggccaggaaggtgttctgtgaggtgtacaaggagcggctgtttgggaagaagtatgtgtggttcctgattggctggtatgctgacaactggttcaagatctatgaccccagcatcaactgcaccgtggatgagatgacagaggccgtggagggccacatcaccacagaaattgtgatgctgaacccagccaacaccaggagcatcagcaacatgaccagccaggagtttgtggagaagctgaccaagaggctgaagaggcaccctgaggagactggaggcttccaggaggcccccctggcctatgatgccatctgggccctggccctggccctgaacaagaccagcggcggcggcggccgctctggagtgcggctggaggacttcaactacaacaaccagaccatcacagaccagatctaccgggccatgaacagcagcagctttgagggcgtgtctggccacgtggtgtttgatgccagcggcagcaggatggcctggaccctgattgagcagctgcagggcggcagctacaagaagattggctactatgacagcaccaaggatgacctgtcctggagcaagacagacaagtggattggaggcagccccccagctgaccagaccctggtgatcaagaccttccgcttcctgagccagaagctgttcatctctgtgtctgtgctgagcagcctgggcatcgtgctggccgtggtgtgcctgtccttcaacatctacaacagccacgtgcgctacatccagaacagccagcccaacctgaacaacctgacagctgtgggctgcagcctggccctggccgctgtgttccccctgggcctggatggctaccacatcggcaggaaccagttcccctttgtgtgccaggcccggctgtggctgctgggcctgggcttcagcctgggctacggctccatgttcaccaagatctggtgggtgcacacagtgttcaccaagaaggaggagaagaaggagtggaggaagaccctggagccctggaagctgtatgccaccgtgggcctgctggtgggcatggatgtgctgaccctggccatctggcagatcgtggaccccctgcacaggaccatcgagacctttgccaaggaggagcccaaggaggacattgatgtgtccatcctgccccagctggagcactgcagcagcaggaagatgaacacctggctgggcatcttctacggctacaagggcctgctgctgctgctgggcatcttcctggcctatgagaccaagtctgtgtccacagagaagatcaatgaccacagagctgtgggcatggccatctacaacgtggccgtgctgtgcctgatcacagcccctgtgaccatgatcctgagcagccagcaggatgctgcctttgcctttgccagcctggccatcgtgttcagcagctacatcaccctggtggtgctgtttgtgcccaagatgaggaggctcatcaccagaggagagtggcagagcgaggcccaggacaccatgaagacaggcagcagcaccaacaacaatgaggaggagaagagccggctgctggagaaggagaaccgggagctggagaagatcatcgccgagaaggaggagcgggtgtctgagctgcggcaccagctgcagagccggcagcagctgcggagcagaagacacccccccaccccacctgagcccagcggcggcctgccccggggccccccagagcccccagaccggctgagctgtgatggcagccgggtgcacctgctgtacaagtag

SEQ ID NO: 7526 - DNA, 2886 bp, synthetic construct
  misc_feature 1..2886: note = source = /note="Description of Artificial Sequence: Synthetic coding sequence"
  source 1..2886: mol_type = other DNA
atgctgctgctgctgctgctggcccccctcttcctgcggcccccaggagctggaggagcccagaccccaaatgccaccagcgagggctgccagatcatccaccccccctgggagggcggcatccgctaccggggcctgacccgggaccaggtgaaggccatcaacttcctgcctgtggactatgaaattgaatatgtgtgccgcggggagcgggaggtggtgggccccaaggtgaggaagtgcctggccaacggctcctggacagacatggacacccccagccgctgtgtgcgcatctgcagcaagagctacctgaccctggagaatggcaaggtgttcctgactggaggagacctgcctgccctggatggagcccgggtggacttccgctgtgaccctgacttccacctggtgggcagcagccgcagcatctgcagccagggccagtggagcacccccaagccccactgccaggtgaacagaacaccccacagcgagaggagagctgtgtacatcggggccctcttccccatgtctgggggctggccaggcggccaggcctgccagcctgctgtggagatggccctggaggatgtgaacagccggcgggacatcctgcctgactatgagctgaagctgatccaccacgacagcaaatgtgaccccggccaggccaccaagtacctgtatgagctgctgtacaatgaccccatcaagatcatcctgatgcctggctgcagctctgtgtccaccctggtggccgaggccgccaggatgtggaacctgattgtgctgtcctatggcagcagcagccctgccctgagcaaccggcagcgcttccccaccttcttccgcacccaccccagcgccaccctgcacaaccccaccagggtgaagctgtttgagaagtggggctggaagaagatcgccaccatccagcagaccacagaggtgttcaccagcaccctggatgacctggaggagcgggtgaaggaggccggcatcgagatcaccttccggcagagcttcttcagtgaccctgctgtgcctgtgaagaacctgaagaggcaggatgcccgcatcatcgtgggcctcttctatgaaacagaggccaggaaggtgttctgtgaggtgtacaaggagcggctgtttgggaagaagtatgtgtggttcctgattggctggtatgctgacaactggttcaagatctatgaccccagcatcaactgcaccgtggatgagatgacagaggccgtggagggccacatcaccacagaaattgtgatgctgaacccagccaacaccaggagcatcagcaacatgaccagccaggagtttgtggagaagctgaccaagaggctgaagaggcaccctgaggagactggaggcttccaggaggcccccctggcctatgatgccatctgggccctggccctggccctgaacaagaccagcggcggcggcggccgctctggagtgcggctggaggacttcaactacaacaaccagaccatcacagaccagatctaccgggccatgaacagcagcagctttgagggcgtgtctggccacgtggtgtttgatgccagcggcagcaggatggcctggaccctgattgagcagctgcagggcggcagctacaagaagattggctactatgacagcaccaaggatgacctgtcctggagcaagacagacaagtggattggaggcagccccccagctgaccagaccctggtgatcaagaccttccgcttcctgagccagaagctgttcatctctgtgtctgtgctgagcagcctgggcatcgtgctggccgtggtgtgcctgtccttcaacatctacaacagccacgtgcgctacatccagaacagccagcccaacctgaacaacctgacagctgtgggctgcagcctggccctggccgctgtgttccccctgggcctggatggctaccacatcggcaggaaccagttcccctttgtgtgccaggcccggctgtggctgctgggcctgggcttcagcctgggctacggctccatgttcaccaagatctggtgggtgcacacagtgttcaccaagaaggaggagaagaaggagtggaggaagaccctggagccctggaagctgtatgccaccgtgggcctgctggtgggcatggatgtgctgaccctggccatctggcagatcgtggaccccctgcacaggaccatcgagacctttgccaaggaggagcccaaggaggacattgatgtgtccatcctgccccagctggagcactgcagcagcaggaagatgaacacctggctgggcatcttctacggctacaagggcctgctgctgctgctgggcatcttcctggcctatgagaccaagtctgtgtccacagagaagatcaatgaccacagagctgtgggcatggccatctacaacgtggccgtgctgtgcctgatcacagcccctgtgaccatgatcctgagcagccagcaggatgctgcctttgcctttgccagcctggccatcgtgttcagcagctacatcaccctggtggtgctgtttgtgcccaagatgaggaggctcatcaccagaggagagtggcagagcgaggcccaggacaccatgaagacaggcagcagcaccaacaacaatgaggaggagaagagccggctgctggagaaggagaaccgggagctggagaagatcatcgccgagaaggaggagcgggtgtctgagctgcggcaccagctgcagagccggcagcagctgcggagcagaagacacccccccaccccacctgagcccagcggcggcctgccccggggccccccagagcccccagaccggctgagctgtgatggcagccgggtgcacctgctgtacaagtag

SEQ ID NO: 7527 - DNA, 882 bp, synthetic construct
  misc_feature 1..882: note = source = /note="Description of Artificial Sequence: Synthetic coding sequence"
  source 1..882: mol_type = other DNA
atgaacaacctgtccttcagcgagctgtgctgcctcttctgctgccccccctgccctgggaagatcgccagcaagctggccttcctgcccccagaccccacctacaccctgatgtgtgatgagagcggcagccgctggaccctgcacctgtctgaaagagctgactggcagtacagcagccgggagaaggatgccatcgagtgcttcatgaccaggaccagcaaaggaaacagaattgcctgcatgtttgtgcgctgcagccccaatgccaagtacaccctgctcttcagccacggcaatgctgtggacctgggccagatgagcagcttctacatcggcctgggcagccgcatcaactgcaacatcttctcctatgactacagcggctacggggccagcagcggcaagcccacagagaagaacctgtatgctgacatcgaggccgcctggctggccctgcggaccaggtatggcatccggccagaaaatgtcatcatctacggccagagcattggaacagtgcccagcgtggacctggccgcccgctatgaatctgctgctgtgatcctgcacagccccctgaccagcggcatgagggtggccttcccagacaccaagaagacctactgctttgatgccttccccaacatcgacaagatcagcaagatcaccagccctgtgctgatcatccatggaacagaagatgaagtcatcgacttcagccacggcctggccctgtttgagcgctgccagaggcctgtggagcccctgtgggtggagggcgccggccacaatgatgtggagctgtatggccagtacctggagcggctgaagcagtttgtgtcccaggagctggtgcagaagcacaaggagggcaagtag

SEQ ID NO: 7528 - DNA, 1155 bp, synthetic construct
  misc_feature 1..1155: note = source = /note="Description of Artificial Sequence: Synthetic coding sequence"
  source 1..1155: mol_type = other DNA
atgtggtacgtgtccacccggggcgtggccccccgggtgaactttgaaggagccctcttcagcggctacgccccagatggcggcctcttcatgcctgaggagctgccccagctggaccggggcaccctgtgccagtggagcaccctgagctacccaggcctggtgaaggagctgtgtgccctcttcatcggcagcgagctgctgcccaaggatgagctgaatgacctgattgaccgggccttcagccgcttccgccaccgggaggtggtgcacctgagccggctgagaaatggcctgaatgtgctggagctgtggcacggcgtgacctacgccttcaaggacctgagcctgagctgcaccacccagttcctgcagtacttcctggagaagcgggagaagcacgtgacagtggtggtgggcaccagcggggacaccggcagcgctgccatcgagagcgtgcagggcgccaagaacatggacatcatcgtgctgctgcccaagggccactgcaccaagatccaggagctgcagatgaccaccgtgctgaagcagaatgtgcacgtgtttggagtggagggcaacagtgatgagctggatgagcccatcaagacagtgtttgctgatgtggcctttgtgaagaagcacaacctgatgagcctgaacagcatcaactggagccgggtgctggtgcagatggcccaccacttctttgcctacttccagtgcacccccagcctggacacccaccccctgcccctggtggaggtggtggtgcccaccggggctgctggcaacctggccgccggctacatcgcccagaagattggcctgcccatccggctggtggtggccgtgaacagaaatgacatcatccacaggacagtgcagcagggcgacttcagcctgtctgaggccgtgaagagcaccctggccagcgccatggacatccaggtgccctacaacatggagagggtcttctggctgctgagcggcagtgacagccaggtgacccgggccctgatggagcagtttgagaggacccagagcgtgaacctgcccaaggagctgcacagcaagcacagccctgtgctgccccggccctgcctgtgcagccaggtgcccggcagctgccccggctgctggccagacccctag

SEQ ID NO: 7529 - DNA, 2889 bp, synthetic construct
  misc_feature 1..2889: note = source = /note="Description of Artificial Sequence: Synthetic coding sequence"
  source 1..2889: mol_type = other DNA
atgctgcggcggcctgccccagccctggccccagctgcccggctgctgctggccggcctgctgtgtggcggcggcgtgtgggccgcccgggtgaacaagcacaagccctggctggagcccacctaccatggaattgtgacagaaaatgacaacacagtgctgctggaccccccactcatcgccctggacaaggatgcccccctgcgctttgctgagagctttgaggtgacagtgaccaaggagggggagatctgtggcttcaagatccacggccagaatgtgccctttgatgctgtggtggtggacaagagcactggagagggcgtcatccgcagcaaggagaagctggactgtgagctgcagaaggactacagcttcaccatccaggcctatgactgtgggaaaggaccagatggcaccaacgtgaagaagagccacaaggccaccgtgcacatccaggtgaatgatgtgaatgaatatgcccctgtgttcaaggagaagagctacaaggccaccgtcatcgagggcaagcagtatgacagcatcctgcgggtggaggccgtggatgctgactgcagcccccagttcagccagatctgcagctatgagatcatcaccccagatgtgcccttcaccgtggacaaggatggctacatcaagaacacagagaagctgaactacggcaaggagcaccagtacaagctgactgtgacagcctatgactgtgggaagaagagggccacagaagatgtgctggtgaagatcagcatcaagcccacctgcaccccaggctggcagggctggaacaaccgcatcgagtatgagcccggcaccggggccctggccgtgttccccaacatccacctggagacctgtgatgagcctgtggcctctgtgcaggccaccgtggagctggagaccagccacatcggcaagggctgtgaccgggacacctacagcgagaagagcctgcaccggctgtgtggggctgctgctggaacagctgagctgctgcccagccccagcggcagcctgaactggaccatgggcctgcccacagacaatggacatgacagcgaccaggtgtttgagttcaacggcacccaggccgtgcgcatcccagatggagtggtgtctgtgagccccaaggagcccttcaccatctctgtgtggatgagacatggcccctttggaaggaagaaggagaccatcctgtgcagcagtgacaagacagacatgaacagacaccactacagcctgtatgtgcacggctgccgcctcatcttcctgttccggcaggaccccagcgaggagaagaagtacagacctgctgagttccactggaagctgaaccaggtgtgtgatgaggagtggcaccactacgtgctgaatgtggagttccccagcgtgaccctgtatgtggatggcaccagccatgagcccttctctgtgacagaggactaccccctgcaccccagcaagattgagacccagctggtggtgggcgcctgctggcagggcggggacctgcacatgacccagttcttccggggcaacctggccggcctgaccctgcggagcggcaagctggccgacaagaaggtgattgactgcctgtacacctgcaaggagggcctggacctgcaggtgctggaggacagcggccggggcgtgcagatccaggcccaccccagccagctggtgctgaccctggagggggaggacctgggggagctggacaaggccatgcagcacatctcctacctgaacagccggcagttccccaccccaggcatccggcggctgaagatcaccagcaccatcaagtgcttcaatgaggccacctgcatctctgtgccccctgtggatggctacgtgatggtgctgcagcctgaggagcccaagatcagcctgtctggagtgcaccactttgcccgggccgccagcgagtttgagagcagcgagggcgtcttcctgtttcctgagctgcgcatcatcagcaccatcacccgggaggtggagccagaaggagatggagctgaggaccccaccgtgcaggagagcctggtgtctgaggagatcgtgcatgacctggacacctgtgaggtgacagtggagggggaggagctgaaccacgagcaggagagcctggaggtggacatggcccggctgcagcagaagggcatcgaggtgagcagcagcgagctgggcatgaccttcaccggggtggacaccatggccagctatgaggaggtgctgcacctgctgcgctacagaaactggcacgcccggagcctgctggacaggaagttcaagctgatctgcagcgagctgaatggccgctacatcagcaatgagttcaaggtggaggtgaatgtcatccacacagccaaccccatggagcacgccaaccacatggccgcccagccccagtttgtgcaccctgagcacaggagctttgtggacctgagcggccacaacctggccaacccccacccctttgctgtggtgcccagcacagccaccgtggtgattgtggtgtgtgtgtccttcctggtgttcatgatcatcctgggcgtcttccgcatccgggccgcccacaggaggaccatgagggaccaggacaccgggaaggaaaatgagatggactgggatgattctgccctgaccatcaccgtgaaccccatggagacctatgaggaccagcacagcagcgaggaggaggaggaggaggaggaggaggaggagagtgaagatggagaggaggaggatgacatcaccagcgctgagagcgagagcagcgaggaggaggagggggagcagggcgacccccagaatgccacccggcagcagcagctggagtgggatgacagcaccctgagctactag

SEQ ID NO: 7530 - DNA, 2946 bp, synthetic construct
  misc_feature 1..2946: note = source = /note="Description of Artificial Sequence: Synthetic coding sequence"
  source 1..2946: mol_type = other DNA
atgctgcggcggcctgccccagccctggccccagctgcccggctgctgctggccggcctgctgtgtggcggcggcgtgtgggccgcccgggtgaacaagcacaagccctggctggagcccacctaccatggaattgtgacagaaaatgacaacacagtgctgctggaccccccactcatcgccctggacaaggatgcccccctgcgctttgctgagagctttgaggtgacagtgaccaaggagggggagatctgtggcttcaagatccacggccagaatgtgccctttgatgctgtggtggtggacaagagcactggagagggcgtcatccgcagcaaggagaagctggactgtgagctgcagaaggactacagcttcaccatccaggcctatgactgtgggaaaggaccagatggcaccaacgtgaagaagagccacaaggccaccgtgcacatccaggtgaatgatgtgaatgaatatgcccctgtgttcaaggagaagagctacaaggccaccgtcatcgagggcaagcagtatgacagcatcctgcgggtggaggccgtggatgctgactgcagcccccagttcagccagatctgcagctatgagatcatcaccccagatgtgcccttcaccgtggacaaggatggctacatcaagaacacagagaagctgaactacggcaaggagcaccagtacaagctgactgtgacagcctatgactgtgggaagaagagggccacagaagatgtgctggtgaagatcagcatcaagcccacctgcaccccaggctggcagggctggaacaaccgcatcgagtatgagcccggcaccggggccctggccgtgttccccaacatccacctggagacctgtgatgagcctgtggcctctgtgcaggccaccgtggagctggagaccagccacatcggcaagggctgtgaccgggacacctacagcgagaagagcctgcaccggctgtgtggggctgctgctggaacagctgagctgctgcccagccccagcggcagcctgaactggaccatgggcctgcccacagacaatggacatgacagcgaccaggtgtttgagttcaacggcacccaggccgtgcgcatcccagatggagtggtgtctgtgagccccaaggagcccttcaccatctctgtgtggatgagacatggcccctttggaaggaagaaggagaccatcctgtgcagcagtgacaagacagacatgaacagacaccactacagcctgtatgtgcacggctgccgcctcatcttcctgttccggcaggaccccagcgaggagaagaagtacagacctgctgagttccactggaagctgaaccaggtgtgtgatgaggagtggcaccactacgtgctgaatgtggagttccccagcgtgaccctgtatgtggatggcaccagccatgagcccttctctgtgacagaggactaccccctgcaccccagcaagattgagacccagctggtggtgggcgcctgctggcaggagttctctggagtggagaatgacaatgaaacagagcctgtgacagtggccagcgctggaggagacctgcacatgacccagttcttccggggcaacctggccggcctgaccctgcggagcggcaagctggccgacaagaaggtgattgactgcctgtacacctgcaaggagggcctggacctgcaggtgctggaggacagcggccggggcgtgcagatccaggcccaccccagccagctggtgctgaccctggagggggaggacctgggggagctggacaaggccatgcagcacatctcctacctgaacagccggcagttccccaccccaggcatccggcggctgaagatcaccagcaccatcaagtgcttcaatgaggccacctgcatctctgtgccccctgtggatggctacgtgatggtgctgcagcctgaggagcccaagatcagcctgagcggcgtgcaccactttgcccgggccgccagcgagtttgagagcagcgagggcgtcttcctgtttcctgagctgcgcatcatcagcaccatcacccgggaggtggagccagaaggagatggagctgaggaccccaccgtgcaggagagcctggtgtctgaggagatcgtgcatgacctggacacctgtgaggtgacagtggagggggaggagctgaaccacgagcaggagagcctggaggtggacatggcccggctgcagcagaagggcatcgaggtgagcagcagcgagctgggcatgaccttcaccggggtggacaccatggccagctatgaggaggtgctgcacctgctgcgctacagaaactggcacgcccggagcctgctggacaggaagttcaagctgatctgcagcgagctgaatggccgctacatcagcaatgagttcaaggtggaggtgaatgtcatccacacagccaaccccatggagcacgccaaccacatggccgcccagccccagtttgtgcaccctgagcacaggagctttgtggacctgagcggccacaacctggccaacccccacccctttgctgtggtgcccagcacagccaccgtggtgattgtggtgtgtgtgtccttcctggtgttcatgatcatcctgggcgtcttccgcatccgggccgcccacaggaggaccatgagggaccaggacaccgggaaggaaaatgagatggactgggatgacagcgccctgaccatcaccgtgaaccccatggagacctatgaggaccagcacagcagcgaggaggaggaggaggaggaggaggaggaggagagtgaagatggagaggaggaggatgacatcaccagcgctgagagcgagagcagcgaggaggaggagggggagcagggcgacccccagaatgccacccggcagcagcagctggagtgggatgacagcaccctgagctactag

SEQ ID NO: 7531 - DNA, 678 bp, synthetic construct
  misc_feature 1..678: note = source = /note="Description of Artificial Sequence: Synthetic coding sequence"
  source 1..678: mol_type = other DNA
atgagcggctgcagcaagcgctgcaagctgggctttgtgaagtttgcccagaccatcttcaagctgatcaccggcaccctgagcaaggacaagattgaagatgagctggagatgaccatggtgtgccacaggcctgagggcctggagcagctggaggcccagaccaacttcaccaagcgggagctgcaggtgctgtaccggggcttcaagaatgaatgtccttctggagtggtgaatgaagacaccttcaagcagatctatgcccagttcttcccccatggagatgccagcacctacgcccactacctgttcaatgcctttgacaccacccagacaggctctgtgaagtttgaggactttgtgacagccctgagcatcctgctgcggggcaccgtgcatgagaagctgcgctggaccttcaacctgtatgacatcaacaaggatggctacatcaacaaggaggagatgatggacatcgtgaaggccatctatgacatgatgggcaagtacacctaccctgtgctgaaggaggacaccccccggcagcacgtggatgtgttcttccagaagatggacaagaacaaggatggcatcgtgaccctggatgagttcctggagagctgccaggaggatgacaacatcatgaggagcctgcagctgttccagaatgtgatgtag

SEQ ID NO: 7532 - DNA, 420 bp, synthetic construct
  misc_feature 1..420: note = source = /note="Description of Artificial Sequence: Synthetic coding sequence"
  source 1..420: mol_type = other DNA
atgtacaagctggccagctgctgcctgctcttcatcggcttcctgaaccccctgctgagcctgcccctgctggacagccgggagatctccttccagctgagcgcccctcatgaagatgcccggctgaccccagaggagctggagcgggccagcctgctgcagatcctgcctgagatgctgggcgctgagcggggggacatcctgaggaaggctgacagcagcaccaacatcttcaacccccggggcaacctgaggaagttccaggacttcagcggccaggaccccaacatcctgctgagccacctgctggcccgcatctggaagccctacaagaagcagaggaggaagctgcggcaggacctgcggctgtggaagaaggagcccggcctgcgcatcttcaagaactacgtgtgggtgtag

SEQ ID NO: 7533 - DNA, 879 bp, synthetic construct
  misc_feature 1..879: note = source = /note="Description of Artificial Sequence: Synthetic coding sequence"
  source 1..879: mol_type = other DNA
atggaggtgacagctgtggccacccagggcggctacggcagcagtgactgggtgaccagctacctgctgatgttcagtgatggcggcaggaactggaagcagtaccgccgggaggagagcatctggggcttccctggcaacaccaatgctgacagcgtggtgcactaccgcctgcagcccccatttgaggcccgcttcctgcgcttcctgcccctggcctggaacccccggggccgcatcggcatgagaattgaggtgtatggctgtgcctacaagtctgaggtggtgtactttgatggccagagcgccctgctgtaccgcctggacaagaagcccctgaagcccatcagagatgtgatcagcctgaagttcaaggccatgcagagcaatggcatcctgctgcaccgggagggccagcacggcaaccacatcaccctggagctgatcaagggcaagctggtgttcttcctgaacagcggaaatgccaagctgcccagcaccatcgcccctgtgaccctgaccctgggcagcctgctggatgaccagcactggcacagcgtgctgattgagctgctggacacccaggtgaacttcaccgtggacaagcacacccaccacttccaggccaagggggacagcagctacctggacctgaactttgagatcagctttggaggcatccccaccccaggccgcagccgggccttccggaggaagagcttccacggctgcctggagaacctgtactacaatggagtggatgtgacagagctggccaagaagcacaagccccagatcctgatgatggagctggcccacggcctgcaggaccagaacctgaagatcagcctgactgtgtgccaccagaccacccagtag

SEQ ID NO: 7534 - DNA, 783 bp, synthetic construct
  misc_feature 1..783: note = source = /note="Description of Artificial Sequence: Synthetic coding sequence"
  source 1..783: mol_type = other DNA
atgaagaccagtgatggcttcaccctgaatgctgagagctatgtgtccttcaccaccaagctggacatccccacagctgccaagtatgaatatggagtgcccctgcagaccagtgacagcttcctgcgcttccccagcagcctgaccagcagcctgtgcacagacaacaacccagctgccttcctggtgaaccaggccgtgaagtgcaccaggaagatcaacctggagcagtgtgaggagattgaggccctgtccatggccttctacagcagccctgagatcctgcgggtgcctgacagcaggaagaaggtgcccatcaccgtgcagagcatcgtcatccagagcctgaacaagaccctgacccggcgggaggacacagatgtgctgcagcccaccctggtgaatgccggccacttcagcctgtgtgtgaatgtggtgctggaggtgaagtacagcctgacctacacagatgctggggaggtgaccaaggctgacctgagctttgtgctgggcaccgtgtcctctgtggtggtgcccctgcagcagaagtttgagatccacttcctgcagacagactggagcagccctgtgtctgcccggagcacagaaggagaggagcctgctgtgggccctggcctgccccggctgcggggccccttctggaagtttcctggccctggccatgctggcctgggcgcccaccccctgcaccaccctgtgatccagcaggagggcttcctgcctgccccccggggcttcggctacagaagtgaggtggactag

SEQ ID NO: 7535 - DNA, 3624 bp, synthetic construct
  misc_feature 1..3624: note = source = /note="Description of Artificial Sequence: Synthetic coding sequence"
  source 1..3624: mol_type = other DNA
atggcctctgtggcctgggccgtgctgaaggtgctgctgctgctgcccacccagacctggagccctgtgggcgccggcaaccccccagactgtgatgcccccctggccagcgccctgcccaggagcagcttcagcagcagcagcgagctgagcagcagccacggccctggcttcagccggctgaacagaagagatggagctgggggctggacccccctggtgagcaacaagtaccagtggctgcagattgacctgggggagaggatggaggtgacagctgtggccacccagggcggctacggcagcagtgactgggtgaccagctacctgctgatgttcagtgatggcggcaggaactggaagcagtaccgccgggaggagagcatctggggcttccctggcaacaccaatgctgacagcgtggtgcactaccgcctgcagcccccatttgaggcccgcttcctgcgcttcctgcccctggcctggaacccccggggccgcatcggcatgagaattgaggtgtatggctgtgcctacaagtctgaggtggtgtactttgatggccagagcgccctgctgtaccgcctggacaagaagcccctgaagcccatcagagatgtgatcagcctgaagttcaaggccatgcagagcaatggcatcctgctgcaccgggagggccagcacggcaaccacatcaccctggagctgatcaagggcaagctggtgttcttcctgaacagcggaaatgccaagctgcccagcaccatcgcccctgtgaccctgaccctgggcagcctgctggatgaccagcactggcacagcgtgctgattgagctgctggacacccaggtgaacttcaccgtggacaagcacacccaccacttccaggccaagggggacagcagctacctggacctgaactttgagatcagctttggaggcatccccaccccaggccgcagccgggccttccggaggaagagcttccacggctgcctggagaacctgtactacaatggagtggatgtgacagagctggccaagaagcacaagccccagatcctgatgatgggaaatgtgtccttcagctgcccccagccccagacagtgcctgtgaccttcctgagcagccgcagctacctggccctgcccggcaacagcggggaggacaaggtgtctgtgaccttccagttccgcacctggaacagagctggccacctgctgtttggagagctgcggcggggcagcggcagctttgtgctcttcctgaaggatggcaagctgaagctgagcctcttccagcccggccagagccccagaaatgtgacagctggggccggcctgaatgatggccagtggcacagcgtgtccttcagcgccaagtggagccacatgaatgtggtggtggatgatgacacagctgtgcagcccctggtggccgtgctgattgattctggggacacctactactttggaggctgcctggacaacagcagcggcagcggctgcaagagccccctgggcggcttccagggctgcctgcggctcatcaccatcggggacaaggctgtggaccccatcctggtgcagcagggcgccctgggcagcttccgggacctgcagattgacagctgtggcatcacagaccgctgcctgcccagctactgtgagcacggcggagaatgttcccagagctgggacaccttcagctgtgactgcctgggcaccggctacacaggagagacctgccacagcagcctgtatgagcagagctgtgaggcccacaagcaccggggcaaccccagcggcctgtactacattgatgctgatggcagcggccccctgggccccttcctggtgtactgcaacatgacagatgctgcctggacagtggtgcagcacggcggcccagatgctgtgaccctgcggggggcccccagcggccaccccaggtctgctgtgtcctttgcctatgctgctggggccggccagctgcggtctgctgtgaacctggccgagcgctgtgagcagaggctggccctgcgctgtggcacagcccggcggccagacagcagagatggcacccccctgtcctggtgggtgggccgcaccaatgagacccacacctcctggggcggcagcctgcctgatgcccagaagtgcacctgtggcctggagggcaactgcatcgacagccagtactactgcaactgtgatgctggaagaaatgagtggaccagtgacaccatcgtgctgagccagaaggagcacctgcctgtgacccagatcgtgatgacagatgctggccggccccacagcgaggccgcctacaccctgggccccctgctgtgccgcggggaccagagcttctggaacagcgccagcttcaacacagagaccagctacctgcacttccctgccttccatggagagctgacagcagatgtgtgcttcttcttcaagaccaccgtgagcagcggggtcttcatggagaacctgggcatcacagacttcatcagaattgagctgcgggcccccacagaggtgaccttctcctttgatgtgggcaatggcccctgtgaggtgacagtgcagagccccacccccttcaatgacaaccagtggcaccacgtgcgggcagagagaaatgtgaagggggccagcctgcaggtggaccagctgccccagaagatgcagcctgccccagcagatggccacgtgcggctgcagctgaacagccagctgttcatcgagatcagcgcctactttgccaccggcagctccatgacctaccacttccaggagcactacaccctgtctgagaacagcagcagcctggtgagcagcctgcacagagatgtgaccctgacccgggagatgatcaccctgtccttccgcaccaccaggacccccagcctgctgctgtatgtgtcctccttctatgaggagtacctgagcgtcatcctggccaacaacggcagcctgcagatccgctacaagctggacagacaccagaacccagatgccttcacctttgacttcaagaacatggctgatggccagctgcaccaggtgaagatcaaccgggaggaggccgtggtgatggtggaggtgaaccagagcaccaagaagcaggtgatcctgagcagcggcacagagttcaatgctgtgaagagcctcatcctgggcaaggtgctggaggccgccggggctgaccctgacacccggcgggccgccaccagcggcttcaccggctgcctgtctgctgtgcgcttcggccgggccgcccccctgaaggccgccctgcggcccagcggccccagccgggtgacagtgcggggccacgtggcccccatggcccgctgtgccgccggggccgccagcggcagccctgcccgggagctggccccccggctggccggcggggccggccgcagcggccctgcagatgaaggagagcccctggtgaatgctgaccggcgggacagcgctgtgattggaggagtgattgctgtggtgatcttcatcctgctgtgcatcacagccatcgccatccgcatctaccagcagaggaagctgaggaaagaaaatgaaagcaaggtgtccaagaaggaggagtgctag

SEQ ID NO: 7536 - DNA, 2238 bp, synthetic construct
  misc_feature 1..2238: note = source = /note="Description of Artificial Sequence: Synthetic coding sequence"
  source 1..2238: mol_type = other DNA
atggcctctgtggcctgggccgtgctgaaggtgctgctgctgctgcccacccagacctggagccctgtgggcgccggcaaccccccagactgtgatgcccccctggccagcgccctgcccaggagcagcttcagcagcagcagcgagctgagcagcagccacggccctggcttcagccggctgaacagaagagatggagctgggggctggacccccctggtgagcaacaagtaccagtggctgcagattgacctgggggagaggatggaggtgacagctgtggccacccagggcggctacggcagcagtgactgggtgaccagctacctgctgatgttcagtgatggcggcaggaactggaagcagtaccgccgggaggagagcatctggggcttccctggcaacaccaatgctgacagcgtggtgcactaccgcctgcagcccccatttgaggcccgcttcctgcgcttcctgcccctggcctggaacccccggggccgcatcggcatgagaattgaggtgtatggctgtgcctacaagtctgaggtggtgtactttgatggccagagcgccctgctgtaccgcctggacaagaagcccctgaagcccatcagagatgtgatcagcctgaagttcaaggccatgcagagcaatggcatcctgctgcaccgggagggccagcacggcaaccacatcaccctggagctgatcaagggcaagctggtgttcttcctgaacagcggaaatgccaagctgcccagcaccatcgcccctgtgaccctgaccctgggcagcctgctggatgaccagcactggcacagcgtgctgattgagctgctggacacccaggtgaacttcaccgtggacaagcacacccaccacttccaggccaagggggacagcagctacctggacctgaactttgagatcagctttggaggcatccccaccccaggccgcagccgggccttccggaggaagagcttccacggctgcctggagaacctgtactacaatggagtggatgtgacagagctggccaagaagcacaagccccagatcctgatgatgggaaatgtgtccttcagctgcccccagccccagacagtgcctgtgaccttcctgagcagccgcagctacctggccctgcccggcaacagcggggaggacaaggtgtctgtgaccttccagttccgcacctggaacagagctggccacctgctgtttggagagctgcggcggggcagcggcagctttgtgctcttcctgaaggatggcaagctgaagctgagcctcttccagcccggccagagccccagaaatgtgacagctggggccggcctgaatgatggccagtggcacagcgtgtccttcagcgccaagtggagccacatgaatgtggtggtggatgatgacacagctgtgcagcccctggtggccgtgctgattgattctggggacacctactactttggaggctgcctggacaacagcagcggcagcggctgcaagagccccctgggcggcttccagggctgcctgcggctcatcaccatcggggacaaggctgtggaccccatcctggtgcagcagggcgccctgggcagcttccgggacctgcagattgacagctgtggcatcacagaccgctgcctgcccagctactgtgagcacggcggagaatgttcccagagctgggacaccttcagctgtgactgcctgggcaccggctacacaggagagacctgccacagcagcctgtatgagcagagctgtgaggcccacaagcaccggggcaaccccagcggcctgtactacattgatgctgatggcagcggccccctgggccccttcctggtgtactgcaacatgacagatgctgcctggacagtggtgcagcacggcggcccagatgctgtgaccctgcggggggcccccagcggccaccccaggtctgctgtgtcctttgcctatgctgctggggccggccagctgcggtctgctgtgaacctggccgagcgctgtgagcagaggctggccctgcgctgtggcacagcccggcggccagacagcagagatggcacccccctgtcctggtgggtgggccgcaccaatgagacccacacctcctggggcggcagcctgcctgatgcccagaagtgcacctgtggcctggagggcaactgcatcgacagccagtactactgcaactgtgatgctggaagaaatgagtggtag

SEQ ID NO: 7537 - DNA, 549 bp, synthetic construct
  misc_feature 1..549: note = source = /note="Description of Artificial Sequence: Synthetic coding sequence"
  source 1..549: mol_type = other DNA
atggagccccagctgggccctgaggccgccgccctgcggcccggctggctggccctgctgctgtgggtgtctgccctgagctgcagcttcagcctgcctgccagcagcctgagcagcctggtgccccaggtgaggaccagctacaactttggccgcaccttcctgggcctggacaagtgcaatgcctgcatcggcaccagcatctgcaagaagttcttcaaggaggagatccgcagtgacaactggctggccagccacctgggcctgcccccagacagcctgctgagctacccagccaactacagtgatgacagcaagatctggaggcctgtggagatcttccggctggtgtccaagtaccagaatgagatcagtgaccggcgcatctgtgccagcgccagcgcccccaagacctgcagcattgagcgggtgctgaggaagacagagcgcttccagaagtggctgcaggccaagaggctgaccccagacctggtgcaggactgccaccagggccagcgggagctgaagttcctgtgcatgctgaggtag

SEQ ID NO: 7538 - DNA, 282 bp, synthetic construct
  misc_feature 1..282: note = source = /note="Description of Artificial Sequence: Synthetic coding sequence"
  source 1..282: mol_type = other DNA
atggacagcctgaggaagatgctgatctctgtggccatgctgggcgctggggccggcgtgggctacgccctgctggtgattgtgaccccaggagagaggaggaagcaggagatgctgaaggagatgcccctgcaggaccccaggagccgggaggaggccgcccggacccagcagctgctgctggccaccctgcaggaggccgccaccacccaggagaatgtggcctggaggaagaactggatggtgggcggggagggcggggccggcggccgcagcccctag

SEQ ID NO: 7539 - DNA, 387 bp, synthetic construct
  misc_feature 1..387: note = source = /note="Description of Artificial Sequence: Synthetic coding sequence"
  source 1..387: mol_type = other DNA
atgggcaagagcgccagcaagcagttccacaatgaggtgctgaaggcccacaatgagtaccggcagaagcacggcgtgccccccctgaagctgtgcaagaacctgaaccgggaggcccagcagtacagcgaggccctggccagcacccgcatcctgaagcacagccctgagagcagccggggccagtgtggggagaacctggcctgggccagctatgaccagacaggccacttcaccgccatggtgtggaagaacaccaagaagatgggcgtgggcaaggccagcgccagtgatggcagcagctttgtggtggcccgctacttccctgctggaaatgtggtgaatgaaggcttctttgaagaaaatgtgctgccccccaagaagtag

SEQ ID NO: 7540 - DNA, 465 bp, synthetic construct
  misc_feature 1..465: note = source = /note="Description of Artificial Sequence: Synthetic coding sequence"
  source 1..465: mol_type = other DNA
atgggcaagagcgccagcaagcagttccacaatgaggtgctgaaggcccacaatgagtaccggcagaagcacggcgtgccccccctgaagctgtgcaagaacctgaaccgggaggcccagcagtacagcgaggccctggccagcacccgcatcctgaagcacagccctgagagcagccggggccagtgtggggagaacctggcctgggccagctatgaccagacaggcaaggaggtggccgaccgctggtacagcgagatcaagaactacaacttccagcagcccggcttcaccagcggcaccggccacttcaccgccatggtgtggaagaacaccaagaagatgggcgtgggcaaggccagcgccagtgatggcagcagctttgtggtggcccgctacttccctgctggaaatgtggtgaatgaaggcttctttgaagaaaatgtgctgccccccaagaagtag

SEQ ID NO: 7541 - DNA, 831 bp, synthetic construct
  misc_feature 1..831: note = source = /note="Description of Artificial Sequence: Synthetic coding sequence"
  source 1..831: mol_type = other DNA
atggacagcagccgggagcccaccctgggccgcctggatgctgctggcttctggcaggtgtggcagagatttgatgctgatgagaagggctacatcgaggagaaggagctggatgccttcttcctgcacatgctgatgaagctgggcacagatgacacagtgatgaaggccaacctgcacaaggtgaagcagcagttcatgaccacccaggatgccagcaaggatggccgcatccgcatgaaggagctggccggcatgttcctgtctgaagatgagaacttcctgctgctcttcagaagagagaaccccctggacagctctgtggagttcatgcagatctggaggaaatatgatgctgacagcagcggcttcatctctgctgctgagctgaggaacttcctgcgggacctcttcctgcaccacaagaaggccatcagcgaggccaagctggaggagtacacaggcaccatgatgaagatctttgacaggaacaaggatggccgcctggacctgaatgacctggcccgcatcctggccctgcaggagaacttcctgctgcagttcaagatggatgcctgcagcacagaggagaggaagagggactttgagaagatctttgcctactatgatgtgtccaagacaggagccctggagggccctgaggtggatggctttgtgaaggacatgatggagctggtgcagcccagcatcagcggcgtggacctggacaagttccgggagatcctgctgcggcactgtgatgtgaacaaggatggcaagatccagaagtctgagctggccctgtgcctgggcctgaagatcaacccctag

SEQ ID NO: 7542 - DNA, 216 bp, synthetic construct
  misc_feature 1..216: note = source = /note="Description of Artificial Sequence: Synthetic coding sequence"
  source 1..216: mol_type = other DNA
atgcctgctggggtgcccatgagcacctacctgaagatgtttgctgccagcctgctggccatgtgtgccggggctgaggtggtgcaccgctactacagaccagacctgaccatccctgagatcccccccaagagaggagagctgaagacagagctgctgggcctgaaggagaggaagcacaagccccaggtgtcccagcaggaggagctgaagtag

SEQ ID NO: 7543 - DNA, 1287 bp, synthetic construct
  misc_feature 1..1287: note = source = /note="Description of Artificial Sequence: Synthetic coding sequence"
  source 1..1287: mol_type = other DNA
atgaagcccatgctgaaggacttcagcaacctgctgctggtggtgctgtgtgactatgtgctgggggaggccgagtacctgctgctgcgggagcccggccacgtggccctgagcaatgacacagtgtatgtggacttccagtactttgatggagccaacggcaccctgagaaatgtgtctgtgctgctgctggaggccaacaccaaccagacagtgaccaccaagtacctgctgaccaaccagagccagggcaccctgaagtttgagtgcttctacttcaaggaggccggggactactggttcaccatgaccccagaggccacagacaacagcacccccttcccctggtgggagaagagcgccttcctgaaggtggagtggcctgtgttccacgtggacctgaacagaagtgccaaggctgctgagggcaccttccaggtgggcctcttcaccagccagcccctgtgccccttccctgtggacaagcccaacatcgtggtggatgtgatcttcaccaacagcctgcctgaggcccggaggaacagccggcagcccctggagatccgcaccagcaagaggacagagctggcccagggccagtgggtggagtttggctgtgcccccctgggccctgaggcctacgtgacagtggtgctgaagctgctgggccgggacagcgtcatcaccagcacaggccccatcgacctggcccagaagtttggctacaagctggtgatggtgcctgagctgacctgtgagagcggcgtggaggtgacagtgctgcccccaccctgcacctttgtgcagggcgtggtgacagtgttcaaggaggccccccgctacccaggcaagaggaccatccacctggccgagaacagcctgcccctgggggagaggaggaccatcttcaactgcaccctgtttgacatgggcaagaacaagtactgctttgattttggcatcagcagccgcagccacttcagcgccaaggaggagtgcatgctgatccagaggaacacagagacctggggcctgtggcagccctggagccagtgcagcgccacctgtggagatggagtgcgggagcggcggcgggtgtgcctgaccagcttccccagcagccctgtgtgccccggcatgagcctggaggccagcctgtgcagcctggaggagtgtgccggccgcttccgcagctgctgccccggctggagcgccatggtgcgcagccggctgaccaacagcgccagccgggtgcaggccatcctgctgccccagcccctggcctag

SEQ ID NO: 7544 - DNA, 312 bp, synthetic construct
  misc_feature 1..312: note = source = /note="Description of Artificial Sequence: Synthetic coding sequence"
  source 1..312: mol_type = other DNA
atgaagctgtgtgtgacagtgctgagcctgctggtgctggtggccgccttctgcagcctggccctgagcgcccccatgggcagtgaccccccaacagcctgctgcttctcctacacagccaggaagctgcccaggaactttgtggtggactactatgagaccagcagcctgtgcagccagcctgctgtggtgtaccgggagagcgccagcagcgctgcccctggccgcatccccagcacccgggccgcccctcatggcccctggagcggccggggccgctgcctgccccaggcccgggacaaggccaggtag

SEQ ID NO: 7545 - DNA, 279 bp, synthetic construct
  misc_feature 1..279: note = source = /note="Description of Artificial Sequence: Synthetic coding sequence"
  source 1..279: mol_type = other DNA
atgaagctgtgtgtgacagtgctgagcctgctggtgctggtggccgccttctgcagcctggccctgagcgcccccatgggcagtgaccccccaacagcctgctgcttctcctacacagccaggaagctgcccaggaactttgtggtggactactatgagaccagcagcctgtgcagccagcctgctgtgccctgggacagcaacctgggcaagcaggtgtgtgccgaccccagcgagagctgggtgcaggagtatgtgtatgacctggagctgaactag

SEQ ID NO: 7546 - DNA, 282 bp, synthetic construct
  misc_feature 1..282: note = source = /note="Description of Artificial Sequence: Synthetic coding sequence"
  source 1..282: mol_type = other DNA
atgcaggtgtccacagctgccctggccgtgctgctgtgcaccatggccctgtgcaaccaggtgctgagcgcccccctggccgctgacacccccacagcctgctgcttctcctacaccagccggcagatcccccagaacttcatcgctgactactttgagaccagcagccagtgcagcaagcccagcgtcatcttcctgaccaagaggggccggcaggtgtgtgccgaccccagcgaggagtgggtgcagaagtatgtgtctgacctggagctgagcgcctag

SEQ ID NO: 7547 - DNA, 1869 bp, synthetic construct
  misc_feature 1..1869: note = source = /note="Description of Artificial Sequence: Synthetic coding sequence"
  source 1..1869: mol_type = other DNA
atgggcaagtctgagggccctgtgggcatggtggagagcgctggccgggccggccagaagaggcctggcttcctggagggcggcctgctgctgctgctgctgctggtgacagctgccctggtggccctgggcgtgctgtatgctgaccggcggggcaagcagctgccccggctggccagccggctgtgcttcctgcaggaggagaggacctttgtgaagaggaagccccggggcatccctgaggcccaggaggtgtctgaggtgtgcaccaccccaggctgtgtgattgctgctgcccgcatcctgcagaacatggaccccaccacagagccctgtgatgacttctaccagtttgcctgtggcggctggctgcggagacatgtgattcctgagaccaacagccgctacagcatctttgatgtgctgagagatgagctggaggtgatcctgaaggtggagctggagacccagctggccaaggccaccgtgccccaggaggagagacatgatgtgattgccctgtaccacaggatgggcctggaggagctgcagagccagtttggcctgaagggcttcaactggaccctcttcatccagacagtgctgagctctgtgaagatcaagctgctgcctgatgaggaggtggtggtgtatggcatcccctacctgcagaacctggagaacatcatcgacacctacagcgcccggaccatccagaactacctggtgtggaggctggtgctggacagaattggcagcctgagccagcgcttcaaggacaccagggtgaactacaggaaggccctgtttggcaccatggtggaggaggtgcgctggagagaatgtgtgggctacgtgaacagcaacatggagaatgctgtgggcagcctgtatgtgcgggaggccttccctggggacagcaagtccatggtgcgggagctgattgacaaggtgaggacagtgtttgtggagaccctggatgagctgggctggatggatgaggagagcaagaagaaggcccaggagaaggccatgagcatccgggagcagatcggccacccagactacatcctggaggagatgaacagaaggctggatgaggagtacagcaacctgaacttcagcgaggacctgtactttgagaacagcctgcagaacctgaaggtgggcgcccagaggagcctgaggaagctgcgggagaaggtggaccccaacctgtggatcattggagctgctgtggtgaatgccttctacagccccaacagaaaccagatcgtgtttcctgctggcatcctgcagccccccttcttcagcaaggagcagccccaggccctgaactttggaggcatcggcatggtgattggccacgagatcacccacggctttgatgacaatggaagaaactttgacaagaatggaaacatgatggactggtggagcaacttcagcacccagcacttccgggagcagagcgagtgcatgatctaccagtatggcaactacagctgggacctggctgatgagcagaatgtgaatggcttcaacaccctgggagaaaatattgctgacaatggaggagtgcggcaggcctacaaggcctacctgaagtggatggccgagggcggcaaggaccagcagctgcccggcctggacctgacccatgagcagctgttcttcatcaactatgcccaggtgtggtgtggcagctacagacctgagtttgccatccagagcatcaagacagatgtgcacagccccctgaagtacagagtgctgggcagcctgcagaacctggccgcctttgctgacaccttccactgtgcccggggcacccccatgcaccccaaggagcgctgccgggtgtggtag

SEQ ID NO: 7548 - DNA, 2340 bp, synthetic construct
  misc_feature 1..2340: note = source = /note="Description of Artificial Sequence: Synthetic coding sequence"
  source 1..2340: mol_type = other DNA
atgggcaagtctgagggccctgtgggcatggtggagagcgctggccgggccggccagaagaggcctggcttcctggagggcggcctgctgctgctgctgctgctggtgacagctgccctggtggccctgggcgtgctgtatgctgaccggcggggcaagcagctgccccggctggccagccggctgtgcttcctgcaggaggagaggacctttgtgaagaggaagccccggggcatccctgaggcccaggaggtgtctgaggtgtgcaccaccccaggctgtgtgattgctgctgcccgcatcctgcagaacatggaccccaccacagagccctgtgatgacttctaccagtttgcctgtggcggctggctgcggagacatgtgattcctgagaccaacagccgctacagcatctttgatgtgctgagagatgagctggaggtgatcctgaaggctgtgctggagaacagcacagccaaggacaggcctgctgtggagaaggcccggaccctgtaccgcagctgcatgaaccagagcgtgattgagaagaggggcagccagcccctgctggacatcctggaggtggtgggcggctggcctgtggccatggaccgctggaatgaaacagtgggcctggagtgggagctggagcggcagctggccctgatgaacagccagttcaacagaagagtgctgattgacctcttcatctggaatgatgaccagaacagcagccgccacatcatctacatcgaccagcccaccctgggcatgcccagccgggagtactacttcaacggcggcagcaacaggaaggtgcgggaggcctacctgcagttcatggtgtctgtggccaccctgctgcgggaggatgccaacctgccccgggacagctgcctggtgcaggaggacatggtgcaggtgctggagctggagacccagctggccaaggccaccgtgccccaggaggagagacatgatgtgattgccctgtaccacaggatgggcctggaggagctgcagagccagtttggcctgaagggcttcaactggaccctcttcatccagacagtgctgagctctgtgaagatcaagctgctgcctgatgaggaggtggtggtgtatggcatcccctacctgcagaacctggagaacatcatcgacacctacagcgcccggaccatccagaactacctggtgtggaggctggtgctggaccgcatcggcagcctgagccagcgcttcaaggacaccagggtgaactacaggaaggccctgtttggcaccatggtggaggaggtgcgctggagagaatgtgtgggctacgtgaacagcaacatggagaatgctgtgggcagcctgtatgtgcgggaggccttccctggggacagcaagtccatggtgcgggagctgattgacaaggtgaggacagtgtttgtggagaccctggatgagctgggctggatggatgaggagagcaagaagaaggcccaggagaaggccatgagcatccgggagcagatcggccacccagactacatcctggaggagatgaacagaaggctggatgaggagtacagcaacctgaacttctctgaagatctctactttgagaacagcctgcagaacctgaaggtgggcgcccagaggagcctgaggaagctgcgggagaaggtggaccccaacctgtggatcatcggggctgctgtggtgaatgccttctacagccccaacagaaaccagatcgtgtttcctgctggcatcctgcagccccccttcttcagcaaggagcagccccaggccctgaactttggaggcatcggcatggtgattggacatgagatcacccacggctttgatgacaatggaagaaactttgacaagaatggaaacatgatggactggtggagcaacttcagcacccagcacttccgggagcagagcgagtgcatgatctaccagtatggcaactacagctgggacctggctgatgagcagaatgtgaatggcttcaacaccctgggggagaacattgctgacaatggaggagtgcggcaggcctacaaggcctacctgaagtggatggccgagggcggcaaggaccagcagctgcccggcctggacctgacccatgagcagctgttcttcatcaactatgcccaggtgtggtgtggcagctacagacctgagtttgccatccagagcatcaagacagatgtgcacagccccctgaagtacagagtgctgggcagcctgcagaacctggccgcctttgctgacaccttccactgtgcccggggcacccccatgcaccccaaggagcgctgccgggtgtggtag

SEQ ID NO: 7549 - DNA, 258 bp, synthetic construct
  misc_feature 1..258: note = source = /note="Description of Artificial Sequence: Synthetic coding sequence"
  source 1..258: mol_type = other DNA
atgtctgtgcacatgcctgccatgaagatctgtgagaagctgaagaagctggacagccagatctgtgagctgaagtatgagaagaccctggacctggcctctgtggacctgaggaagatgagggtggccgagctgaagcagatcctgcacagctggggcgaggagtgccgggcctgtgccgagaagacagattatgtgaacctgatccaggagctggcccccaagtatgctgccacccaccccaagacagagctgtag

SEQ ID NO: 7550 - DNA, 657 bp, synthetic construct
  misc_feature 1..657: note = source = /note="Description of Artificial Sequence: Synthetic coding sequence"
  source 1..657: mol_type = other DNA
atgggccgggtcttcctgactggagagaaggccaacagcatcctgaagcgctacccccgggccaacggcttctttgaggagatccggcagggcaacatcgagcgggagtgcaaggaggagttctgcacctttgaggaggcccgggaggcctttgagaacaatgagaagaccaaggagttctggagcacctacaccaaggcccagcagggcgagagcaacagaggaagtgactggttccagttctacctgaccttccccctcatcttcggcctcttcatcatcctgctggtgatcttcctgatctggcgctgcttcctgaggaacaagacccggcggcagacagtgacagagggccacatccccttcccccagcacctgaacatcatcaccccacctcctcctccagatgaggtgtttgacagcagcggcctgagccctggcttcctgggctacgtggtgggccgcagtgacagcgtgtccacccggctgagcaactgtgaccccccacccacctatgaggaggccaccggccaggtgaacctgcagaggagtgaaacagagccccacctggaccccccaccagaatatgaagatattgtgaacagcaacagcgccagcgccatccccatggtgcctgtggtgaccaccatcaagtag

SEQ ID NO: 7551 - DNA, 1365 bp, synthetic construct; identical to SEQ ID NO: 7033
  misc_feature 1..1365: note = source = /note="Description of Artificial Sequence: Synthetic coding sequence"
  source 1..1365: mol_type = other DNA

SEQ ID NO: 7552 - DNA, 417 bp, synthetic construct
  misc_feature 1..417: note = source = /note="Description of Artificial Sequence: Synthetic coding sequence"
  source 1..417: mol_type = other DNA
atgacctggaggcaggccgtgctgctgagctgcttctctgctgtggtgctgctgtccatgctgcgggagggcacctctgtgtctgtgggcaccatgcagatggccggggaggaggcctctgaagatgccaagcagaagatcttcatgcaggagagtgatgccagcaacttcctgaagaggcggggcaagaggagccccaagagcagagatgaggtgaatgtggagaaccggcagaagctgcgggtggatgagctgcggcgggagtactatgaggagcagagaaatgaatttgagaactttgtggaggagcagaatgatgagcaggaggagaggagccgggaggccgtggagcagtggaggcagtggcactatgatggcctgcaccccagctacctgtacaacagacaccacacctag

SEQ ID NO: 7553 - DNA, 729 bp, synthetic construct
  misc_feature 1..729: note = source = /note="Description of Artificial Sequence: Synthetic coding sequence"
  source 1..729: mol_type = other DNA
atggccctgaagaacaagttcagctgcctgtggatcctgggcctgtgcctggtggccaccaccagcagcaagatccccagcatcacagacccccacttcatcgacaactgcatcgaggcccacaatgagtggaggggcaaggtgaaccccccagctgctgacatgaagtacatgatctgggacaagggcctggccaagatggccaaggcctgggccaaccagtgcaagtttgagcacaatgactgcctggacaagagctacaagtgctatgctgcctttgaatatgtgggggagaacatctggctgggcggcatcaagagcttcacccccaggcatgccatcacagcctggtacaatgagacccagttctatgactttgacagcctgagctgcagccgggtgtgtggccactacacccagctggtgtgggccaacagcttctacgtgggctgtgctgtggccatgtgccccaacctgggcggggccagcacagccatctttgtgtgcaactacggccctgctggcaactttgccaacatgccaccctacgtgcggggggagagctgcagcctgtgcagcaaggaggagaagtgtgtgaagaacctgtgcaggaccccccagctgatcatccccaaccagaaccccttcctgaagcccaccggccgggccccccagcagacagccttcaaccccttcagcctgggcttcctgctgctgcgcatcttctag

SEQ ID NO: 7554 - DNA, 813 bp, synthetic construct
  misc_feature 1..813: note = source = /note="Description of Artificial Sequence: Synthetic coding sequence"
  source 1..813: mol_type = other DNA
atgctgcggcagctgctgctggccgccctgtgcctggccggccccccagccccagcccgggcctgccagctgcccagcgagtggaggcccctgtctgagggctgcagagctgagctggccgagaccatcgtgtatgcccgggtgctggccctgcaccctgaggcccctggcctgtacaaccacctgccctggcagtaccacgccggccagggcggcctcttctacagcgctgaggtggagatgctgtgtgaccaggcctggggctccatgctggaggtgcctgctggcagccggctgaacctgaccggcctgggctacttcagctgccacagccacacagtggtgcaggactacagctacttcttcttcctgaggatggatgagaactacaacctgctgccccatggagtgaacttccaggatgccatcttcccagacacccaggagaacagaaggatgttcagcagcctcttccagttcagcaactgcagccagggccagcagctggccaccttcagcagtgactgggagatccaggaggacagccggctgatgtgcagctctgtgcagaaggccctgtttgaggaggaggaccacgtgaagaagctgcagcagaaggtggccaccctggagaagaggaaccggcagctgcgggagcgggtgaagaaggtgaagaggagcctgcggcaggccaggaagaagggccgccacctggagctggccaaccagaagctgtctgagaagctggccgccggggccctgccccacatcaatgcccggggccctgtgcggcccccctacctgcggggctag

SEQ ID NO: 7555 - DNA, 438 bp, synthetic construct
  misc_feature 1..438: note = source = /note="Description of Artificial Sequence: Synthetic coding sequence"
  source 1..438: mol_type = other DNA
atggatgagaactacaacctgctgccccacggcgtgaacttccaggatgccatcttcccagacacccaggagaacagaaggatgttcagcagcctcttccagttcagcaactgcagccagggccagcagctggccaccttcagcagtgactgggagatccaggaggacagccggctgatgtgcagctctgtgcagaaggccctgtttgaggaggaggaccacgtgaagaagctgcagcagaaggtggccaccctggagaagaggaaccggcagctgcgggagcgggtgaagaaggtgaagaggagcctgcggcaggccaggaagaagggccgccacctggagctggccaaccagaagctgtctgagaagctggccgccggggccctgccccacatcaatgcccggggccctgtgcggcccccctacctgcggggctag

SEQ ID NO: 7556 - DNA, 1830 bp, synthetic construct
  misc_feature 1..1830: note = source = /note="Description of Artificial Sequence: Synthetic coding sequence"
  source 1..1830: mol_type = other DNA
atggagctgggctgctggacccagctgggcctgaccttcctgcagctgctgctgatcagcagcctgccccgggagtacaccgtcatcaatgaggcctgccctggagctgagtggaacatcatgtgccgggagtgctgtgaatatgaccagattgaatgtgtgtgccctgggaagcgggaggtggtgggctacaccatcccctgctgcagaaatgaagaaaatgaatgtgacagctgcctgatccaccctggctgcaccatctttgagaactgcaagagctgcagaaatggctcctggggcggcaccctggatgacttctacgtgaagggcttctactgtgctgaatgtcgggccggctggtatggaggagactgcatgccctgcagcagcagcccctgcttccatgatggcacctgtgtgctggacaaggccggcagctacaagtgtgcctgcctggccggctacacaggccagagatgtgagaacctgctggaggagaggaactgcagcgaccccggcggccctgtgaatggctaccagaagatcactggaggccctggcctcatcaatggaagacatgccaagattggcaccgtggtgtccttcttctgcaacaacagctatgtgctgtctggaaatgagaagaggacctgccagcagaatggagagtggagcggcaagcagcccatctgcatcaaggcctgccgggagcccaagatcagtgacctggtgagaagaagagtgctgcccatgcaggtgcagagccgggagacccccctgcaccagctgtacagcgctgccttcagcaagcagaagctgcagagcgcccccaccaagaagccagccctgccctttggagacctgcccatgggctaccagcacctgcacacccagctgcagtatgagtgcatcagccccttctacagaaggctgggcagcagcaggaggacctgcctgaggacaggcaagtggagcggccgggcccccagctgcatccccatctgtgggaagattgagaacatcacagcccccaagacccagggcctgcgctggccctggcaggccgccatctacagaaggaccagcggcgtgcatgatggcagcctgcacaagggggcctggttcctggtgtgcagcggggccctggtgaatgaaagaacagtggtggtggccgcccactgtgtgacagacctgggcaaggtgaccatgatcaagacagctgacctgaaggtggtgctgggcaagttctacagagatgatgacagagatgagaagaccatccagagcctgcagatcagcgccatcatcctgcaccccaactatgaccccatcctgctggatgctgacatcgccatcctgaagctgctggacaaggcccgcatcagcaccagggtgcagcccatctgcctggccgccagccgggacctgagcaccagcttccaggagagccacatcaccgtggccggctggaatgtgctggctgatgtgcgcagccctggcttcaagaatgacaccctgcggtctggagtggtgtctgtggtggacagcctgctgtgtgaggagcagcacgaggaccacggcatccctgtgtctgtgacagacaacatgttctgtgcctcctgggagcccacagcccccagcgacatctgcacagctgagaccggcggcattgctgctgtgtccttccctggccgggccagccctgagccccgctggcacctgatgggcctggtgtcctggagctatgacaagacctgcagccaccggctgagcacagccttcaccaaggtgctgcccttcaaggactggattgaaagaaacatgaagtag

SEQ ID NO: 7557 - DNA, 2163 bp, synthetic construct
  misc_feature 1..2163: note = source = /note="Description of Artificial Sequence: Synthetic coding sequence"
  source 1..2163: mol_type = other DNA
atggagctgggctgctggacccagctgggcctgaccttcctgcagctgctgctgatcagcagcctgccccgggagtacaccgtcatcaatgaggcctgccctggagctgagtggaacatcatgtgccgggagtgctgtgaatatgaccagattgaatgtgtgtgccctgggaagcgggaggtggtgggctacaccatcccctgctgcagaaatgaagaaaatgaatgtgacagctgcctgatccaccctggctgcaccatctttgagaactgcaagagctgcagaaatggctcctggggcggcaccctggatgacttctacgtgaagggcttctactgtgctgaatgtcgggccggctggtatggaggagactgcatgagatgtggccaggtgctgcgggcccccaagggccagatcctgctggagagctaccccctgaatgcccactgtgagtggaccatccacgccaagccaggcttcgtcatccagctgcgctttgtgatgctgagcctggagtttgactacatgtgccagtatgactatgtggaggtgagagatggagacaacagagatggccagatcatcaagagggtgtgtggaaatgaaagacctgcccccatccagagcatcggcagcagcctgcacgtgctcttccacagtgatggcagcaagaactttgatggcttccacgccatctatgaggagatcacagcctgcagcagcagcccctgcttccatgatggcacctgtgtgctggacaaggccggcagctacaagtgtgcctgcctggccggctacacaggccagagatgtgagaacctgctggaggagaggaactgcagcgaccccggcggccctgtgaatggctaccagaagatcaccggcggccctggcctcatcaatggaagacatgccaagattggaacagtggtgtccttcttctgcaacaacagctatgtgctgtctggaaatgagaagaggacctgccagcagaatggagagtggagcggcaagcagcccatctgcatcaaggcctgccgggagcccaagatcagtgacctggtgagaagaagagtgctgcccatgcaggtgcagagccgggagacccccctgcaccagctgtacagcgctgccttcagcaagcagaagctgcagagcgcccccaccaagaagccagccctgccctttggagacctgcccatgggctaccagcacctgcacacccagctgcagtatgagtgcatcagccccttctaccgccgcctgggcagcagcaggaggacctgcctgaggacaggcaagtggagcggccgggcccccagctgcatccccatctgtgggaagattgagaacatcacagcccccaagacccagggcctgcgctggccctggcaggccgccatctacagaaggaccagcggcgtgcatgatggcagcctgcacaagggggcctggttcctggtgtgcagcggggccctggtgaatgaaagaacagtggtggtggccgcccactgtgtgacagacctgggcaaggtgaccatgatcaagacagctgacctgaaggtggtgctgggcaagttctacagagatgatgacagagatgagaagaccatccagagcctgcagatcagcgccatcatcctgcaccccaactatgaccccatcctgctggatgctgacatcgccatcctgaagctgctggacaaggcccgcatcagcaccagggtgcagcccatctgcctggccgccagccgggacctgagcaccagcttccaggagagccacatcaccgtggccggctggaatgtgctggctgatgtgcgcagccctggcttcaagaatgacaccctgcggtctggagtggtgtctgtggtggacagcctgctgtgtgaggagcagcatgaagatcatggcatccctgtgtctgtgacagacaacatgttctgtgcctcctgggagcccacagcccccagcgacatctgcacagctgagactggaggcattgctgctgtgtccttccctggccgggccagccctgagccccgctggcacctgatgggcctggtgtcctggagctatgacaagacctgcagccaccggctgagcacagccttcaccaaggtgctgcccttcaaggactggattgaaagaaacatgaagtag

SEQ ID NO: 7558 - DNA, 1134 bp, synthetic construct
  misc_feature 1..1134: note = source = /note="Description of Artificial Sequence: Synthetic coding sequence"
  source 1..1134: mol_type = other DNA
atggaggccctgctgctgggcgccggcctgctgctgggcgcctacgtgctggtgtactacaacctggtgaaggccccaccctgtggcggcatgggcaacctgcggggccgcacagctgtggtgactggagccaacagcggcatcggcaagatgacagccctggagctggcccggcggggggcccgggtggtgctggcctgccgcagccaggagcggggggaggccgccgcctttgacctgcggcaggagagcggcaacaatgaagtcatcttcatggccctggacctggccagcctggcctctgtgcgggcctttgccacagccttcctgagcagcgagccccggctggacatcctgatccacaatgccggcatcagcagctgtggccgcacccgggaggccttcaacctgctgctgcgggtgaaccacatcggccccttcctgctgacccacctgctgctgccctgcctgaaggcctgtgcccccagccgggtggtggtggtggccagcgctgcccactgccggggccgcctggacttcaagaggctggacaggcctgtggtgggctggaggcaggagctgcgggcctatgctgacaccaagctggccaacgtgctgtttgcccgggagctggccaaccagctggaggccaccggggtgacctgctacgccgcccaccctggccctgtgaacagcgagctgttcctgcggcacgtgcccggctggctgcggcccctgctgcggcccctggcctggctggtgctgcgggccccccggggcggggcccagacccccctgtactgtgccctgcaggagggcatcgagcccctgagcggccgctactttgccaactgccacgtggaggaggtgcccccagctgccagagatgacagagctgcccaccggctgtgggaggccagcaagaggctggccggcctgggccctggagaagatgctgagccagatgaggacccccagagcgaggacagcgaggcccccagcagcctgagcaccccccaccctgaggagcccaccgtgtcccagccctaccccagcccccagagcagcccagacctgagcaagatgacccaccgcatccaggccaaggtggagcctgagatccagctgtcctag

SEQ ID NO: 7559 - DNA, 381 bp, synthetic construct
  misc_feature 1..381: note = source = /note="Description of Artificial Sequence: Synthetic coding sequence"
  source 1..381: mol_type = other DNA
atgatctccttccacgtgatcttcctgagcctgggccggggcaagctgttcctgcctgtgaacttctgcttcctgaagctgaagaacagccaggtgcgcatccccaaggacttcacctgcaacctgcacgtgctcttcagaacagtgcagggcgaggacaggaacaccatgttccggggccactggagcatctacagcaggaacttccccctggccgtggtgcctgcctacgtgacagaagatggcaagaacaccagccaccgggccagcggccagttctgcaatgccctgagccagggcgagatccccagcagcctgcagctggtgaacagctatgccctggagcccaggacagacatgccctgcaacttcctgacctag

SEQ ID NO: 7560 - DNA, 876 bp, synthetic construct
  misc_feature 1..876: note = source = /note="Description of Artificial Sequence: Synthetic coding sequence"
  source 1..876: mol_type = other DNA
atggctgtgaccctgagcctgctgctgggcggccgggtgtgtgccgctgtgacccgctgtggctttgccacccggggcgtggccggccctggccccatcggccgggagccagaccctgacagcgactgggagcctgaggagcgggagctgcaggaggtggagagcaccctgaagaggcagaagcaggccatccgcttccagaagatccggcggcagatggaggcccctggggccccacccaggaccctgacctgggaggccatggagcagatccgctacctgcacgaggagttccctgagagctggagcgtgccccggctggccgagggctttgatgtgtccacagatgtgatcagaagagtgctgaagagcaagttcctgcccaccctggagcagaagctgaagcaggaccagaaggtgctgaagaaggccggcctggcccacagcctgcagcacctgcggggcagcggcaacaccagcaagctgctgcctgctggccacagcgtgtctggcagcctgctgatgcctggccacgaggccagcagcaaggaccccaaccacagcacagccctgaaggtgattgaaagtgacacccacaggaccaacaccccaagaagaaggaagggcaggaacaaggagatccaggacctggaggagagctttgtgcctgtggccgcccccctgggccacccccgggagctgcagaagtacagcagtgacagcgagagcccccggggcactggaagtggggccctgcccagcggccagaagctggaggagctgaaggccgaggagccagacaacttcagcagcaaggtggtgcagaggggccgggagttctttgacagcaatggaaacttcctgtaccgcatctag

SEQ ID NO: 7561 - DNA, 2541 bp, synthetic construct
  misc_feature 1..2541: note = source = /note="Description of Artificial Sequence: Synthetic coding sequence"
  source 1..2541: mol_type = other DNA
atgttcaagtgctggagcgtggtgctggtgctgggcttcatcttcctggagagcgagggccggcccaccaaggagggcggctacggcctgaagagctaccagcccctgatgaggctgcggcacaaggagaagaaccaggagagcagccgggtgaagggcttcatgatccaggacggccccttcggcagctgtgagaacaagtactgcggcctgggccgccactgtgtgaccagccgggagaccggccaggctgaatgtgcctgcatggacctgtgcaagaggcactacaagcctgtgtgtggcagtgatggagagttctatgagaaccactgtgaggtgcaccgggccgcctgcctgaagaagcagaagatcaccatcgtgcacaatgaagactgcttcttcaagggggacaagtgcaagaccacagagtacagcaagatgaagaacatgctgctggacctgcagaaccagaagtacatcatgcaggagaatgaaaaccccaatggagatgacatcagcaggaagaagctgctggtggaccagatgttcaagtactttgatgctgacagcaatggcctggtggacatcaatgagctgacccaggtgatcaagcaggaggagctgggcaaggacctgtttgactgcaccctgtatgtgctgctgaagtatgatgacttcaatgctgacaagcacctggccctggaggagttctaccgggccttccaggtgatccagctgagcctgcctgaggaccagaagctgagcatcacagctgccaccgtgggccagagcgctgtgctgagctgtgccatccagggcaccctgcggccccccatcatctggaagaggaacaacatcatcctgaacaacctggacctggaggacatcaatgactttggagatgatggcagcctgtacatcaccaaggtgaccaccacccacgtgggcaactacacctgctacgcagatggctatgagcaggtgtaccagacccacatcttccaggtgaatgtgccccctgtgatccgggtgtacccagagagccaggcccgggagcccggggtgacagccagcctgcgctgccacgccgagggcatccccaagccccagctgggctggctgaagaatggcatcgacatcacccccaagctgagcaagcagctgaccctgcaggccaatggaagtgaggtgcacatcagcaatgtgcgctatgaagatactggagcctacacctgcatcgccaagaatgaggccggcgtggatgaggacatcagcagcctgtttgtggaggacagcgccaggaagaccctggccaacatcctgtggagggaggagggcctgggcatcggcaacatgttctacgtgttctatgaagatggcatcaaggtgatccagcccattgaatgtgagttccagaggcacatcaagcccagcgagaagctgctgggcttccaggatgaggtgtgccccaaggccgagggagatgaggtgcagagatgtgtgtgggccagcgctgtgaatgtgaaggacaagttcatctacgtggcccagcccaccctggacagagtgctgattgtggatgtgcagagccagaaggtggtgcaggccgtgtccacagatcctgtgcctgtgaagctgcactatgacaagagccatgaccaggtgtgggtgctgtcctggggcaccctggagaagaccagccccaccctgcaggtgatcaccctggccagcggaaatgtgccccaccacaccatccacacccagcctgtgggcaagcagtttgacagagtggatgacttcttcatccccaccaccaccctcatcatcacccacatgagatttggcttcatcctgcacaaggatgaagctgccctgcagaagattgacctggagaccatgagctacatcaagaccatcaacctgaaggactacaagtgtgtgccccagagcctggcctacacccacctgggcggctactacttcatcggctgcaagccagacagcactggagctgtgagcccccaggtgatggtggatggagtgacagacagcgtcatcggcttcaacagtgatgtgacaggcaccccctacgtgtccccagatggccactacctggtgtccatcaatgatgtgaagggcctggtgcgggtgcagtacatcaccatccggggggagatccaggaggcctttgacatctacaccaacctgcacatcagtgacctggccttccagcccagcttcacagaggcccaccagtacaacatctacggcagcagcagcacccagacagatgtgctgtttgtggagctgagcagcggcaaggtgaagatgatcaagagcctgaaggagcccctgaaggccgaggagtggccctggaacaggaagaaccggcagatccaggacagcggcctgtttggccagtacctgatgacccccagcaaggacagcctcttcatcctggatggccgcctgaacaagctgaactgtgagatcacagaggtggagaagggcaacacagtcatctgggtgggagatgcctag

SEQ ID NO: 7562 - DNA, 291 bp, synthetic construct
  misc_feature 1..291: note = source = /note="Description of Artificial Sequence: Synthetic coding sequence"
  source 1..291: mol_type = other DNA
atgagggtgaccagcgccacctgtgccctgctgctggccctgatctgcagcgtgcagctgggagatgcctgcctggacatcgacaagctgctggccaacgtggtgtttgatgtgtcccaggacctgctgaaggaggagctggcccgctacaaccccagccccctgacagaggagagcttcctgaatgtgcagcagtgctttgccaacgtgtctgtgacagaaagatttgcccacagcgtggtgatcaagaagatcctgcagagcaatgactgcatcgaggccgccttctag

SEQ ID NO: 7563 - DNA, 1971 bp, synthetic construct
  misc_feature 1..1971: note = source = /note="Description of Artificial Sequence: Synthetic coding sequence"
  source 1..1971: mol_type = other DNA
atgaggacagtggtgctgaccatgaaggcctctgtgattgagatgttcctggtgctgctggtgactggagtgcacagcaacaaggagacagccaagaagatcaagaggcccaagttcaccgtgccccagatcaactgtgatgtgaaggccggcaagatcatcgaccctgagttcatcgtgaagtgcccagctggctgccaggaccccaagtaccacgtgtatggaacagatgtgtatgccagctacagctctgtgtgtggggctgctgtgcacagcggcgtgctggacaacagcggcggcaagatcctggtgaggaaggtggccggccagagcggctacaagggcagctacagcaatggagtgcagagcctgagcctgccccgctggagggagagcttcatcgtgctggagagcaagcccaagaagggcgtgacctaccccagcgccctgacctacagcagcagcaagagccctgctgcccaggccggggagaccaccaaggcctaccagaggcctcccatccctggcaccacagcccagcctgtgaccctgatgcagctgctggccgtgacagtggccgtggccacccccaccaccctgccccggcccagccccagcgctgccagcaccaccagcatcccccggccccagagcgtgggccacaggagccaggagatggacctgtggagcacagccacctacaccagcagccagaaccggcccagggctgaccccggcctggtgcccaaggaggagctgagcacccagagcctggagcctgtgtccctgggggaccccaactgcaagattgacctgtccttcctgattgatggcagcaccagcatcggcaagaggcgcttccgcatccagaagcagctgctggctgatgtggcccaggccctggacatcggccctgctggccccctgatgggcgtggtgcagtatggagacaacccagccacccacttcaacctgaagacccacaccaacagccgggacctgaagacagccatcgagaagatcacccagagaggaggcctgagcaatgtgggccgggccatcagctttgtgaccaagaacttcttcagcaaggccaacggcaacagaagtggggcccccaacgtggtggtggtgatggtggatggctggcccacagacaaggtggaggaggccagccggctggcccgggagagcggcatcaacatcttcttcatcaccattgaaggagctgctgaaaatgagaagcagtatgtggtggagcccaactttgccaacaaggctgtgtgcaggaccaacggcttctacagcctgcacgtgcagagctggtttggcctgcacaagaccctgcagcccctggtgaagagggtgtgtgacacagaccggctggcctgcagcaagacctgcctgaacagcgctgacatcggctttgtgattgatggcagcagctctgtgggcaccggcaacttcagaacagtgctgcagtttgtgaccaacctgaccaaggagtttgagatcagtgacacagacacccgcatcggggctgtgcagtacacctatgagcagaggctggagtttggatttgacaagtacagcagcaagccagacatcctgaatgccatcaagagggtgggctactggagcggcggcaccagcactggagctgccatcaactttgccctggagcagctgttcaagaagagcaagcccaacaagaggaagctgatgatcctgatcacagatggccgctcctatgatgatgtgcgcatcccagccatggccgcccacctgaagggcgtcatcacctacgccatcggcgtggcctgggccgcccaggaggagctggaggtgattgccacccacccagcccgggaccacagcttctttgtggatgaatttgacaacctgcaccagtatgtgccccgcatcatccagaacatctgcacagagttcaacagccagcccagaaattag

SEQ ID NO: 7564 - DNA, 2082 bp, synthetic construct
  misc_feature 1..2082: note = source = /note="Description of Artificial Sequence: Synthetic coding sequence"
  source 1..2082: mol_type = other DNA
atgaggacagtggtgctgaccatgaaggcctctgtgattgagatgttcctggtgctgctggtgactggagtgcacagcaacaaggagacagccaagaagatcaagaggcccaagttcaccgtgccccagatcaactgtgatgtgaaggccggcaagatcatcgaccctgagttcatcgtgaagtgcccagctggctgccaggaccccaagtaccacgtgtatggaacagatgtgtatgccagctacagctctgtgtgtggggctgctgtgcacagcggcgtgctggacaacagcggcggcaagatcctggtgaggaaggtggccggccagagcggctacaagggcagctacagcaatggagtgcagagcctgagcctgccccgctggagggagagcttcatcgtgctggagagcaagcccaagaagggcgtgacctaccccagcgccctgacctacagcagcagcaagagccctgctgcccaggccggggagaccaccaaggcctaccagaggcctcccatccctggcaccacagcccagcctgtgaccctgatgcagctgctggccgtgacagtggccgtggccacccccaccaccctgccccggcccagccccagcgctgccagcaccaccagcatcccccggccccagagcgtgggccacaggagccaggagatggacctgtggagcacagccacctacaccagcagccagaaccggcccagggctgaccccggcatccagaggcaggaccccagcggggccgccttccagaagcctgtgggcgcagatgtgtccctgggggagatggacagctggaagccaggctctgtgctgctggatgagggcctggtgcccaaggaggagctgagcacccagagcctggagcctgtgtccctgggggaccccaactgcaagattgacctgtccttcctgattgatggcagcaccagcatcggcaagaggcgcttccgcatccagaagcagctgctggctgatgtggcccaggccctggacatcggccctgctggccccctgatgggcgtggtgcagtacggggacaacccagccacccacttcaacctgaagacccacaccaacagccgggacctgaagacagccatcgagaagatcacccagaggggcggcctgagcaatgtgggccgggccatcagctttgtgaccaagaacttcttcagcaaggccaatggaaacagaagtggggccccaaatgtggtggtggtgatggtggatggctggcccacagacaaggtggaggaggccagccggctggcccgggagagcggcatcaacatcttcttcatcaccatcgagggcgctgctgaaaatgagaagcagtatgtggtggagcccaactttgccaacaaggctgtgtgcaggaccaacggcttctacagcctgcacgtgcagagctggtttggcctgcacaagaccctgcagcccctggtgaagagggtgtgtgacacagaccggctggcctgcagcaagacctgcctgaacagcgctgacattggatttgtgattgatggcagcagctctgtgggcactggaaacttcagaacagtgctgcagtttgtgaccaacctgaccaaggagtttgagatcagtgacacagacaccagaattggagctgtgcagtacacctatgagcagaggctggagtttggatttgacaagtacagcagcaagccagacatcctgaatgccatcaagagggtgggctactggagcggcggcaccagcactggagctgccatcaactttgccctggagcagctgttcaagaagagcaagcccaacaagaggaagctgatgatcctgatcacagatggccgctcctatgatgatgtgcgcatcccagccatggccgcccacctgaagggcgtcatcacctacgccatcggcgtggcctgggccgcccaggaggagctggaggtgattgccacccacccagcccgggaccacagcttctttgtggatgaatttgacaacctgcaccagtatgtgccccgcatcatccagaacatctgcacagagttcaacagccagcccaggaactag

SEQ ID NO: 7565 - DNA, 555 bp, synthetic construct
  misc_feature 1..555: note = source = /note="Description of Artificial Sequence: Synthetic coding sequence"
  source 1..555: mol_type = other DNA
atgttctgcctgctgcacctgtgcttctacctggccaactttgccagcagcatcaagaggacccatgctgtgaatggctgctgcggcctgcagatgattgccctgtgggcccagagcagtggaaatgctgatgcccgggtggaggagatcctggccggggaggagcggcggctggccgccctgctgggcagccagggcatgaggttctgggtgtgcctggccgcctgccgggccatgtggggcctggccgcccggcggggccgggcagaggacagcagcagcagccctgtggatgccagcaagttcccctggaggggcggccagcacaggaccaccatgatgccctgcctgctgcgggtgggcgtcttccggccctgccacgtgcggcccactggagaccccagctgtgatgtgcagcccccccggctgggcttcagccgggtgcctgacacccaggtggccttctacggcagcggccactgggaccccacccccttctctgtgcacagctgcttcttcaacttccaggtgaggaagatcatcttcctgctgtag

SEQ ID NO: 7566 - DNA, 864 bp, synthetic construct
  misc_feature 1..864: note = source = /note="Description of Artificial Sequence: Synthetic coding sequence"
  source 1..864: mol_type = other DNA
atgaccagcgctgcccactactaccccaagctgatgagcatcatgggaaatgtgctgcgcttcctgcctgcctttgtgaggatgaagcagctgattgaggagggctacgtgggggagcccctggtgtgtgaggtgcaggtgcacggcggcagcctgctgggcaagaagtacaactggagctgtgatgacctgatgggcggcggcggcctgcacagcgtgggcacctacatcatcgacctgctgaccttcctgaccggccagaaggctgtgaaggtgcacggcctgctgaagacctttgtgaagcagacagaccacatcaagggcatccggcagatcaccagtgatgacttctgcaccttccagatggtgctggagggcggcgtgtgctgcaccgtgaccctgaacttcaacgtgcctggagagttcaagcaggatgtgacagtggtgggcagcgctggccgcctgctggccgtgggcacagacctgtatggccagaggaacagcgcccctgagcaggagctgctggtgcaggatgccacccctgtgagcaacagcctgctgcctgagaaggccttcagtgacatccccagcccctacctgcggggcaccatcaagatgatgcaggccgtgcggcaggccttccaggaccaggatgacaggaggacctgggatggccggcccctgaccatggccgccacctttgatgactgcctgtatgccctgtgtgtggtggacaccatcaagaggagcagccagacaggagagtggcagaacatcgccatcatgacagaggagcctgagctgagccctgcctacctgatcagcgaggccatgagaagaagcaggatgagcctgtactgctag

SEQ ID NO: 7567 - DNA, 1173 bp, synthetic construct
  misc_feature 1..1173: note = source = /note="Description of Artificial Sequence: Synthetic coding sequence"
  source 1..1173: mol_type = other DNA
atgctgcccggggtgggcgtgtttggcaccagcctgacagcccgggtcatcatccccctgctgaaggatgagggctttgctgtgaaggccctgtggggccgcacccaggaggaggccgaggagctggccaaggagatgtctgtgcccttctacaccagcagaattgatgaggtgctgctgcaccaggatgtggacctggtgtgcatcaacctgcccccacccctgacccggcagattgctgtgaagaccctgggcatcggcaagaatgtcatctgtgacagaacagccacccccctggatgccttcaggatgaccagcgctgcccactactaccccaagctgatgagcatcatgggaaatgtgctgcgcttcctgcctgcctttgtgaggatgaagcagctgattgaggagggctacgtgggggagcccctggtgtgtgaggtgcaggtgcatggaggcagcctgctgggcaagaagtacaactggagctgtgatgacctgatgggcggcggcggcctgcacagcgtgggcacctacatcatcgacctgctgaccttcctgaccggccagaaggctgtgaaggtgcacggcctgctgaagacctttgtgaagcagacagaccacatcaagggcatccggcagatcaccagtgatgacttctgcaccttccagatggtgctggagggcggcgtgtgctgcaccgtgaccctgaacttcaacgtgcctggagagttcaagcaggatgtgacagtggtgggcagcgctggccgcctgctggccgtgggcacagacctgtatggccagagaaattctgcccctgagcaggagctgctggtgcaggatgccacccctgtgagcaacagcctgctgcctgagaaggccttcagtgacatccccagcccctacctgcggggcaccatcaagatgatgcaggccgtgcggcaggccttccaggaccaggatgacaggaggacctgggatggccggcccctgaccatggccgccacctttgatgactgcctgtatgccctgtgtgtggtggacaccatcaagaggagcagccagacaggagagtggcagaacatcgccatcatgacagaggagcctgagctgagccctgcctacctgatcagcgaggccatgaggaggagcaggatgagcctgtactgctag

SEQ ID NO: 7568 - DNA, 5718 bp, synthetic construct
  misc_feature 1..5718: note = source = /note="Description of Artificial Sequence: Synthetic coding sequence"
  source 1..5718: mol_type = other DNA
atgcagagccggctgctgctgctgggcgcccctgggggccacggcggccctgccagcaggaggatgaggctgctgctgcggcaggtggtgcagaggaggcctggaggagaccggcagaggcctgaggtgcggctgctgcacgccggcagcggggctgacaccggggacacagtgaacattggagatgtgtcctacaagctgaagatccccaagaaccctgagctggtgccccagaactacatcagtgacagcctggcccagagcgtggtgcagcacctgcgctggatcatgcagaaggacctgctgggccaggatgtgttcctgattggccccccaggccccctgcggcgcagcatcgccatgcagtacctggagctgaccaagcgggaggtggagtacatcgccctgagccgggacaccacagaaacagacctgaagcagaggcgggagatccgggccggcacagccttctacatcgaccagtgtgctgtgcgggccgccacagagggccgcaccctcatcctggagggcctggagaaggccgagagaaatgtgctgcctgtgctgaacaacctgctggagaaccgggagatgcagctggaggatggccgcttcctgatgtctgctgagagatatgacaagctgctgcgggaccacaccaagaaggagctggacagctggaagatcgtgcgggtgtctgagaacttccgggtgattgccctgggcctgcctgtgccccgctacagcggcaaccccctggacccccccctgcggagccgcttccaggcccgggacatctactacctgcccttcaaggaccagctgaagctgctgtacagcattggagccaacgtgtctgctgagaaggtgtcccagctgctgagctttgccaccaccctgtgcagccaggagagcagcaccctgggcctgcctgacttccccctggacagcctggccgctgctgtgcagatcctggacagcttccccatgatgcccatcaagcacgccatccagtggctgtacccctacagcatcctgctgggccacgagggcaagatggctgtggagggcgtgctgaagagatttgagctgcaggacagcggcagcagcctgctgcccaaggagatcgtgaaggtggagaagatgatggagaaccacgtgtcccaggcctctgtgaccatcagaattgctgacaaggaggtgaccatcaaggtgcctgctggcacccggctgctgagccagccctgtgccagtgaccgcttcatccagaccctgagccacaagcagctgcaggccgagatgatgcagagccacatggtgaaggacatctgcctgattggaggcaagggctgcggcaagacagtcatcgccaagaactttgctgacaccctgggctacaacatcgagcccatcatgctgtaccaggacatgacagcccgggacctgctgcagcagcgctacaccctgcccaatggagacacagcctggaggagcagccccctggtgaatgctgccctggagggcaagctggtgctgctggatggcatccaccgggtgaatgccggcaccctggccgtgctgcagaggctcatccatgaccgggagctgagcctgtatgatggcagccggctgctgagagaagatcgctacatgaggctgaaggaggagctgcagctgagtgatgagcagctgcagaagaggagcatcttccccatccaccccagcttccgcatcatcgccctggccgagccccctgtgattggcagcacagcccaccagtggctgggccctgagttcctgaccatgttcttcttccactacatgaagcccctggtgaagtctgaggagatccaggtgatcaaggagaaggtgcccaacgtgccccaggaggccctggacaagctgctgtccttcacccacaagctgcgggagacccaggaccccacagcccagagcctggccgccagcctgagcacccggcagctgctgcgcatcagccggcggctgagccagtacccaaatgaaaacctgcacagcgctgtgaccaaggcctgcctgagccgcttcctgcccagcctggcccggagcgccctggagaagaacctggctgatgccaccatcgagatcaacacagatgacaacctggagcctgagctgaaggactacaagtgtgaggtgaccagcggcaccctgagaattggagctgtgtctgcccccatctacaatgcccacgagaagatgaaggtgcctgatgtgctcttctatgacaacatccagcacgtgattgtgatggaggacatgctgaaggacttcctgctgggggagcacctgctgctggtgggcaaccagggcgtgggcaagaacaagatcgtggaccgcttcctgcacctgctgaaccggccccgggagtacatccagctgcaccgggacaccaccgtgcagaccctgaccctgcagcccagcgtgaaggatggcctgattgtgtatgaggacagccccctggtgaaggctgtgaagctgggccacatcctggtggtggatgaagctgacaaggcccccaccaacgtgacctgcatcctgaagaccctggtggagaatggagagatgatcctggctgatggaagaagaattgtggccaacagcgccaacgtgaatggccgggagaatgtggtggtgatccacccagacttcaggatgattgtgctggccaaccggcccggcttccccttcctgggcaatgacttcttcggcaccctgggggacatcttcagctgccacgctgtggacaaccccaagccccacagcgagctggagatgctgcggcagtatggccccaacgtgcctgagcccatcctgcagaagctggtggccgcctttggagagctgcggagcctggccgaccagggcatcatcaactacccctacagcacccgggaggtggtgaacatcgtgaagcacctgcagaagttccccacagagggcctgagctctgtggtgagaaatgtgtttgattttgacagctacaacaatgacatgagggagatcctgatcaacaccctgcacaagtatggcatccccatcggggccaagcccacctctgtgcagctggccaaggagctgaccctgcctgagcagaccttcatgggctactggaccatcggccaggcccggagcggcatgcagaagctgctgtgccctgtggagacccaccacatcgacatcaagggccctgccctgatcaacatccaggagtaccccatcgagagacatgaggagaggagcctgaacttcacagaggagtgtgcctcctggaggatccccctggatgagatcaacatcatctgtgacatcgccaccagccatgaaaatgagcagaacaccctgtatgtggtgacctgcaacccagccagcctgtacttcatgaacatgaccgggaagagcggcttctttgtggacttctttgacatcttccccaggacagccaacggggtgtggcacccctttgtgacagtggcccccctgggcagccccctgaagggccaggtggtgctgcacgagcagcagagcaatgtcatcctgctgctggacaccaccggccgggccctgcacaggctcatcctgcccagcgagaagttcaccagcaagaagcccttctggtggaacaaggaggaggccgagacctacaagatgtgcaaggagttcagccacaagaactggctggtgttctacaaggagaagggcaacagcctgactgtgctggatgtgctggagggccgcacccacaccatcagcctgcccatcaacctgaagacagtgttcctggtggccgaggacaagtggctgctggtggagagcaagaccaaccagaagtacctgctgaccaagccagcccacattgaaagtgagggcagcggcgtgtgccagctgtatgtgctgaaggaggagccccccagcactggatttggagtgacccaggagacagagttcagcatcccccacaagatcagcagtgaccagctgagcagcgagcacctgagcagcgctgtggagcagaagatcgccagccccaaccgcatcctgagtgatgagaagaactatgccaccatcgtggtgggcttcccagacctgatgagccccagcgaggtgtacagctggaagaggcccagcagcctgcacaagaggtctggaacagacaccagcttctaccggggcaagaagaagaggggcacccccaagcagagcaactgtgtgaccctgctggacaccaaccaggtggtgcgcatcctgcccccaggagaggtgcccctgaaggacatctaccccaaggatgtgaccccaccccagaccagcggctacatcgaggtgacagacctgcagagcaagaagctgcgctacatccccatccccaggtctgagagcctgagcccctacaccacctggctgagcaccatcagtgacacagatgccctgctggccgagtgggacaagtctggagtggtgacagtggacatgggcggccacatccggctgtgggagaccggcctggagcggctgcagaggagcctgatggagtggaggaacatgattggccaggatgacaggaacatgcagatcaccatcaacagagacagcggggaggatgtgagcagccccaagcacggcaaggaggaccctgacaacatgcctcatgtgggcggcaacacctgggccggcggcactggaggccgggacacagctggcctgggcggcaagggcggcccctaccgcctggatgctggccacacagtgtaccaggtgtcccaggccgagaaggatgctgtgcctgaggaggtgaagagagctgcccgggagatgggccagagggccttccagcagaggctgaaggagatccagatgtctgaatatgatgctgccacctatgagcgcttcagcggggctgtgcggcggcaggtgcacagcctgcgcatcatcctggacaacctgcaggccaagggcaaggagcggcagtggctgcggcaccaggccaccggggagctggatgatgccaagatcattgatggcctgactggagagaaggccatctacaagagaagaggagagctggagccccagctgggcagcccccagcagaagcccaagaggctgcggctggtggtggatgtgtctggctccatgtaccgcttcaacaggatggatggccgcctggagaggaccatggaggccgtgtgcatggtgatggaggcctttgagaactatgaggagaagttccagtatgacatcgtgggccacagcggagatggctacaacatcggcctggtgcccatgaacaagatccccaaggacaacaagcagaggctggagatcctgaagaccatgcacgcccacagccagttctgcatgtctggggaccacaccctggagggcacagaacatgccatcaaggagatcgtgaaggaggaggctgatgagtactttgtgattgtgctgagtgatgccaacctgagccgctatggcatccacccagccaagtttgcccagatcctgacccgggacccccaggtgaatgcctttgccatcttcatcggcagcctgggggaccaggccacccggctgcagaggaccctgcctgctggccgcagctttgtggccatggacaccaaggacatcccccagatcctgcagcagatcttcaccagcaccatgctgagctctgtgtag

SEQ ID NO: 7569 - DNA, 561 bp, synthetic construct
  misc_feature 1..561: note = source = /note="Description of Artificial Sequence: Synthetic coding sequence"
  source 1..561: mol_type = other DNA
atggaggccctgcccctgctggccgccaccaccccagaccacggccgccaccggcggctgctgctgctgcccctgctgctcttcctgctgcctgctggagctgtgcagggctgggagacagaggagcggcccaggacccgggaggaggagtgccacttctacgccggcggccaggtgtacccaggagaggccagccgggtgtctgtggccgaccacagcctgcacctgagcaaggccaagatcagcaagccagccccctactgggagggcacagctgtgattgatggagagttcaaggagctgaagctgacagactaccggggcaagtacctggtgttcttcttctaccccctggacttcacctttgtgtgccccacagagatcatcgcctttggagaccggctggaggagttccgcagcatcaacacagaggtggtggcctgcagcgtggacagccagttcacccacctggcctggagcgtgtcctacacctacatccggaggaagaagaggatggacctgctgctgaagcacggccagatcaccctggacatgatctag

SEQ ID NO: 7570 - DNA, 816 bp, synthetic construct
  misc_feature 1..816: note = source = /note="Description of Artificial Sequence: Synthetic coding sequence"
  source 1..816: mol_type = other DNA
atggaggccctgcccctgctggccgccaccaccccagaccacggccgccaccggcggctgctgctgctgcccctgctgctcttcctgctgcctgctggagctgtgcagggctgggagacagaggagcggcccaggacccgggaggaggagtgccacttctacgccggcggccaggtgtacccaggagaggccagccgggtgtctgtggccgaccacagcctgcacctgagcaaggccaagatcagcaagccagccccctactgggagggcacagctgtgattgatggagagttcaaggagctgaagctgacagactaccggggcaagtacctggtgttcttcttctaccccctggacttcacctttgtgtgccccacagagatcatcgcctttggagaccggctggaggagttccgcagcatcaacacagaggtggtggcctgcagcgtggacagccagttcacccacctggcctggatcaacaccccccggcggcagggcggcctgggccccatccgcatccccctgctgagtgacctgacccaccagatcagcaaggactatggagtgtacctggaggacagcggccacaccctgcggggcctcttcatcattgatgacaagggcatcctgcggcagatcaccctgaatgacctgcctgtgggccgctctgtggatgagaccctgcggctggtgcaggccttccagtacacagacaagcatggagaggtgtgcccagctggctggaagccaggcagcgagaccatcatcccagaccctgctgggaagctgaagtactttgacaagctgaactag

SEQ ID NO: 7571 - DNA, 558 bp, synthetic construct
  misc_feature 1..558: note = source = /note="Description of Artificial Sequence: Synthetic coding sequence"
  source 1..558: mol_type = other DNA
atggaccacaggagccggctgcggggcaccggcctgaaccgcatccctggcacccagagccgggccccccgggtgcccctgcccttccacgtgcagcaggaggcccgggagggggaggactgggagcgggagcccccccggcagaggcctcccatctatgagcccccagagagcgaggagctgcctgacaacgtgatggtgtccaagccagccccctactgggagggcacagctgtgattgatggagagttcaaggagctgaagctgacagactaccggggcaagtacctggtgttcttcttctaccccctggacttcacctttgtgtgccccacagagatcatcgcctttggagaccggctggaggagttccgcagcatcaacacagaggtggtggcctgcagcgtggacagccagttcacccacctggcctggatcaacaccccccggcggcagggcggcctgggccccatccgcatccccctgctgagtgacctgacccaccagatcagcaaggactatggagtgtacctggaggacagcggccacaccctgtag

SEQ ID NO: 7572 - DNA, 843 bp, synthetic construct
  misc_feature 1..843: note = source = /note="Description of Artificial Sequence: Synthetic coding sequence"
  source 1..843: mol_type = other DNA
atggcccgcttctgggtgtgtgtggccggggccggcttcttcctggccttcctggtgctgcacagccgcttctgtggcagccctgtgctgaggaacttcacctttgctgtgtcctggaggacagagaagatcctgtaccgcctggatgtgggctggcccaagcaccctgagtacttcaccggcaccaccttctgtgtggccgtggacagcctgaatggcctggtgtacatcggccagagaggagacaacatccccaagatcctggtgttcacagaagatggctacttcctgcgggcctggaactacacagtggacaccccccacggcatctttgctgccagcaccctgtatgagcagagcgtgtggatcacagatgtgggcagtgacttcatgatcctgtggctgcacggggagaatggaactggacctgccaagttcaacatcccccacagcgtgaccctggacagcgctggccgggtgtgggtggccgaccggggcaacaagaggatccaggtgtttgacaaggacacaggagagtggctgggcgcctggaacaactgcttcacagaggagggccccagctctgtgcgcttcaccccagatggcaagtacctgattgtggcccagctgaacctgagccggctgtctgtggtggccgcccctcctgtgggcagcatcggggagtgcagcgtcatcagcaccatccagctggccgaccaggtgctgccccacctgctggaggtggacaggaagacaggagctgtgtatgtggccgagatcggggccaagcaggtgcagaagtatgtgcccctgaacagctatgtgcccagctttggcagctag

SEQ ID NO: 7573 - DNA, 1044 bp, synthetic construct
  misc_feature 1..1044: note = source = /note="Description of Artificial Sequence: Synthetic coding sequence"
  source 1..1044: mol_type = other DNA
atggcccgcttctgggtgtgtgtggccggggccggcttcttcctggccttcctggtgctgcacagccgcttctgtggcagccctgtgctgaggaacttcacctttgctgtgtcctggaggacagagaagatcctgtaccgcctggatgtgggctggcccaagcaccctgagtacttcaccggcaccaccttctgtgtggccgtggacagcctgaatggcctggtgtacatcggccagagaggagacaacatccccaagatcctggtgttcacagaagatggctacttcctgcgggcctggaactacacagtggacaccccccacggcatctttgctgccagcaccctgtatgagcagagcgtgtggatcacagatgtgggcagcggcttcttcggccacacagtgaagaagtacagcagctttggagacctggtgcaggtgctgggcaccccaggcaagaagggcaccagcctgaaccccctgcagtttgacaacccagctgagctgtatgtggaggacaccggggacatctacatcgtggatggagatggcggcctgaacaacagactcatcaagctgagccaggacttcatgatcctgtggctgcatggagaaaatggcaccggccctgccaagttcaacatcccccacagcgtgaccctggacagcgctggccgggtgtgggtggccgaccggggcaacaagaggatccaggtgtttgacaaggacaccggggagtggctgggcgcctggaacaactgcttcacagaggagggccccagctctgtgcgcttcaccccagatggcaagtacctgattgtggcccagctgaacctgagccggctgtctgtggtggccgcccctcctgtgggcagcattggagaatgttctgtcatcagcaccatccagctggccgaccaggtgctgccccacctgctggaggtggacaggaagacaggagctgtgtatgtggccgagattggagccaagcaggtgcagaagtatgtgcccctgaacagctatgtgcccagctttggcagctag

SEQ ID NO: 7574 - DNA, 1707 bp, synthetic construct
  misc_feature 1..1707: note = source = /note="Description of Artificial Sequence: Synthetic coding sequence"
  source 1..1707: mol_type = other DNA
atggtgctgctgcactggtgcctgctgtggctgctcttccccctgagcagcaggacccagaagctgcccaccagagatgaggagctgttccagatgcagatccgggacaaggccttcttccatgacagcagcgtcatcccagatggagctgagatcagcagctacctgttccgggacacccccaagcgctacttctttgtggtggaggaggacaacacccccctgtctgtgacagtgaccccctgtgatgcccccctggagtggaagctgagcctgcaggagctgcctgaagatagaagtggagagggcagcggggacctggagcccctggagcagcagaagcagcagatcatcaatgaggagggcacagagctgttctcctacaagggaaatgatgtggagtacttcatcagcagcagcagccccagcggcctgtaccagctggacctgctgagcacagagaaggacacccacttcaaggtgtatgccaccaccaccccagagagtgaccagccctacccagagctgccctatgacccccgggtggatgtgaccagcctgggccgcaccaccgtgaccctggcctggaagcccagccccacagccagcctgctgaagcagcccatccagtactgtgtggtgatcaacaaggagcacaacttcaagagcctgtgtgctgtggaggccaagctgtctgcagatgatgccttcatgatggcccccaagccaggcctggacttcagcccctttgattttgcccacttcggcttccccagcgacaacagcggcaaggagaggagcttccaggccaagcccagccccaagctgggcagacatgtgtacagccggcccaaggtggacatccagaagatctgcatcggcaacaagaacatcttcaccgtgtctgacctgaagccagacacccagtactactttgatgtgtttgtggtgaacatcaacagcaacatgagcacagcctacgtgggcacctttgcccggaccaaggaggaggccaagcagaagacagtggagctgaaggatggcaagatcacagatgtgtttgtgaagaggaagggggccaagttcctgcgctttgcccctgtgagcagccaccagaaggtgaccttcttcatccacagctgcctggatgctgtgcagatccaggtgagaagagatggcaagctgctgctgagccagaatgtggagggcatccagcagttccagctgcggggcaagcccaaggccaagtacctggtgcggctgaagggcaacaagaagggggcctccatgctgaagatcctggccaccacccggcccaccaagcagagcttccccagcctgcctgaggacacccgcatcaaggcctttgacaagctgcggacctgcagcagcgccaccgtggcctggctgggcacccaggagaggaacaagttctgcatctacaagaaggaggtggatgacaactacaatgaagaccagaagaagcgggagcagaaccagtgcctgggccctgacatcaggaagaagtctgagaaggtgctgtgcaagtacttccacagccagaacctgcagaaggctgtgaccacagagaccatcaagggcctgcagcccgggaagagctacctgctggatgtgtatgtgattggccacggcggccacagcgtgaagtaccagagcaaggtggtgaagaccaggaagttctgctag

SEQ ID NO: 7575 - DNA, 489 bp, synthetic construct
  misc_feature 1..489: note = source = /note="Description of Artificial Sequence: Synthetic coding sequence"
  source 1..489: mol_type = other DNA
atgaagggcttcaccgccaccctcttcctgtggaccctcatcttccccagctgcagcggcggcggcggcggcaaggcctggcccacccacgtggtgtgcagcgacagcggcctggaggtgctgtaccagagctgtgaccccctgcaggactttggcttctctgtggagaagtgcagcaagcagctgaagagcaacatcaacatccgcttcggcatcatcctgcgggaggacatcaaggagctgttcctggacctggccctgatgagccagggcagctctgtgctgaacttctcctaccccatctgtgaggccgccctgcccaagttctccttctgtggccgcaggaagggggagcagatctactatgccggccctgtgaacaaccctgagttcaccatcccccagggcgagtaccaggtgctgctggagctgtacacagagaagaggagcacagtggcctgtgccaatgccaccatcatgtgcagctag

SEQ ID NO: 7576 - DNA, 1698 bp, synthetic construct
  misc_feature 1..1698: note = source = /note="Description of Artificial Sequence: Synthetic coding sequence"
  source 1..1698: mol_type = other DNA
atggacttcctgctggccctggtgctggtgagcagcctgtacctgcaggccgctgctgagtttgatggccgctggccccggcagatcgtgagcagcatcggcctgtgccgctatggaggaagaattgactgctgctggggctgggcccggcagagctggggccagtgccagcctgtgtgccagccccgctgcaagcacggggagtgcatcggccccaacaagtgcaagtgccaccctggctacgccggcaagacctgcaaccaggacctgaatgaatgtggcctgaagccccggccctgcaagcaccgctgcatgaacacctacggcagctacaagtgctactgcctgaatggctacatgctgatgccagatggcagctgcagcagcgccctgacctgcagcatggccaactgccagtatggctgtgatgtggtgaagggccagatccgctgccagtgccccagccctggcctgcagctggccccagatggccgcacctgtgtggatgtggatgaatgtgccaccggccgggccagctgcccccgcttccggcagtgtgtgaacaccttcggcagctacatctgcaagtgccacaagggctttgacctgatgtacatcggcggcaagtaccagtgccacgacattgatgaatgttccctgggccagtaccagtgcagcagctttgcccgctgctacaacatccggggcagctacaagtgcaagtgcaaggagggctaccagggagatggcctgacctgtgtgtacatccccaaggtgatgattgagcccagcggccccatccacgtgcccaagggaaatggcaccatcctgaagggggacaccggcaacaacaactggatcccagatgtgggcagcacctggtggccacccaagaccccctacatcccccccatcatcaccaaccggcccaccagcaagcccaccacccggcccacccccaagcccacccccatccccaccccacctcctcctccacccctgcccacagagctgcggacccccctgccccccaccaccccagagcggcccaccaccggcctgaccaccatcgccccagctgccagcaccccacctgggggcatcaccgtggacaacagagtgcagacagacccccagaagcccagaggagatgtgttcatcccccggcagcccagcaatgacctgtttgagatctttgaaattgagcggggcgtgtctgcagatgatgaggccaaggatgatcctggggtgctggtgcacagctgcaactttgaccacggcctgtgtggctggatccgggagaaggacaatgacctgcactgggagcccatccgggaccctgctgggggccagtacctgactgtgtctgctgccaaggcccctgggggcaaggccgcccggctggtgctgcccctgggccgcctgatgcacagcggggacctgtgcctgtccttccgccacaaggtgacaggcctgcacagcggcaccctgcaggtgtttgtgaggaagcacggggcccatggagctgccctgtggggcagaaatggaggccacggctggaggcagacccagatcaccctgcggggagctgacatcaagtctgtggtgttcaagggggagaagaggcggggccacactggagaaattggcctggatgatgtgtccctgaagaagggccactgcagcgaggagaggtag

SEQ ID NO: 7577 - DNA, 1413 bp, synthetic construct
  misc_feature 1..1413: note = source = /note="Description of Artificial Sequence: Synthetic coding sequence"
  source 1..1413: mol_type = other DNA
atgaagaggtctgtggccgtgtggctgctggtgggcctgagcctgggcgtgccccagtttgggaagggggacatctgtgaccccaacccctgtgaaaatggaggcatctgcctgcccggcctggctgatggcagcttcagctgtgaatgtccagatggcttcacagaccccaactgcagctctgtggtggaggtgggcccctgcacccccaacccctgccacaatggaggcacctgtgagatcagcgaggcctacagaggagacaccttcatcggctacgtgtgcaagtgcccccggggcttcaacggcatccactgccagcacaacatcaatgaatgtgaggtggagccctgcaagaatggaggcatctgcacagacctggtggccaactacagctgtgagtgccctggagagttcatgggcaggaactgccagtacaagtgcagcggccccctgggcatcgagggcggcatcatcagcaaccagcagatcacagccagcagcacccaccgggccctgtttggcctgcagaagtggtacccctactatgcccggctgaacaagaagggcctcatcaatgcctggacagctgctgaaaatgaccgctggccctggatccagatcaacctgcagaggaagatgagggtgactggagtcatcacccagggcgccaagagaattggcagccctgagtacatcaagagctacaagatcgcctacagcaatgatggcaagacctgggccatgtacaaggtgaagggcaccaatgaagacatggtgttccggggcaacatcgacaacaacaccccctatgccaacagcttcaccccacccatcaaggcccagtatgtgcggctgtacccccaggtgtgccgccgccactgcaccctgaggatggagctgctgggctgtgagctgagcggctgcagcgagcccctgggcatgaagagcggccacatccaggactaccagatcacagccagcagcatcttccgcaccctgaacatggacatgttcacctgggagcccaggaaggcccggctggacaagcagggcaaggtgaatgcctggaccagcggccacaatgaccagagccagtggctgcaggtggacctgctggtgcccaccaaggtgacaggcatcatcacccagggcgccaaggactttggacatgtgcagtttgtgggcagctacaagctggcctacagcaatgatggagagcactggacagtgtaccaggatgagaagcagaggaaggacaaggtgttccagggcaactttgacaatgacacccacaggaagaatgtgattgatcctcccatctatgcccggcacatccgcatcctgccctggagctggtacggccgcatcaccctgcggtctgagctgctgggctgcacagaggaggagtag

SEQ ID NO: 7578 - DNA, 1254 bp, synthetic construct
  misc_feature 1..1254: note = source = /note="Description of Artificial Sequence: Synthetic coding sequence"
  source 1..1254: mol_type = other DNA
atggccagctacctgtatggagtgctgtttgctgtgggcctgtgtgcccccatctactgtgtgtccccagccaatgcccccagcgcctacccccggcccagcagcaccaagagcaccccagccagccaggtgtacagcctgaacacagactttgccttccggctgtacagaaggctggtgctggagacccccagccagaacatcttcttcagccctgtgtctgtgtccaccagcctggccatgctgagcctgggcgcccacagcgtgaccaagacccagatcctgcagggcctgggcttcaacctgacccacaccccagagagcgccatccaccagggcttccagcacctggtgcacagcctgactgtgcccagcaaggacctgaccctgaagatgggcagcgccctgtttgtgaagaaggagctgcagctgcaggccaacttcctgggcaatgtgaagaggctgtatgaggccgaggtgttcagcacagacttcagcaaccccagcatcgcccaggcccgcatcaacagccacgtgaagaagaagacccagggcaaggtggtggacatcatccagggcctggacctgctgacagccatggtgctggtgaaccacatcttcttcaaggccaagtgggagaagcccttccaccctgagtacaccaggaagaacttccccttcctggtgggggagcaggtgacagtgcacgtgcccatgatgcaccagaaggagcagtttgccttcggcgtggacacagagctgaactgctttgtgctgcagatggactacaagggagatgctgtggccttctttgtgctgcccagcaagggcaagatgaggcagctggagcaggccctgagcgcccggaccctgaggaagtggagccacagcctgcagaagcgctggattgaggtgttcatcccccgcttcagcatcagcgccagctacaacctggagaccatcctgcccaagatgggcatccagaatgtgtttgacaagaatgctgacttcagcggcatcgccaagagggacagcctgcaggtgtccaaggccacccacaaggctgtgctggatgtgtctgaggagggcacagaggccacagctgccaccaccaccaagttcatcgtgcgcagcaaggatggccccagctacttcaccgtgtccttcaacagaaccttcctgatgatgatcaccaacaaggccacagatggcatcctcttcctgggcaaggtggagaaccccaccaagagctag

SEQ ID NO: 7579 - DNA, 486 bp, synthetic construct
  misc_feature 1..486: note = source = /note="Description of Artificial Sequence: Synthetic coding sequence"
  source 1..486: mol_type = other DNA
atgctgatgcctgtgcacttcctgctgctgctgctgctgctgctgggcggccccaggacaggcctgccccacaagttctacaaggccaagcccatcttcagctgcctgaacacagccctgtctgaggccgagaagggccagtgggaggatgccagcctgctgagcaagaggagcttccactacctgcggagcagagatgccagcagtggagaggaggaggagggcaaggagaagaagaccttccccatcagcggggcccggggcggggcccggggcacccgctaccgctacgtgtcccaggcccagccccggggcaagccccggcaggacacagccaagagcccccacaggaccaagttcaccctgagcctggatgtgcccaccaacatcatgaacctgctcttcaacatcgccaaggccaagaacctgcgggcccaggccgccgccaatgcccacctgatggcccagattggaaggaagaagtag

SEQ ID NO: 7580 - DNA, 2091 bp, synthetic construct
  misc_feature 1..2091: note = source = /note="Description of Artificial Sequence: Synthetic coding sequence"
  source 1..2091: mol_type = other DNA
atggccatggcccggctgggctcctggctgggggaggcccagtggctggccctggtgtccctgtttgtggccgccctggccaccgtgggcctgtacctggcccagtgggccctggcccgggcccggccccagccccagaggagagctgtggagcccggggagggcccccggcccggcagtgatgccctgctgtcctggatcctgaccctgggctcctggaggagccagtggcaggccgcctgggtgacagccctgaatgaggaggccgagaggaagggcggcccccccttcctgagctttgaggaggacccccggcagcaggccctggagctggtggtgcaggaggtgtcctctgtgctgcggtctgctgaggagaaggtggtggtgtgccacgtggtgggccaggccatccagttcctggtgtctgagaccccagccctgggcgccggctgccgcctgtatgacatgaggctgagccccttccacctgcagctggagttccacatgaaggagaagcgggaggacctgcagatctcctggagcttcatctctgtgcctgagatggctgtgaacatccagcccaaggccctgggggaggaccaggtggccgagaccagcgccatgtctgatgtgctgaaggacatcctgaagcacctggccggcagcgccagccccagcgtggtgctgatcaccaagcccaccaccgtgaaggaggcccagaacctgcagtgtgccgccagcacagcccaggagagctgcccccccaagccaccccgggcccacgagctgaagctgctggtgaggaacatccacgtgctgctgctgtctgagcccggggccagcggccacatcaatgctgtgtgtgtggtgcagctgaatgaccctgtgcagcgcttcagcagcaccctgaccaagaacaccccagacctgatgtgggaggaggagttcacctttgagctgaatgccaagagcaaggagctgcacctgcagatcagcgaggccggccgcagcagcgagggcctgctggccacagccaccgtgcccctggacctcttcaagaagcagcccagcggcccccagagcttcaccctgaccagcggcagcgcctgtggcagctctgtgctgggctctgtgacagctgagttctcctacatggagcctggagagctgaagtcctggcccatccccccacctgtgcctgctgccaagattgagaaggacagaacagtgatgccctgtggcaccgtggtgaccaccgtgacagctgtgaagaccaagccccgggtggatgtgggccgggccagccccctgagcagtgacagccctgtgaagacccccatcaaggtgaaggtgattgagaaggacatctctgtgcaggccatcgcctgccgcagcgcccctgtgtccaagaccctgagcagcagtgacacagagctgctggtgctgaatggaagtgaccctgtggccgaggtggccatccggcagctgtctgagagcagcaagctgaagctgaagagccccaggaagaagagcaccatcatcatcagcggcatcagcaagaccagcctgagccaggaccatgatgctgccctgatgcagggctacacagcctctgtggacagcacccaccaggaggatgcccccagccaccctgagagagctgctgccagcgcccctcctgaggaggccgagagcgcccaggccagcctggcccccaagccccaggaggatgagctggacagctgggacctggagaaggagccccaggccgccgcctggagcagccaggtgctgctggaccctgatggagatgagctgtctgagagctccatgtctgtgctggagcccggcacagccaagaagcacaagggcggcatcctgaggaaaggagccaagctgttcttcagaagaagacaccagcagaaggaccccggcatgagccagagccacaatgacctggtgttcctggagcagcctgagggcagcaggaggaagggcatcaccctgacccgcatcctgaacaagaagctgctgagccgccacaggaacaagaacaccatgaatggagcccctgtggagccctgcacctag

SEQ ID NO: 7581 - DNA, 669 bp, synthetic construct
  misc_feature 1..669: note = source = /note="Description of Artificial Sequence: Synthetic coding sequence"
  source 1..669: mol_type = other DNA
atgcctgccagcagccccttcctgctggcccccaagggccccccaggcaacatgggcggccctgtgcgggagcccgccctgtctgtggccctgtggctgtcctggggcgccgccctgggcgctgtggcctgtgccatggccctgctgacccagcagacagagctgcagagcctgcggcgggaggtgtcccggctgcagggcaccggcggccccagccagaatggagagggctacccctggcagagcctgcctgagcagcacagcgtgctgcacctggtgcccatcaatgccaccagcaaggatgacagtgatgtgacagaggtgatgtggcagcctgccctgcggcggggccggggcctgcaggcccagggctatggagtgcgcatccaggatgctggggtgtacctgctgtacagccaggtgctcttccaggatgtgaccttcaccatgggccaggtggtgtcccgggagggccagggccggcaggagaccctcttccgctgcatccgctccatgcccagccacccagaccgggcctacaacagctgctacagcgctggggtcttccacctgcaccagggcgacatcctgagcgtcatcatcccccgggcccgggccaagctgaacctgagcccccacggcaccttcctgggctttgtgaagctgtag

SEQ ID NO: 7582 - DNA, 2205 bp, synthetic construct
  misc_feature 1..2205: note = source = /note="Description of Artificial Sequence: Synthetic coding sequence"
  source 1..2205: mol_type = other DNA
atgtggggcctgctgctggccctggccgcctttgccccagctgtgggccctgccctgggcgcccccagaaattctgtgctgggcctggcccagcccggcaccaccaaggtgcccggcagcaccccagccctgcacagcagccctgcccagcccccagctgagacagccaacggcaccagcgagcagcacgtgcgcatccgggtcatcaagaagaagaaggtgatcatgaagaagaggaagaagctgaccctgacccggcccacccccctggtgacagctggccccctggtgacccccaccccagctggcaccctggaccctgctgagaagcaggagaccggctgcccccccctgggcctggagagcctgcgggtgtctgacagccggctggaggccagcagcagccagagctttggcctgggcccccaccggggccgcctgaacatccagagcggcctggaggatggagacctgtatgatggagcctggtgtgccgaggagcaggatgctgacccctggttccaggtggatgctggccaccccacccgcttctctggagtcatcacccagggcaggaacagcgtgtggaggtatgactgggtgaccagctacaaggtgcagttcagcaatgacagcaggacctggtggggcagcaggaaccacagcagcggcatggatgctgtgtttcctgccaacagcgaccctgagacccctgtgctgaacctgctgcctgagccccaggtggcccgcttcatccggctgctgccccagacctggctgcagggcggggccccctgcctgcgggcagagatcctggcctgccctgtgtctgaccccaatgacctcttcctggaggccccagccagcggcagcagtgaccccctggacttccagcaccacaactacaaggccatgaggaagctgatgaagcaggtgcaggagcagtgccccaacatcacccgcatctacagcatcggcaagagctaccagggcctgaagctgtatgtgatggagatgtctgacaagccaggagagcacgagctgggggagcctgaggtgcgctacgtggccggcatgcacggcaatgaggccctgggccgggagctgctgctgctgctgatgcagttcctgtgccacgagttcctgcggggcaacccccgggtgacccggctgctgtctgagatgaggatccacctgctgcccagcatgaacccagatggctatgagatcgcctaccaccggggcagcgagctggtgggctgggccgagggccgctggaacaaccagagcattgacctgaaccacaactttgctgacctgaacacccccctgtgggaggcccaggatgatggcaaggtgccccacatcgtgcccaaccaccacctgcccctgcccacctactacaccctgcccaatgccaccgtggcccctgagaccagggctgtgatcaagtggatgaagaggatcccctttgtgctgagcgccaacctgcacggcggggagctggtggtgtcctacccctttgacatgaccaggaccccctgggccgcccgggagctgacccccaccccagatgatgctgtgttccgctggctgagcacagtgtatgccggcagcaacctggccatgcaggacaccagccggcggccctgccacagccaggacttctctgtgcacggcaacatcatcaacggggctgactggcacacagtgcccggctccatgaatgacttctcctacctgcacaccaactgctttgaggtgacagtggagctgagctgtgacaagttcccccatgaaaatgagctgccccaggagtgggagaacaacaaggatgccctgctgacctacctggagcaggtgaggatgggcattgctggggtggtgcgggacaaggacacagagctgggcattgctgatgctgtgattgctgtggatggcatcaaccatgatgtgaccacagcctggggcggggactactggaggctgctgacccctggggactacatggtgacagccagcgctgagggctaccacagcgtgaccaggaactgccgggtgacctttgaggagggccccttcccctgcaactttgtgctgaccaagacccccaagcagaggctgcgggagctgctggccgccggggccaaggtgcccccagacctgcggcggcggctggagcggctgcggggccagaaggactag

SEQ ID NO: 7583 - DNA, 759 bp, synthetic construct
  misc_feature 1..759: note = source = /note="Description of Artificial Sequence: Synthetic coding sequence"
  source 1..759: mol_type = other DNA
atgagggcccccctgctgcccccagcccctgtggtgctgagcctgctgatcctgggcagcggccactacgccgccggcctggacctgaatgacacctacagcggcaagcgggagcccttcagcggggaccacagcgcagatggctttgaggtgaccagccgctctgagatgagcagcggcagcgagatcagccctgtgtctgagatgcccagcagcagcgagcccagcagtggagctgactatgactacagcgaggagtatgacaatgagccccagatccctggctacatcgtggatgattctgtgcgggtggagcaggtggtgaagccaccccagaacaagacagaaagtgagaacaccagtgacaagcccaagaggaagaagaagggcggcaagaatggcaagaacagaagaaacaggaagaagaagaacccctgcaatgctgagttccagaacttctgcatccacggggagtgcaagtacatcgagcacctggaggccgtgacctgcaagtgccagcaggagtactttggagagcgctgtggggagaagtccatgaagacccacagcatgattgacagcagcctgagcaagatcgccctggccgccatcgccgccttcatgtctgctgtgatcctgacagctgtggccgtcatcaccgtgcagctgcggcggcagtatgtgaggaaatatgaaggagaggccgaggagaggaagaagctgcggcaggagaatggaaatgtgcacgccatcgcctag

SEQ ID NO: 7584 - DNA, 8487 bp, synthetic construct
  misc_feature 1..8487: note = source = /note="Description of Artificial Sequence: Synthetic coding sequence"
  source 1..8487: mol_type = other DNA
atgcccaagagggcccactggggcgccctgtctgtggtgctgatcctgctgtggggccacccccgggtggccctggcctgcccccacccctgtgcctgctacgtgcccagcgaggtgcactgcaccttccgcagcctggcctctgtgcctgctggcatcgccaagcacgtggagcgcatcaacctgggcttcaacagcatccaggccctgtctgagaccagctttgctggcctgaccaagctggagctgctgatgattcatggaaatgagatccccagcatcccagatggagccctgcgggacctgagcagcctgcaggtgttcaagttctcctacaacaagctgcgggtcatcaccggccagaccctgcagggcctgagcaacctgatgaggctgcacatcgaccacaacaagattgagttcatccacccccaggccttcaacggcctgaccagcctgcggctgctgcacctggagggcaacctgctgcaccagctgcaccccagcaccttcagcaccttcaccttcctggactacttccggctgagcaccatccgccacctgtacctggccgagaacatggtgaggaccctgcctgcctccatgctgaggaacatgcccctgctggagaacctgtacctgcagggcaacccctggacctgtgactgtgagatgcgctggttcctggagtgggatgccaagagccggggcatcctgaagtgcaagaaggacaaggcctatgaaggaggccagctgtgtgccatgtgcttcagccccaagaagctgtacaagcatgagatccacaagctgaaggacatgacctgcctgaagcccagcattgagagccccctgcggcagaacagaagccgcagcattgaggaggagcaggagcaggaggaggatggcggcagccagctgatcctggagaagttccagctgccccagtggagcatcagcctgaacatgacagatgagcacggcaacatggtgaacctggtgtgtgacatcaagaagcccatggatgtgtacaagatccacctgaaccagacagaccccccagacatcgacatcaatgccaccgtggccctggactttgagtgccccatgacccgggagaactatgagaagctgtggaagctgattgcctactacagcgaggtgcctgtgaagctgcaccgggagctgatgctgagcaaggacccccgggtgtcctaccagtaccggcaggatgctgatgaggaggccctgtactacacaggagtgcgggcccagatcctggccgagcctgagtgggtgatgcagcccagcattgacatccagctgaacagacggcagagcacagccaagaaggtgctgctgagctactacacccagtacagccagaccatcagcaccaaggacacccggcaggcccggggccgctcctgggtgatgattgagcccagcggggctgtgcagagggaccagacagtgctggagggcggcccctgccagctgagctgcaatgtgaaggccagcgagagccccagcatcttctgggtgctgcctgatggcagcatcctgaaggcccccatggatgatcctgacagcaagttcagcatcctgagcagcggctggctgcgcatcaagtccatggagcccagcgacagcggcctgtaccagtgcatcgcccaggtgagagatgagatggacaggatggtgtacagagtgctggtgcagagccccagcacccagcctgctgagaaggacacagtgaccatcggcaagaaccctggagagagcgtgaccctgccctgcaatgccctggccatccctgaggcccacctgtcctggatcctgcccaacagacgcatcatcaatgacctggccaacaccagccacgtgtacatgctgcccaacggcaccctgagcatccccaaggtgcaggtgtctgacagcggctactaccgctgtgtggccgtgaaccagcagggcgctgaccacttcaccgtgggcatcaccgtgaccaagaagggcagcggcctgcccagcaagagaggaagaagacctggggccaaggccctgagccgggtgagagaagatattgtggaggatgagggcggcagcggcatgggagatgaggagaacaccagccggcggctgctgcaccccaaggaccaggaggtgttcctgaagaccaaggatgatgccatcaacggggacaagaaggccaagaagggccgcaggaagctgaagctgtggaagcacagcgagaaggagcctgagaccaacgtggccgagggccggcgggtgtttgagagcagaagacgcatcaacatggccaacaagcagatcaaccctgagcgctgggccgacatcctggccaaggtgcggggcaagaacctgcccaagggcacagaggtgcccccactcatcaagaccaccagcccccccagcctgagcctggaggtgaccccacccttccctgccatcagcccccccagcgccagccctgtgcagacagtgaccagcgctgaggagagcagcgcagatgtgcccctgctgggggaggaggagcacgtgctgggcaccatcagcagcgcctccatgggcctggagcacaaccacaacggggtcatcctggtggagcctgaggtgaccagcacccccctggaggaggtggtggatgacctgtctgagaagacagaggagatcaccagcacagaaggagacctgaagggcacagctgcccccaccctcatcagcgagccctatgagcccagccccaccctgcacaccctggacacagtgtatgagaagcccacccatgaggagacagccacagagggctggagcgctgctgatgtgggcagcagccctgagcccaccagcagtgaatatgagccccccctggatgctgtgtccctggccgagagcgagcccatgcagtactttgatcctgacctggagaccaagagccagccagatgaggacaagatgaaggaggacacctttgcccacctgacccccacccccaccatctgggtgaatgacagcagcaccagccagctgtttgaggacagcaccatcggggagcccggggtgcccggccagagccacctgcagggcctgacagacaacatccacctggtgaagagcagcctgagcacccaggacaccctgctgatcaagaagggcatgaaggagatgagccagaccctgcagggcggcaacatgctggagggggaccccacccacagccgcagcagcgagagcgagggccaggagagcaagagcatcaccctgcctgacagcaccctgggcatcatgagctccatgagccctgtgaagaagccagctgagaccaccgtgggcaccctgctggacaaggacaccaccacagccaccaccaccccccggcagaaggtggcccccagcagcaccatgagcacccaccccagcagaagaagacccaacggcagaagaaggctgcggcccaacaagttccgccaccgccacaagcagaccccacccaccacctttgcccccagcgagaccttcagcacccagcccacccaggccccagacatcaagatcagcagccaggtggagagcagcctggtgcccacagcctgggtggacaacacagtgaacacccccaagcagctggagatggagaagaatgctgagcccaccagcaagggcacccccaggaggaagcacggcaagaggcccaacaagcaccgctacacccccagcacagtgagcagccgggccagcggcagcaagcccagccccagccctgagaacaagcacaggaacatcgtgacccccagcagcgagaccatcctgctgcccaggacagtgtccctgaagacagagggcccctatgacagcctggactacatgaccaccaccaggaagatctacagcagctaccccaaggtgcaggagaccctgcctgtgacctacaagcccaccagtgatggcaaggagatcaaggatgatgtggccaccaacgtggacaagcacaagagtgacatcctggtgactggagagagcatcaccaatgccatccccaccagccgcagcctggtgtccaccatgggagagttcaaggaggagagcagccctgtgggcttccctggcacccccacctggaaccccagcaggacagcccagcccggccgcctgcagacaggcatccctgtgaccaccagcggggagaacctgacagatcctcccctgctgaaggagctggaggatgtggacttcaccagcgagttcctgagcagcctgactgtgtccacccccttccaccaggaggaggccggcagcagcaccaccctgagcagcatcaaggtggaggtggccagcagccaggccgagaccaccaccctggaccaggaccacctggagaccaccgtggccatcctgctgtctgagacccggccccagaaccacacccccacagctgccaggatgaaggagcccgccagcagcagccccagcaccatcctgatgagcctgggccagaccaccaccaccaagccagccctgcccagcccccgcatcagccaggccagccgggacagcaaagaaaatgtgttcctgaactacgtgggcaaccctgagacagaggccacccctgtgaacaatgaaggcacccagcacatgagcggccccaatgagctgagcacccccagcagtgaccaggatgccttcaacctgagcaccaagctggagctggagaagcaggtgtttggcagccgcagcctgccccggggccctgacagccagaggcaggacggccgggtgcacgccagccaccagctgaccagggtgcctgccaagcccatcctgcccacagccaccgtgcggctgcctgagatgagcacccagagcgccagccgctactttgtgaccagccagagccccaggcactggaccaacaagccagagatcaccacctaccccagcggggccctgcctgagaacaagcagttcaccaccccccggctgagcagcaccaccatccccctgcccctgcacatgagcaagcccagcatccccagcaagttcacagacagaagaacagaccagttcaacggctacagcaaggtgtttggaaacaacaacatccctgaggccagaaatcctgtgggcaagccacccagcccccgcatcccccactacagcaatggccgcctgcccttcttcaccaacaagaccctgtccttcccccagctgggcgtgacccggcggccccagatccccaccagccctgcccctgtgatgagggagaggaaggtgattcctggcagctacaaccgcatccacagccacagcaccttccacctggactttggccccccagccccacccctgctgcacaccccccagaccaccggcagccccagcaccaacctgcagaacatccccatggtgagcagcacccagagcagcatctccttcatcaccagctctgtgcagagcagcggcagcttccaccagagcagcagcaagttctttgctgggggccccccagccagcaagttctggagcctgggggagaagccccagatcctgaccaagagcccccagacagtgtctgtgacagctgagacagacacagtgttcccctgtgaggccaccgggaagcccaagccctttgtgacctggaccaaggtgtccactggagccctgatgacccccaacacccgcatccagagatttgaggtgctgaagaatggcaccctggtgatcaggaaggtgcaggtgcaggaccggggccagtacatgtgcacagccagcaacctgcacggcctggacaggatggtggtgctgctgtctgtgacagtgcagcagccccagatcctggccagccactaccaggatgtgacagtgtacctgggggacaccatcgccatggagtgcctggccaagggcaccccagccccccagatctcctggatcttcccagacagaagagtgtggcagacagtgtcccctgtggagggccgcatcaccctgcacgagaacagaaccctgagcatcaaggaggccagcttcagtgacagaggagtgtacaagtgtgtggccagcaatgctgctggagctgacagcctggccatccggctgcacgtggccgccctgccccctgtgatccaccaggagaagctggagaacatcagcctgcccccaggcctgagcatccacatccactgcacagccaaggccgcccccctgcccagcgtgcgctgggtgctgggagatggcacccagatccggcccagccagttcctgcacggcaacctgtttgtgttccccaacggcaccctgtacatccggaacctggcccccaaggacagcggccgctatgaatgtgtggccgccaacctggtgggcagcgcccggaggacagtgcagctgaatgtgcagagagctgctgccaatgcccgcatcaccggcaccagccccaggagaacagatgtgcgctatggaggcaccctgaagctggactgcagcgccagcggggacccctggccccgcatcctgtggaggctgcccagcaagaggatgattgatgccctcttctcctttgacagccgcatcaaggtgtttgccaacggcaccctggtggtgaagtctgtgacagacaaggatgctggggactacctgtgtgtggccaggaacaaggtgggagatgattatgtggtgctgaaggtggatgtggtgatgaagccagccaagattgagcacaaggaggagaatgaccacaaggtgttctatggaggagacctgaaggtggactgtgtggccaccggcctgcccaaccctgagatctcctggagcctgcctgatggcagcctggtgaacagcttcatgcagagtgatgacagcggcggccgcaccaagagatatgtggtgttcaacaacggcaccctgtacttcaatgaggtgggcatgagggaggagggggactacacctgctttgctgagaaccaggtgggcaaggatgagatgagggtgcgggtgaaggtggtgacagccccagccaccatccggaacaagacctacctggccgtgcaggtgccctatggagatgtggtgacagtggcctgtgaggccaagggggagcccatgcccaaggtgacctggctgagccccaccaacaaggtgatccccaccagcagcgagaagtaccagatctaccaggacggcaccctgctgatccagaaggcccagaggagtgacagcggcaactacacctgcctggtgagaaattctgctggggaggacaggaagacagtgtggatccacgtgaatgtgcagccccccaagatcaatggaaaccccaaccccatcaccaccgtgcgggagattgctgctgggggcagcaggaagctgattgactgcaaggccgagggcatccccaccccccgggtgctgtgggccttccctgagggcgtggtgctgcctgccccctactacggcaaccgcatcaccgtgcacggcaatggcagcctggacatccgcagcctgaggaagagtgacagcgtgcagctggtgtgcatggccagaaatgaaggaggagaggcccggctcatcctgcagctgactgtgctggagcccatggagaagcccatcttccatgaccccatcagcgagaagatcacagccatggccggccacaccatcagcctgaactgcagcgctgctggcacccccacccccagcctggtgtgggtgctgcccaacggcacagacctgcagagcggccagcagctgcagcgcttctaccacaaggcagatggcatgctgcacatcagcggcctgagctctgtggatgctggggcctaccgctgtgtggccagaaatgctgctggccacacagagcggctggtgtccctgaaggtgggcctgaagccagaggccaacaagcagtaccacaacctggtgtccatcatcaatggagagaccctgaagctgccctgcaccccacctggggccggccagggccgcttctcctggaccctgcccaacggcatgcacctggagggcccccagaccctgggccgggtgtccctgctggacaatggcaccctgactgtgcgggaggcctctgtgtttgaccggggcacctacgtgtgcaggatggagacagaatatggccccagcgtgaccagcatccctgtgattgtgattgcctacccaccccgcatcaccagcgagcccacccctgtgatctacaccaggcctggcaacacagtgaagctgaactgcatggccatgggcatccccaaggctgacatcacctgggagctgcctgacaagagccacctgaaggccggcgtgcaggcccggctgtatggcaaccgcttcctgcacccccagggcagcctgaccatccagcacgccacccagagagatgctggcttctacaagtgcatggccaagaacatcctgggcagtgacagcaagaccacctacatccacgtgttctag

SEQ ID NO: 7585 - DNA, 3330 bp, synthetic construct
  misc_feature 1..3330: note = source = /note="Description of Artificial Sequence: Synthetic coding sequence"
  source 1..3330: mol_type = other DNA
atgaggctgctgctgctggtgcccctgctgctggccccagcccctggcagcagcgcccccaaggtgcggcggcagagcgacacctggggcccctggagccagtggagcccctgcagcaggacctgtggcggcggcgtgtccttccgggagcggccctgctacagccagaggagagatggcggcagcagctgtgtgggccctgcccggagccacaggagctgcaggacagagagctgcccagatggagcccgggacttccgggcagagcagtgtgccgagtttgatggagctgagttccagggccgccgctaccgctggctgccctactacagcgcccccaacaagtgtgagctgaactgcatccccaagggggagaacttctactacaagcaccgggaggccgtggtggatggcaccccctgtgagcccgggaagagagatgtgtgtgtggatggcagctgccgggtggtgggctgtgaccacgagctggacagcagcaagcaggaggacaagtgcctgcgctgtggaggagatggcaccacctgctaccctgtggccggcacctttgatgccaatgacctgagccggggctacaaccagatcctgattgtgcccatgggcgccaccagcatcctgattgatgaggccgccgccagcaggaacttcctggccgtgaagaatgtgcggggggagtactacctgaatggccactggaccatcgaggccgcccgggccctgcctgctgccagcaccatcctgcactatgaaagaggagctgagggggacctggcccctgagcggctgcacgcccggggccccaccagcgagcccctggtgattgagctgatcagccaggagcccaaccctggggtgcactatgagtaccacctgcccctgcggcggcccagccctggcttctcctggagccacggctcctggagcgactgcagcgcagaatgtggcggcggccaccagagccggctggtgttctgcaccatcgaccacgaggcctacccagaccacatgtgccagaggcagcccaggcctgctgaccggcgcagctgcaacctgcacccctgcccagagaccaagcgctggaaggccggcccctgggccccctgcagcgccagctgtggcggcggcagccagagccgctctgtgtactgcatcagcagtgatggagctggcatccaggaggccgtggaggaggctgaatgtgccggcctgcccgggaagcccccagccatccaggcctgcaacctgcagagatgtgccgcctggagccctgagccctggggcgagtgcagcgtgtcctgtggggtgggcgtgaggaagaggtctgtgacctgccgcggggagcggggcagcctgctgcacacagctgcctgcagcctggaggacaggcctcccctgacagagccctgtgtgcatgaggactgccccctgctgagtgaccaggcctggcacgtgggcacctggggcctgtgcagcaagagctgcagcagcggcacccggcggcggcaggtgatctgtgccatcggcccccccagccactgcggcagcctgcagcacagcaagcctgtggatgtggagccctgcaacacccagccctgccacctgccccaggaggtgcccagcatgcaggatgtgcacaccccagccagcaacccctggatgcccctgggcccccaggagagccctgccagtgacagccggggccagtggtgggccgcccaggagcaccccagcgcccggggggaccacagaggagagcggggggaccccaggggggaccagggcacccacctgagcgccctgggccctgcccccagcctgcagcagcccccctaccagcagcccctgcggagcggcagcggcccccatgactgccgccacagcccccacggctgctgcccagatggccacacagccagcctgggcccccagtggcagggctgccctggggccccctgccagcagagccgctatggctgctgcccagacagagtgtctgtggccgagggcccccaccacgccggctgcaccaagagctatggaggagacagcactggaggcatgcccaggagcagagctgtggccagcacagtgcacaacacccaccagccccaggcccagcagaatgagcccagcgagtgccggggcagccagtttggctgctgctatgacaacgtggccacagctgctggccccctgggggagggctgtgtgggccagcccagccacgcctaccctgtgcgctgcctgctgcccagcgcccacggcagctgtgccgactgggccgcccgctggtactttgtggcctctgtgggccagtgcaaccgcttctggtacggcggctgccacggcaatgccaacaactttgccagcgagcaggagtgcatgagcagctgccagggcagcctgcacggcccccggcggccccagcccggggccagcggccgcagcacccacacagatggcggcggcagcagccctgctggggagcaggagcccagccagcacaggactggagctgctgtgcagaggaagccctggcccagcggcggcctgtggaggcaggaccagcagcccggccctggagaggccccccacacccaggcctttggagagtggccctggggccaggagctgggcagccgggcccctggcctgggcggagatgctggcagccctgccccacccttccacagcagcagctaccgcatcagcctggccggcgtggagcccagcctggtgcaggccgccctgggccagctggtgcggctgagctgcagtgatgacacagcccctgagagccaggccgcctggcagaaggatggccagcccatcagcagtgacagacaccggctgcagtttgatggcagcctcatcatccaccccctgcaggctgaagatgctggcacctacagctgtggcagcaccaggcctggccgggacagccagaagatccagctgcgcatcattggaggagacatggctgtgctgtctgaggccgagctgagccgcttcccccagccccgggaccctgcccaggactttggccaggccggggccgccggccccctgggcgccatccccagcagccacccccagcctgccaaccggctgcggctggaccagaaccagccccgggtggtggatgccagccctggccagaggatccgcatgacctgcagagctgagggcttccccccaccagccatcgagtggcagagagatggccagcctgtgagcagccccagcacccacaggcctgcccagggcccctggcagggcctgcggcggcctgcccgggccggccagctgtag

SEQ ID NO: 7586 - DNA, 405 bp, synthetic construct
  misc_feature 1..405: note = source = /note="Description of Artificial Sequence: Synthetic coding sequence"
  source 1..405: mol_type = other DNA
atgaagtctgtgctgctgctgaccaccctgctggtgcctgcccacctggtggccgcctggagcaacaactatgctgtggactgcccccagcactgtgacagcagcgagtgcaagagcagcccccgctgcaagaggacagtgctggatgactgtggctgctgccgggtgtgtgccgccggccgcggggagacctgctacagaacagtgtctggcatggatggcatgaagtgtggccctggcctgcgctgccagcccagcaatggagaggacccctttggagaggagtttggcatctgcaaggagcatgacatggccagcggagatggcaacatcgtgcgggaggaggtggtgaaggaaaatgctgctggcagccctgtgatgaggaagtggctgaaccccaggtag

SEQ ID NO: 7587 - DNA, 555 bp, synthetic construct
  misc_feature 1..555: note = source = /note="Description of Artificial Sequence: Synthetic coding sequence"
  source 1..555: mol_type = other DNA
atgaagtctgtgctgctgctgaccaccctgctggtgcctgcccacctggtggccgcctggagcaacaactatgctgtggactgcccccagcactgtgacagcagcgagtgcaagagcagcccccgctgcaagaggacagtgctggatgactgtggctgctgccgggtgtgtgccgccggccgcggggagacctgctacagaacagtgtctggcatggatggcatgaagtgtggccctggcctgcgctgccagcccagcaatggagaggacccctttggagaggagtttggcatctgcaaggactgcccctacggcaccttcggcatggactgccgggagacctgcaactgccagagcggcatctgtgaccggggcaccgggaagtgcctgaagttccccttcttccagtacagcgtgaccaagagcagcaacagatttgtgtccctgacagaacatgacatggccagcggagatggcaacatcgtgcgggaggaggtggtgaaggaaaatgctgctggcagccctgtgatgaggaagtggctgaaccccaggtag

SEQ ID NO: 7588 - DNA, 597 bp, synthetic construct
  misc_feature 1..597: note = source = /note="Description of Artificial Sequence: Synthetic coding sequence"
  source 1..597: mol_type = other DNA
atgcccatcccagccagccccctgcacccccccctgcccagcctgctgctgtacctgctgctggagctggccggcgtgacccacgtgttccacgtgcagcagacagagatgagccagacagtgtccactggagagagcatcatcctgagctgcagcgtgcccaacaccctgcccaatggacctgtgctgtggttcaagggcaccggccccaacaggaagctgatctacaacttcaagcagggcaacttcccccgggtgaaggagattggagacaccaccaagccaggcaacacagacttcagcacccgcatccgggagatcagcctggctgatgctggcacctactactgtgtgaagttcatcaagggccgggccatcaaggagtaccagagcggccggggcacccaggtgtttgtgacagctgagcagaaccccaggcctcccaagaacagacctgctggccgggccggcagccgggcccaccatgatgcccacacctgcctgagcgccctgcctgagaggaacagcaccaactactttgtgcagccctgctgctgcctgcggctgctgggcctgaccggcctgctgagcaagtag

SEQ ID NO: 7589 - DNA, 594 bp, synthetic construct
  misc_feature 1..594: note = source = /note="Description of Artificial Sequence: Synthetic coding sequence"
  source 1..594: mol_type = other DNA
atgcccatcccagccagccccctgcacccccccctgcccagcctgctgctgtacctgctgctggagctggccggcgtgacccacgtgttccacgtgcagcagacagagatgagccagacagtgtccactggagagagcatcatcctgagctgcagcgtgcccaacaccctgcccaatggacctgtgctgtggttcaagggcaccggccccaacaggaagctgatctacaacttcaagcagggcaacttcccccgggtgaaggagattggagacaccaccaagccaggcaacacagacttcagcacccgcatccgggagatcagcctggctgatgctggcacctactactgtgtgaagttcatcaagggccgggccatcaaggagtaccagagcggccggggcacccaggtgtttgtgacagagcagaacccccggccccccaagaacagacctgctggccgggccggcagccgggcccaccatgatgcccacacctgcctgagcgccctgcctgagaggaacagcaccaactactttgtgcagccctgctgctgcctgcggctgctgggcctgaccggcctgctgagcaagtag

SEQ ID NO: 7590 - DNA, 1563 bp, synthetic construct
  misc_feature 1..1563: note = source = /note="Description of Artificial Sequence: Synthetic coding sequence"
  source 1..1563: mol_type = other DNA
atgaccacagatgacacagaggtgcctgccatgaccctggcccctggccacgccgccctggagacccagaccctgtctgctgagaccagcagccgggccagcaccccagctggccccatccctgaggccgagaccaggggggccaagaggatcagccctgcccgggagaccaggagcttcaccaagaccagccccaacttcatggtgctgattgccacctctgtggagaccagcgctgccagcggcagccctgagggcgccggcatgaccaccgtgcagaccatcaccggcagtgacccccgggaggccatctttgacaccctgtgcacagatgacatcagcgaggaggccaagaccctgaccatggacatcctgaccctggcccacaccagcacagaggccaagggcctgagcagcgagagcagcgccagcagtgatggcccccaccctgtgatcacccccagccgggccagcgagagcagcgccagcagtgatggcccccaccctgtgatcacccccagccgggccagcgagagcagcgccagcagtgatggcccccaccctgtgatcacccccagccgggccagcgagagcagcgccagcagtgatggcccccaccctgtgatcacccccagctggagccctggcagtgatgtgaccctgctggccgaggccctggtgacagtgaccaacatcgaggtgatcaactgcagcatcacagaaattgagaccaccaccagcagcatccctggggccagtgacacagacctgatccccacagagggcgtgaaggccagcagcaccagtgaccccccagccctgcctgacagcaccaacaccaagccccacatcacagaggtgacagccagcgctgagaccctgagcacagctggcaccacagagagcgctgccccagatgccaccatcggcacccccctgcccaccaacagcaccatcgagcgggaggtgacagcccctggggccaccaccctgagcggggccctggccactggaaaccccctggaggagaccagcgccctgtctgtggagacccccagctatgtgaaggtgtctggggccgcccctgtgtccattgaagctggcagcgctgtgggcaagaccaccagctttgctggcagcagcgccagcagctacagccccctggaggccgccctgaagaacttcacccccagcgagaccctgaccacagacatcgccaccaagggccccttccccaccagccgggaccccctgcccagcgtgccccccaccaccaccaacagcagccggggcaccaacagcaccctggccaagatcaccaccagcgccaagaccaccatgaagcccccaacagccacccccaccacagcccggacccggcccaccacagatgtgtctgctggagaaaatggaggcttcctgctgctgcggctgtctgtggccagccctgaggacctgacagacccccgggtggccgagcggctgatgcagcagctgcaccgggagctgcacgcccacgccccccacttccaggtgtccctgctgcgggtgcggcggggctag

SEQ ID NO: 7591 - DNA, 600 bp, synthetic construct
  misc_feature 1..600: note = source = /note="Description of Artificial Sequence: Synthetic coding sequence"
  source 1..600: mol_type = other DNA
atgctgtggaggcagctgatctactggcagctgctggccctcttcttcctgcccttctgcctgtgccaggatgagtacatggagagcccccagacaggaggcctgcccccagactgcagcaagtgctgccaccacggcaacaacggcaacaatggagccaccggccacaagggggagaagggctacccaggcatccccccagagctgcagatcgccttcatggccagcctggccacccacttcagcaaccagaacagcggcatcatcttcagctctgtggagaccaacatcggcaacttctttgatgtgatgacaggccgctttggagcccctgtgtctggagtgtacttcttcaccttctccatgatgaagcatgaagatgtggaggaggtgtatgtgtacctgatgcacaacggcaacacagtgttctccatgtacagctatgagatgaagggcaagagtgacaccagcagcaaccacgctgtgctgaagctggccaagggagatgaggtgtggctgaggatgggaaatggagccctgcatggagaccaccagcgcttcagcacctttgctggcttcctgctgtttgagaccaagtag

SEQ ID NO: 7592 - DNA, 960 bp, synthetic construct
  misc_feature 1..960: note = source = /note="Description of Artificial Sequence: Synthetic coding sequence"
  source 1..960: mol_type = other DNA
atgctgtggaggcagctgatctactggcagctgctggccctcttcttcctgcccttctgcctgtgccaggatgagtacatggaggtgtctggccgcaccaacaaggtggtggcccgcatcgtgcagagccaccagcagacaggccgcagcggcagcagaagagagaaggtgcgggagaggagccaccccaagacaggaacagtggacaacaacaccagcacagacctgaagagcctgcggccagatgagctgccccaccctgaggtggatgacctggcccagatcaccaccttctggggccagagcccccagacaggaggcctgcccccagactgcagcaagtgctgccacggggactacagcttccggggctaccagggccccccaggccccccaggccccccaggcatccctggcaaccacggcaacaacggcaacaatggagccaccggccacgagggcgccaagggggagaagggggacaagggggacctgggccccagaggagagcggggccagcacggccccaagggggagaagggctacccaggcatccccccagagctgcagatcgccttcatggccagcctggccacccacttcagcaaccagaacagcggcatcatcttcagctctgtggagaccaacatcggcaacttctttgatgtgatgacaggccgctttggagcccctgtgtctggagtgtacttcttcaccttctccatgatgaagcatgaagatgtggaggaggtgtatgtgtacctgatgcacaacggcaacacagtgttctccatgtacagctatgagatgaagggcaagagtgacaccagcagcaaccacgctgtgctgaagctggccaagggagatgaggtgtggctgaggatgggaaatggagccctgcatggagaccaccagcgcttcagcacctttgctggcttcctgctgtttgagaccaagtag

SEQ ID NO: 7593 - DNA, 855 bp, synthetic construct
  misc_feature 1..855: note = source = /note="Description of Artificial Sequence: Synthetic coding sequence"
  source 1..855: mol_type = other DNA
atgaccaagagcagcctgcggcccctgcagaagcagagcccccagacaggaggcctgcccccagactgcagcaagtgctgccacggggactacagcttccggggctaccagggccccccaggccccccaggccccccaggcatccctggcaaccacggcaacaatggaaacaacggggccactggacatgaaggagccaagggggagaagggggacaagggggacctgggccccagaggagagcggggccagcacggccccaagggggagaagggctacccaggcatccccccagagctgcagatcgccttcatggccagcctggccacccacttcagcaaccagaacagcggcatcatcttcagctctgtggagaccaacatcggcaacttctttgatgtgatgacaggccgctttggagcccctgtgtctggagtgtacttcttcaccttctccatgatgaagcatgaagatgtggaggaggtgtatgtgtacctgatgcacaatggaaacacagtgttctccatgtacagctatgagatgaagggcaagagtgacaccagcagcaaccacgctgtgctgaagctggccaagggagatgaggtgtggctgaggatgggaaatggagccctgcacggggaccaccagcgcttcagcacctttgctggcttcctgctgtttgagaccaagtgccacggggagaccccagctggcccccgggacagcgctgctgggaagagcaaggcctacctgtgccaggccgagtggatctggcctgtgaggaagctgctgcctgtgtcctggccccgctaccagctgtttggatttgtgcgctggaaggagcagcacatctag

SEQ ID NO: 7594 - DNA, 234 bp, synthetic construct
  misc_feature 1..234: note = source = /note="Description of Artificial Sequence: Synthetic coding sequence"
  source 1..234: mol_type = other DNA
atggccaccaggtctgtgctgctggccctggtggtgctgaacctgctcttctacgtgcccccaggccgcagcggccccaacgtgtacatccagaagatctttgccagctgctggaggctgcagggcacctgccggcccaagtgcctgaagaatgagcagtaccgcatcctgtgtgacaccatccacctgtgctgcgtgaaccccaagtacctgcccatcctgaccgggaagtag

SEQ ID NO: 7595 - DNA, 237 bp, synthetic construct
  misc_feature 1..237: note = source = /note="Description of Artificial Sequence: Synthetic coding sequence"
  source 1..237: mol_type = other DNA
atgaacctgtgcctgagcgccctgctcttcttcctggtgatcctgctgcccagcggcaagggcatgtttggaaatgatggagtgaaggtgaggacctgcaccagccagaaggctgtgtgcttcttcggctgccccccaggctaccgctggatcgccttctgccacaacatcctgagctgctgcaagaacatgacccgcttccagcccccccaggccaaggacccctgggtgcactag

SEQ ID NO: 7596 - DNA, 627 bp, synthetic construct
  misc_feature 1..627: note = source = /note="Description of Artificial Sequence: Synthetic coding sequence"
  source 1..627: mol_type = other DNA
atgggcgcccagggcgcccaggagagcatcaaggccatgtggagggtgcccggcaccaccaggaggcctgtgactggagagagccctggcatgcacaggcctgaggccatgctgctgctgctgaccctggccctgctgggcggccccacctgggccggcaagatgtatggccctgggggcggcaagtacttcagcaccacagaggactatgaccacgagatcaccggcctgcgggtgtctgtgggcctgctgctggtgaagtctgtgcaggtgaagctgggggacagctgggatgtgaagctgggcgccctgggcggcaacacccaggaggtgaccctgcagcctggagagtacatcaccaaggtgtttgtggccttccaggccttcctgcggggcatggtgatgtacaccagcaaggaccgctacttctactttgggaagctggatggccagatcagcagcgcctaccccagccaggagggccaggtgctggtgggcatctacggccagtaccagctgctgggcatcaagagcattggatttgagtggaactaccccctggaggagcccaccacagagccccctgtgaacctgacctacagcgccaacagccctgtgggccgctag

SEQ ID NO: 7597 - DNA, 288 bp, synthetic construct
  misc_feature 1..288: note = source = /note="Description of Artificial Sequence: Synthetic coding sequence"
  source 1..288: mol_type = other DNA
atgaagttcctgctgctggtgctggccgccctgggcttcctgacccaggtgatcccagccagcgctgggggcagcaaatgtgtgagcaacaccccaggctactgcaggacctgctgccactggggcgagacagccctcttcatgtgcaatgccagcaggaagtgctgcatctcctacagcttcctgcccaagccagacctgccccagctgattggcaaccactggcagagcagaagaagaaacacccagaggaaggacaagaagcagcagaccaccgtgaccagctag

SEQ ID NO: 7598 - DNA, 339 bp, synthetic construct
  misc_feature 1..339: note = source = /note="Description of Artificial Sequence: Synthetic coding sequence"
  source 1..339: mol_type = other DNA
atgtttgtgctgctgtatgtgaccagctttgccatctgtgccagcggccagccccggggcaaccagctgaagggggagaactacagcccccgctacatctgcagcatccctggcctgcccggccccccaggccccccaggggccaacggcagccctggcccccacggccgcatcggcctgcccggcagagatggaagagatggcaggaagggggagaagggggagaagggcacagctggcctgcggggcaagacaggccccctgggcctggccggggagaagggggaccagggcgagaccgggaagaagggccccatcggccctgagggggagaagtag

SEQ ID NO: 7599 - DNA, 300 bp, synthetic construct
  misc_feature 1..300: note = source = /note="Description of Artificial Sequence: Synthetic coding sequence"
  source 1..300: mol_type = other DNA
atgggcctcttcatgatcatcgccatcctgctcttccagaagcccaccgtgacagagcagctgaagaagtgctggaacaactacgtgcagggccactgcaggaagatctgccgggtgaatgaggtgcctgaggccctgtgtgaaaatggccgctactgctgcctgaacatcaaggagctggaggcctgcaagaagatcaccaagccaccccggcccaagccagccaccctggccctgaccctgcaggactatgtgaccatcatcgagaacttccccagcctgaagacccagagcacctag

SEQ ID NO: 7600 - DNA, 336 bp, synthetic construct
  misc_feature 1..336: note = source = /note="Description of Artificial Sequence: Synthetic coding sequence"
  source 1..336: mol_type = other DNA
atgaagagcctgctcttcaccctggccgtgttcatgctgctggcccagctggtgtctggcaactggtacgtgaagaagtgcctgaatgatgtgggcatctgcaagaagaagtgcaagccagaggagatgcacgtgaagaatggctgggccatgtgtgggaagcagagggactgctgcgtgcctgctgaccggcgggccaactaccctgtgttctgtgtgcagaccaagaccacccgcatcagcacagtgacagccaccacagccaccaccaccctgatgatgaccacagcctccatgagctccatggcccccacccctgtgagccccaccggctag

SEQ ID NO: 7601 - DNA, 1698 bp, synthetic construct
  misc_feature 1..1698: note = source = /note="Description of Artificial Sequence: Synthetic coding sequence"
  source 1..1698: mol_type = other DNA
atggaggacagcgacagcgctgccaagcagctgggcctggccgaggccgctgctgtggccgctgctgctgctgtggccgctgctgctgctgctgctgctggaggagaggccgaggagcctgtgctgagcagagatgaggacagcgaggaggatgctgacagcgaggccgagcgggagaccccccgggtgacagctgtggccgtgatggctgctgagcccggccacatggacatgggcgctgaggccctgcccggcccagatgaagctgctgctgctgctgcctttgctgaggtgaccaccgtgacagtggccaacgtgggcgctgctgctgacaacgtgttcaccacctctgtggccaatgctgccagcatcagcggccacgtgctgagcggccgcacagccctgcagattggagacagcctgaacacagagaaggccaccctgattgtggtgcacacagatggcagcatcgtggagaccaccggcctgaagggccctgctgcccccctgaccccaggcccccagagcccccccacccccctggcccctggccaggagaagggcggcaccaagtacaactgggaccccagcgtgtatgattctgagctgcctgtgcgctgcaggaacatcagcggcaccctgtacaagaaccggctgggcagcggcggccggggccgctgcatcaagcagggcgagaactggtacagccccacagaatttgaggccatggccggccgggccagcagcaaggactggaagaggagcatccgctatgccggccggcccctgcagtgcctgatccaggacggcatcctgaacccccacgccgccagctgcacctgtgccgcctgctgtgatgacatgaccctgagcggccctgtgcggctgtttgtgccctacaagaggaggaagaaggaaaatgagctgcccaccacccctgtgaagaaggacagccccaagaacatcaccctgctgcctgccacagctgccaccaccttcaccgtgacccccagcggccagatcaccaccagcggggccctgacctttgaccgggccagcacagtggaggccacagctgtgatcagcgagagccctgcccagggagatgtgtttgctggggccaccgtgcaggaggcctctgtgcagcccccctgccgggccagccaccctgagccccactacccaggctaccaggacagctgccagatcgcccccttccctgaggccgccctgcccaccagccaccccaagatcgtgctgaccagcctgcctgccctggccgtgcccccacccacccccaccaaggccgcccccccagccctggtgaatggcctggagctgtctgagcccaggtcctggctgtacctggaggagatggtgaacagcctgctgaacacagcccagcagctgaagaccctgtttgagcaggccaagcacgccagcacctaccgggaggccgccaccaaccaggccaagatccatgctgatgctgagaggaaggagcagagctgtgtgaactgtggccgggaggccatgtctgagtgcaccggctgccacaaggtgaactactgcagcaccttctgccagaggaaggactggaaggaccaccagcacatctgtggccagagcgctgctgtgacagtgcaggctgatgaggtgcacgtggccgagagcgtgatggagaaggtgacagtgtag

SEQ ID NO: 7602 - DNA, 471 bp, synthetic construct
  misc_feature 1..471: note = source = /note="Description of Artificial Sequence: Synthetic coding sequence"
  source 1..471: mol_type = other DNA
atgaacatcctgatgctgaccttcatcatctgtggcctgctgaccagggtgaccaagggcagctttgagccccagaagtgctggaagaacaacgtgggccactgcagaagacgctgcctggacacagagcgctacatcctgctgtgcaggaacaagctgagctgctgcatcagcatcatcagccatgagtacacccggcggcctgccttccctgtgatccacctggaggacatcaccctggactacagtgatgtggacagcttcaccggcagccctgtgtccatgctgaatgacctgatcacctttgacaccaccaagtttggagagaccatgaccccagagaccaacaccccagagaccaccatgcctccttctgaggccaccaccccagagaccaccatgcctccttctgaaacagccaccagcgagaccatgcccccacccagccagacagccctgacccacaactag

SEQ ID NO: 7603 - DNA, 837 bp, synthetic construct
  misc_feature 1..837: note = source = /note="Description of Artificial Sequence: Synthetic coding sequence"
  source 1..837: mol_type = other DNA
atgggcggcccccgggccctgctggccgccctgtgggccctggaggccgccggcacagctgccctgcgcatcggggccttcaacatccagagctttggagacagcaaggtgtctgaccctgcctgtggcagcatcatcgccaagatcctggccggctatgacctggccctggtgcaggaggtgcgggaccctgacctgtctgctgtgtctgccctgatggagcagatcaacagcgtgtctgagcacgagtacagctttgtgagcagccagcccctgggccgggaccagtacaaggagatgtacctgtttgtgtacaggaaggatgctgtgtctgtggtggacacctacctgtacccagaccctgaagatgtgttcagccgggagccctttgtggtgaagttcagcgcccctggaacagcccagaacctggtgctgatccccctgcacgccgccccccaccaggccgtggccgagattgatgccctgtatgatgtgtacctggatgtgattgacaagtggggcacagatgacatgctgttcctgggggacttcaatgctgactgcagctatgtgcgggcccaggactgggccgccatccggctgcggagcagcgaggtgttcaagtggctgatcccagacagcgctgacaccaccgtgggcaacagcgactgtgcctatgacagaattgtggcctgtggggcccggctgcggcgcagcctgaagccccagagcgccaccgtgcatgacttccaggaggagtttggcctggaccagacccaggccctggccatcagtgaccacttccctgtggaggtgaccctgaagttccacaggtag

SEQ ID NO: 7604 - DNA, 3039 bp, synthetic construct
  misc_feature 1..3039: note = source = /note="Description of Artificial Sequence: Synthetic coding sequence"
  source 1..3039: mol_type = other DNA
atggccgaggccgccctggaggccgtgcgctctgagctgcgggagttccctgctgctgcccgggagctgtgtgtgcccctggccgtgccctacctggacaagccacccacccccctgcacttctacagagactgggtgtgccccaaccggccctgcatcatcagaaatgccctgcagcactggccagccctgcagaagtggagcctgccctacttccgggccaccgtgggcagcacagaggtgtctgtggccgtgaccccagatggctatgcagatgctgtgcggggggaccgcttcatgatgcctgctgagcggcggctgcccctgagctttgtgctggatgtgctggagggccgggcccagcaccctggggtgctgtatgtgcagaagcagtgcagcaacctgcccagcgagctgccccagctgctgcctgacctggagagccacgtgccctgggccagcgaggccctgggcaagatgccagatgctgtgaacttctggctgggggaggccgctgctgtgaccagcctgcacaaggaccactatgaaaatctctactgtgtggtgtctggagagaagcacttcctgttccaccccccaagtgaccggcccttcatcccctatgagctgtacaccccagccacctaccagctgacagaggagggcaccttcaaggtggtggatgaggaggccatggagaaggccgaggtgtccaggacctgcctgctgactgtgcgggtgctgcaggcccaccggctgcccagcaaggacctggtgacccccagcgactgctacgtgaccctgtggctgcccacagcctgcagccaccggctgcagaccaggacagtgaagaacagcagcagccctgtgtggaaccagagcttccacttccgcatccaccggcagctgaagaatgtgatggagctgaaggtgtttgaccaggacctggtgactggagatgatcctgtgctgtctgtgctgtttgatgctggcaccctgcgggccggggagttcagaagagagagcttcagcctgagcccccagggcgagggccgcctggaggtggagttccggctgcagagcctggccgacagaggagagtggctggtgtccaatggagtgctggtggcccgggagctgagctgcctgcacgtgcagctggaggagaccggggaccagaagagcagcgagcaccgggtgcagctggtggtgcccggcagctgtgagggcccccaggaggcctctgtgggcaccggcaccttccgcttccactgcccagcctgctgggagcaggagctgagcatccggctgcaggatgcccctgaggagcagctgaaggcccccctgagcgccctgcccagcggccaggtggtgcggctggtgttccccaccagccaggagcccctgatgagggtggagctgaagaaggaggccggcctgcgggagctggccgtgcggctgggcttcggcccctgtgccgaggagcaggccttcctgagcaggaggaagcaggtggtggccgccgccctgcggcaggccctgcagctggatggagacctgcaggaggatgagatccctgtggtggccatcatggccactggaggcggcatccgggccatgaccagcctgtatggccagctggccggcctgaaggagctgggcctgctggactgtgtgtcctacatcactggagccagcggcagcacctgggccctggccaacctgtatgaagatcctgagtggagccagaaggacctggccggccccacagagctgctgaagacccaggtgaccaagaacaagctgggcgtgctggcccccagccagctgcagcgctaccggcaggagctggccgagcgggcccggctgggctaccccagctgcttcaccaacctgtgggccctgatcaatgaggccctgctgcatgatgagccccatgaccacaagctgagtgaccagcgggaggccctgagccacggccagaaccccctgcccatctactgtgccctgaacaccaagggccagagcctgaccacctttgaatttggagagtggtgtgagttcagcccctatgaggtgggcttccccaagtacggggccttcatccccagcgagctgtttggaagtgagttcttcatgggccagctgatgaagaggctgcctgagagccgcatctgcttcctggagggcatctggagcaacctgtatgctgccaacctgcaggacagcctgtactgggccagcgagcccagccagttctgggaccgctgggtgaggaaccaggccaacctggacaaggagcaggtgcccctgctgaagattgaggagccccccagcacagctggaagaattgctgagttcttcacagacctgctgacctggaggcccctggcccaggccacccacaacttcctgcggggcctgcacttccacaaggactacttccagcacccccacttcagcacctggaaggccaccaccctggatggcctgcccaaccagctgacccccagcgagccccacctgtgcctgctggatgtgggctacctgatcaacaccagctgcctgcccctgctgcagcccaccagagatgtggacctgatcctgagcctggactacaacctgcacggggccttccagcagctgcagctgctgggccgcttctgccaggagcagggcatccccttcccccccatcagccccagccctgaggagcagctgcagccccgggagtgccacaccttcagtgaccccacctgccctggggccccagctgtgctgcacttccccctggtgtctgacagcttccgggagtacagcgcccctggggtgcggaggaccccagaggaggccgctgctggggaggtgaacctgagcagcagtgacagcccctaccactacaccaaggtgacctacagccaggaggatgtggacaagctgctgcacctgacccactacaacgtgtgcaacaaccaggagcagctgctggaggccctgcggcaggccgtgcagaggcggcggcagaggcggccccactag

SEQ ID NO: 7605 - DNA, 1548 bp, synthetic construct
  misc_feature 1..1548: note = source = /note="Description of Artificial Sequence: Synthetic coding sequence"
  source 1..1548: mol_type = other DNA
atggcctggccctacttcctggactgccaccgctacttcacccgggaggatgagggctgctatgaccccctggagaagctgcggggcggcctggaggctgatgaggccctgcccagcggcctgccccccaccttcatccgcttcagccaccacagctatgcccagatggtgcgggtgctgcggaggacagccagccgctgtgcccacgtggcccggacctacagcatcggccgcagctttgatggccgggagctgctggtgattgagttcagcagccggcccggccagcacgagctgatggagcctgaggtgaagctgattggcaacatccatggaaatgaggtggccggccgggagatgctgatctacctggcccagtacctgtgcagcgagtacctgctgggcaacccccgcatccagaggctgctgaacaccacccgcatccacctgctgcccagcatgaacccagatggctatgaggtggccgctgctgagggcgccggctacaacggctggaccagcggccggcagaatgcccagaacctggacctgaacagaaacttcccagacctgaccagcgagtactaccgcctggccgagaccaggggggcccggagtgaccacatccccatcccccagcactactggtggggcaaggtggcccctgagaccaaggccatcatgaagtggatgcagaccatcccctttgtgctgagcgccagcctgcatggaggagacctggtggtgtcctacccctttgacttcagcaagcacccccaggaggagaagatgttcagccccaccccagatgagaagatgttcaagctgctgagccgggcctatgcagatgtgcaccccatgatgatggacagaagtgaaaatagatgtggcggcaacttcctgaagaggggcagcatcatcaacggggctgactggtacagcttcaccggcggcatgtctgacttcaactacctgcacaccaactgctttgagatcaccgtggagctgggctgtgtgaagttccccccagaggaggccctgtacatcctgtggcagcacaacaaggagagcctgctgaactttgtggagaccgtgcaccggggcatcaagggcgtggtgacagacaagtttgggaagcctgtgaagaatgcccgcatctctgtgaagggcatcagacatgacatcaccacagccccagatggagactactggaggctgctgcccccaggcatccacatcgtgattgcccaggcccctggctacgccaaggtgatcaagaaggtgatcatcccagccaggatgaagagagctggccgggtggacttcatcctgcagcccctgggcatgggccccaagaacttcatccacggcctgcggaggacaggcccccatgaccccctgggcggggccagcagcctgggggaggccacagagccagaccccctgcgggcccggcggcagcccagcgcagatggcagcaagccctggtggtggagctacttcaccagcctgagcacccaccggccccgctggctgctgaagtactag

SEQ ID NO: 7606 - DNA, 285 bp, synthetic construct
  misc_feature 1..285: note = source = /note="Description of Artificial Sequence: Synthetic coding sequence"
  source 1..285: mol_type = other DNA
atgaggaccctggccatcctggccgccatcctgctggtggccctgcaggcccaggccgagcccctgcaggcccgggcagatgaggtggccgccgcccctgagcagattgctgctgacatccctgaggtggtggtgtccctggcctgggatgagagcctggcccccaagcaccctggcagcaggaagaacatggcctgctactgccgcatcccagcctgcatcgccggggagcggcgctatggcacctgcatctaccagggccgcctgtgggccttctgctgctag

SEQ ID NO: 7607 - DNA, 420 bp, synthetic construct
  misc_feature 1..420: note = source = /note="Description of Artificial Sequence: Synthetic coding sequence"
  source 1..420: mol_type = other DNA
atgggcaaccctgggggcgtgggcagcgagaggatgagggtggcccggaggaccagaaatgtgtgccgctgccccagggctgctggccctggggtgcctgagcccagggctgcccccctgcccctgctggccatggcccctcctccagcctgccgcagccccatgagccccccacctccacccctgctgctgctgctgctgagcctggccctgctgggcgcccgggcccgggcagagcctgctggcagcgctgtgcctgcccagagccggccctgtgtggactgccacgcctttgagttcatgcagagggccctgcaggacctgaggaagacagcctgcagcctggatgccaggacagagaccctgctgctgcaggccgagcggcgggccctgtgtgcctgctggccagctggccactag

SEQ ID NO: 7608 - DNA, 471 bp, synthetic construct
  misc_feature 1..471: note = source = /note="Description of Artificial Sequence: Synthetic coding sequence"
  source 1..471: mol_type = other DNA
atggccccagctgtgacccggctgctcttcctgcagctggtgctgggccccaccctggtgatggacatcaagatgcagatcggcagcaggaacttctacaccctgagcattgactacccccgggtgaactaccccaagggcttccggggctactgcaatggcctgatgagctacatgaggggcaagatgcagaacagcgactgccccaagatccactacgtgatccacgccccctggaaggccatccagaagttctgcaagtacagcgacagcttctgtgagaactacaatgagtactgcaccctgacccaggacagcctgcccatcaccgtgtgcagcctgagccaccagcagccccccaccagctgctactacaacagcaccctgaccaaccagaagctgtacctgctgtgcagcaggaaatatgaggccgaccccatcggcattgctggcctgtacagcggcatctag

SEQ ID NO: 7609 - DNA, 444 bp, synthetic construct
  misc_feature 1..444: note = source = /note="Description of Artificial Sequence: Synthetic coding sequence"
  source 1..444: mol_type = other DNA
atgatcatcatggtgatcatcttcctggtgctgctcttctgggagaatgaggtgaatgatgaggccgtgatgagcaccctggagcacctgcacgtggactacccccagaatgatgtgcctgtgcctgcccgctactgcaaccacatgatcatccagagggtcatccgggagccagaccacacctgcaagaaggagcacgtgttcatccacgagcggcccaggaagatcaatggcatctgcatcagccccaagaaggtggcctgccagaacctgagcgccatcttctgcttccagagcgagaccaagttcaagatgacagtgtgccagctgattgagggcacccgctacccagcctgccgctaccactacagccccacagagggctttgtgctggtgacctgtgatgacctgcggccagacagcttcctgggctacgtgaagtag

SEQ ID NO: 7610 - DNA, 453 bp, synthetic construct; identical to SEQ ID NO: 7139
  misc_feature 1..453: note = source = /note="Description of Artificial Sequence: Synthetic coding sequence"
  source 1..453: mol_type = other DNA

SEQ ID NO: 7611 - DNA, 2742 bp, synthetic construct; identical to SEQ ID NO: 7141
  misc_feature 1..2742: note = source = /note="Description of Artificial Sequence: Synthetic coding sequence"
  source 1..2742: mol_type = other DNA

SEQ ID NO: 7612 - DNA, 453 bp, synthetic construct; identical to SEQ ID NO: 7139
  misc_feature 1..453: note = source = /note="Description of Artificial Sequence: Synthetic coding sequence"
  source 1..453: mol_type = other DNA

SEQ ID NO: 7613 - DNA, 567 bp, synthetic construct; identical to SEQ ID NO: 7502
  misc_feature 1..567: note = source = /note="Description of Artificial Sequence: Synthetic coding sequence"
  source 1..567: mol_type = other DNA

SEQ ID NO: 7614 - DNA, 2535 bp, synthetic construct; identical to SEQ ID NO: 7302
  misc_feature 1..2535: note = source = /note="Description of Artificial Sequence: Synthetic coding sequence"
  source 1..2535: mol_type = other DNA

SEQ ID NO: 7615 - DNA, 237 bp, synthetic construct; identical to SEQ ID NO: 7333
  misc_feature 1..237: note = source = /note="Description of Artificial Sequence: Synthetic coding sequence"
  source 1..237: mol_type = other DNA

SEQ ID NO: 7616 - DNA, 2700 bp, synthetic construct; identical to SEQ ID NO: 7525
  misc_feature 1..2700: note = source = /note="Description of Artificial Sequence: Synthetic coding sequence"
  source 1..2700: mol_type = other DNA

SEQ ID NO: 7617 - DNA, 2886 bp, synthetic construct; identical to SEQ ID NO: 7526
  misc_feature 1..2886: note = source = /note="Description of Artificial Sequence: Synthetic coding sequence"
  source 1..2886: mol_type = other DNA

SEQ ID NO: 7618 - DNA, 2535 bp, synthetic construct; identical to SEQ ID NO: 7302
  misc_feature 1..2535: note = source = /note="Description of Artificial Sequence: Synthetic coding sequence"
  source 1..2535: mol_type = other DNA

SEQ ID NO: 7619 - DNA, 2535 bp, synthetic construct; identical to SEQ ID NO: 7302
  misc_feature 1..2535: note = source = /note="Description of Artificial Sequence: Synthetic coding sequence"
  source 1..2535: mol_type = other DNA

SEQ ID NO: 7620 - DNA, 2700 bp, synthetic construct; identical to SEQ ID NO: 7525
  misc_feature 1..2700: note = source = /note="Description of Artificial Sequence: Synthetic coding sequence"
  source 1..2700: mol_type = other DNA

SEQ ID NO: 7621 - DNA, 2886 bp, synthetic construct; identical to SEQ ID NO: 7526
  misc_feature 1..2886: note = source = /note="Description of Artificial Sequence: Synthetic coding sequence"
  source 1..2886: mol_type = other DNA

SEQ ID NO: 7622 - DNA, 2535 bp, synthetic construct; identical to SEQ ID NO: 7302
  misc_feature 1..2535: note = source = /note="Description of Artificial Sequence: Synthetic coding sequence"
  source 1..2535: mol_type = other DNA

SEQ ID NO: 7623 - DNA, 3090 bp, synthetic construct
  misc_feature 1..3090: note = source = /note="Description of Artificial Sequence: Synthetic coding sequence"
  source 1..3090: mol_type = other DNA
atgccacccaccaagtctgtgtctgagcctgtgccctttgaaacagaggcccccagcatgaccatcgtgcccaccacagacatcgagcctgtgacagtgaggacagaggccaccgtgaccaccctggcccccaagaccagccagaggaccaggacccggcggccccggcccaagcacaagaccacccccaggcctgagaccctgcagaccaagctggactttggccccatcaccccaggcaccagcagcgcccccaccaccaccaccaagaggacccggcggccccaccccaagcccaagaccaccccccaccctgaggtgccccagaccaagctggtgcctgccaccatcctggagcctgtgctgaggacagaggccagcggcaccacagctgtgcctgccaccatctttgagcctgtgagccccatcaaggaggcccctggcaccacctttgtgcctgtgacagacctggagcctgtgaccttcagaacagagatcccagccaccaccctggccaccaagaccagcaagaggaccaggcctccccggccccggcccaagaccacccccagcccccaggcccctgagaccaagcctgtgcctgccaccgtgctggagcctgtgaccctgcggcctgaggccagcaccaccctggccagcaagaccagccagaggacccggcggccccggctgcggaccaagaccacccccaggcctgaggcccctgagagcaagcctgtgcccacagctgagctgaagcctgtgaccctgaggacagagacctgggtgaccacccaggcccccaagaccagccagaggacccggcggccccggcccaagaccaagaccacccccagccctgaggtgccccagaccaagctggtgcccagcacagacctggagcccggcaccctgaggacagaggcccccaagaccatggtggtgaccaccgtgctggagccagacaccttccgcaccaagtttcctgagaccaccctggcccccaagacccagaggacccggcggccccggccccggcccaagaccaccagcagccctgaggtgccccagaacaagtctgtgtctgtgacaggctttgagcctgtggtgcacagcacagatgcccctggcaccacctttgccctgacagagctgcagaccctcatcctgaagcctgtgaccagccccagcctggagatgacagagagccagcctgtgtctgatgtgctggagagcgtgaccctgagcacagagagccccaaggagaccatcgccccagccaagacagattatgtgtaccccacagccaaggcccccctgtggccagaggagcccaagacagaggtggtggagagcatcacctacgtgtctgagcccccagagaccaccctggagaccagccccctgcccagccagagcatcaccctgcccagcccagatgagccccagacagagcccgcccccaagcagaccccccgggccccacccaagcccaagaccagcccccggccccgcatcccccagacccagcctgtgcccaaggtgccccagagggtgacagccaagcccaagaccagccccagccctgaggtgtcctacaccaccccagcccccaaggatgtgctgctgccccacaagccctacccagaggtgtcccagagcgagcccgcccccctggagacccggggcatccccttcatccccatgatcagccccagccccagccaggaggagctgcagaccaccctggaggagacagaccagagcacccaggagcccttcaccaccaagatccccaggaccacagagctggccaagaccacccaggccccccaccgcttctacaccaccgtgcggcccaggaccagtgacaagccccacatccggcctggggtgaagcaggccccccggcccagcggggctgacagaaatgtgtctgtggacagcacccaccccaccaagaagccaggcaccaggaggcctcccctgcccccccggcccacccaccccaggaggaagcccctgccccccaacaacgtgacaggcaagccaggcagcgctggcatcatcagcagcggccccatcaccaccccacccctgcggagcaccccccggcccaccggcacccccctggagcgcatcgagacagacatcaagcagcccaccgtgcctgccagcggggaggagctggagaacatcacagacttcagcagcagccccacccgggagacagaccccctgggcaagccccgcttcaagggcccccacgtgcgctacatccagaagccagacaacagcccctgcagcatcacagattctgtgaagcgcttccccaaggaggaggccacagagggcaatgccaccagccccccccagaacccccccaccaacctgactgtggtgacagtggagggctgccccagctttgtgatcctggactgggagaagcccctgaatgacacagtgacagaatatgaagtcatcagcagagaaaatggcagcttcagcggcaagaacaagagcatccagatgaccaaccagaccttcagcacagtggagaacctgaagcccaacaccagctatgagttccaggtgaagcccaagaaccccctgggggagggccctgtgagcaacacagtggccttcagcacagagagcgctgacccccgggtgtctgagcctgtgtctgctggaagagatgccatctggacagagcggcccttcaacagcgacagctacagtgaatgtaaaggcaagcagtatgtgaagaggacctggtacaagaagtttgtgggcgtgcagctgtgcaacagcctgcgctacaagatctacctgagtgacagcctgaccgggaagttctacaacatcggggaccagaggggccacggggaggaccactgccagtttgtggacagcttcctggatggccgcacaggccagcagctgaccagtgaccagctgcccatcaaggagggctacttccgggctgtgcggcaggagcctgtgcagtttggagaaattggaggccacacccagatcaactacgtgcagtggtatgaatgtggcaccaccatccctgggaagtggtag

SEQ ID NO: 7624 - DNA, 2355 bp, synthetic construct
  misc_feature 1..2355: note = source = /note="Description of Artificial Sequence: Synthetic coding sequence"
  source 1..2355: mol_type = other DNA
atgaccatcgtgcccaccacagacatcgagcctgtgacagtgaggacagaggccaccgtgaccaccctggcccccaagaccagccagaggaccaggacccggcggccccggcccaagcacaagaccacccccaggcctgagaccctgcagaccaagctggactttggccccatcaccccaggcaccagcagcgcccccaccaccaccaccaagaggacccggcggccccaccccaagcccaagaccaccccccaccctgaggtgccccagaccaagctggcccccaaggtgccccagaggacccaccggccccaccccaagcccaagaccaccctgagccctgaggagctgcagacagagctggtgcctgtgacagacctggagcctgtgaccttcagaacagagatcccagccaccaccctggccaccaagaccagcaagaggaccaggcctccccggccccggcccaagaccacccccagcccccaggcccctgagaccaagcctgtgcctgccaccgtgctggagcctgtgaccctgcggcctgaggccagcaccaccctggccagcaagaccagccagaggacccggcggccccggctgcggaccaagaccacccccaggcctgaggcccctgagagcaagccagcccccaagcagaccccccgggccccacccaagcccaagaccagcccccggccccgcatcccccagacccagcctgtgcccaaggtgccccagagggtgacagccaagcccaagaccagccccagccctgaggtgtcctacaccaccccagcccccaaggatgtgctgctgccccacaagccctacccagaggtgtcccagagcgagcccgcccccctggagacccggggcatccccttcatccccatgatcagccccagccccagccaggaggagctgcagaccaccctggaggagacagaccagagcacccaggagcccttcaccaccaagatccccaggaccacagagctggccaagaccacccaggccccccaccgcttctacaccaccgtgcggcccaggaccagtgacaagccccacatccggcctgtgctgaacagaaccaccacccggcccacccggcccaagcccagcggcatgcccagcggaaatggagtgggcactggagtgaagcaggccccccggcccagcggggctgacagaaatgtgtctgtggacagcacccaccccaccaagaagccaggcacccggcggccccccctgcccccccggcccacccaccccaggaggaagcccctgccccccaacaacgtgacaggcaagccaggcagcgctggcatcatcagcagcggccccatcaccaccccacccctgcggagcaccccccggcccaccggcacccccctggagagaattgaaacagacatcaagcagcccaccgtgcctgccagcggggaggagctggagaacatcacagacttcagcagcagccccacccgggagacagaccccctgggcaagccccgcttcaagggcccccacgtgcgctacatccagaagccagacaacagcccctgcagcatcacagacagcgtgaagcgcttccccaaggaggaggccacagagggcaatgccaccagccccccccagaacccccccaccaacctgactgtggtgacagtggagggctgccccagctttgtgatcctggactgggagaagcccctgaatgacacagtgacagaatatgaggtgatcagccgggagaatggcagcttcagcggcaagaacaagagcatccagatgaccaaccagaccttcagcacagtggagaacctgaagcccaacaccagctatgagttccaggtgaagcccaagaaccccctgggggagggccctgtgagcaacacagtggccttcagcacagaatctgctgacccccgggtgtctgagcctgtgtctgctggaagagatgccatctggacagagcggcccttcaacagcgacagctacagcgagtgcaagggcaagcagtatgtgaagaggacctggtacaagaagtttgtgggcgtgcagctgtgcaacagcctgcgctacaagatctacctgagtgacagcctgaccgggaagttctacaacattggagaccagaggggccatggagaggaccactgccagtttgtggacagcttcctggatggccgcacaggccagcagctgaccagtgaccagctgcccatcaaggagggctacttccgggctgtgcggcaggagcctgtgcagtttggagagatcggcggccacacccagatcaactacgtgcagtggtatgaatgtggcaccaccatccctgggaagtggtag

SEQ ID NO: 7625 - DNA, 1584 bp, synthetic construct
  misc_feature 1..1584: note = source = /note="Description of Artificial Sequence: Synthetic coding sequence"
  source 1..1584: mol_type = other DNA
atgctgatgctgtttgtgtttggagtgctgctgcacgaggtgtccctgagcggccagaatgaggccccacccaacacccacagcatccctggagagcccctgtacaactatgccagcatccggctgcctgaggagcacatccccttcttcctgcacaacaacagacacatcgccaccgtgtgcaggaaggacagcctgtgcccctacaagaagcacctggagaagctgaagtactgctggggctatgagaagagctgcaagccagagttccgcttcggctaccctgtgtgcagctatgtggacatgggctggacagacaccctggagagcgctgaggacatcttctggaagcaggccgactttggctacgcccgggagcggctggaggagatgcacgtgctgtgccagcccaaggagaccagtgacagcagcctggtgtgcagccgctacctgcagtactgccgggccaccaacctgtacctggacctgaggaacatcaagaggaaccacgaccgcttcaaggaggacttcttccagagcggggagattggaggccactgcaagctggacatccgcaccctgaccagcgagggccagaggaagagccccctgcagagctggtttgctgagctgcagagctacacccagctgaacttccggcccattgaagatgccaagtgtgacatcgtgattgagaagcccacctacttcatgaagctggatgctggggtgaacatgtaccaccacttctgtgacttcatcaacctgtacatcacccagcacgtgaacaacagcttcagcacagatgtgtacatcgtgatgtgggacaccagcagctatggctacggggacctcttcagtgacacctggaatgccttcacagattatgatgtgatccacctgaagacctatgacagcaagagggtgtgcttcaaggaggccgtgttcagcctgctgcccaggatgagatatggcctcttctacaacacccccctcatcagcggctgccagaacacaggcctcttccgggcctttgcccagcacgtgctgcaccggctgaacatcacccaggagggccccaaggatggcaagatccgggtgaccatcctggcccggagcacagagtacaggaagatcctgaaccagaatgagctggtgaatgccctgaagacagtgtccacctttgaggtgcagatcgtggactacaagtaccgggagctgggcttcctggaccagctgcgcatcacccacaacacagacatcttcatcggcatgcacggggccggcctgacccacctgctcttcctgcctgactgggccgctgtgtttgagctgtacaactgtgaagatgagcgctgctacctggacctggcccggctgcggggcgtgcactacatcacctggaggcggcagaacaaggtgttcccccaggacaagggccaccaccccaccctgggggagcaccccaagttcaccaactacagctttgatgtggaggagttcatgtacctggtgctgcaggccgctgaccacgtgctgcagcaccccaagtggcccttcaagaagaagcatgatgagctgtag

SEQ ID NO: 7626 - DNA, 2004 bp, synthetic construct; identical to SEQ ID NO: 7024
  misc_feature 1..2004: note = source = /note="Description of Artificial Sequence: Synthetic coding sequence"
  source 1..2004: mol_type = other DNA

SEQ ID NO: 7627 - DNA, 1101 bp, synthetic construct
  misc_feature 1..1101: note = source = /note="Description of Artificial Sequence: Synthetic coding sequence"
  source 1..1101: mol_type = other DNA
atgcccatgatctctgtgctgggcaagatgttcctgtggcagcgggagggccctgggggccgctggacctgccagaccagccggcgggtgtccagtgaccctgcctgggccgtggagtggattgagctgccccggggcctgagcctgagcagcctgggcagcgcccggaccctgcggggctggagccgcagcagccggcccagctctgtggacagccaggacctgcctgaggtgaatgtgggggacacagtggccatgctgcccaagagcagaagagccctgaccatccaggagattgctgccctggcccggagcagcctgcacggcatcagccaggtggtgaaggaccacgtgaccaagcccacagccatggcccagggccgggtggcccacctgattgagtggaagggctggagcaagcccagcgacagccctgctgccctggagagcgccttcagcagctacagcgacctgtctgagggggagcaggaggccaggtttgctgctggggtggccgagcagtttgccatcgccgaggccaagctgcgggcctggagctctgtggatggagaggacagcacagatgacagctatgatgaggactttgctgggggcatggacacagacatggccggccagctgcccctgggcccccacctgcaggacctcttcaccggccaccgcttcagcaggcctgtgcggcagggctctgtggagcctgagagtgactgcagccagacagtgtccccagacaccctgtgcagcagcctgtgcagcctggaggatggcctgctgggcagccctgcccggctggccagccagctgctgggagatgagctgctgctggccaagctgccccccagccgggagagcgccttccgcagcctgggccccctggaggcccaggacagcctgtacaacagccccctgacagagagctgcctgagccctgctgaggaggagcccgccccctgcaaggactgccagcccctgtgcccccccctgaccggctcctgggagcggcagaggcaggccagtgacctggccagcagtggagtggtgtccctggatgaagatgaagctgagcctgaggagcagtag

SEQ ID NO: 7628 - DNA, 5172 bp, synthetic construct
  misc_feature 1..5172: note = source = /note="Description of Artificial Sequence: Synthetic coding sequence"
  source 1..5172: mol_type = other DNA
atgcagttccagctgaccctcttcctgcacctgggctggctgagctacagcaaggcccaggatgactgcaacagaggagcctgccaccccaccaccggggacctgctggtgggcaggaacacccagctgatggccagcagcacctgtggcctgagccgggcccagaagtactgcatcctgagctacctggagggggagcagaagtgcttcatctgtgacagccgcttcccctatgacccctatgaccagcccaacagccacaccattgaaaatgtgattgtgtcctttgagccagaccgggagaagaagtggtggcagagtgaaaatggcctggaccacgtgtccatccggctggacctggaggccctcttccgcttcagccacctgatcctgaccttcaagaccttccggcctgctgccatgctggtggagaggagcacagattatggccacaactggaaggtgttcaagtactttgccaaggactgtgccaccagcttccccaacatcaccagcggccaggcccagggcgtgggggacatcgtgtgtgacagcaagtacagcgacatcgagcccagcactggaggagaggtggtgctgaaggtgctggaccccagctttgaaattgagaacccctacagcccctacatccaggacctggtgaccctgaccaacctgcgcatcaacttcaccaagctgcacaccctgggagatgccctgctgggccggcggcagaatgacagcctggacaagtactactatgccctgtatgagatgattgtgcggggcagctgcttctgcaatggccacgcctctgaatgtcggcccatgcagaagatgagaggagatgtgttcagccccccaggcatggtgcacggccagtgtgtgtgccagcacaacacagatggccccaactgtgagcgctgcaaggacttcttccaggatgccccctggaggcctgctgctgacctgcaggacaatgcctgccgcagctgcagctgcaacagccacagcagccgctgccactttgacatgaccacctacctggccagcggcggcctgtctggaggagtgtgtgaggactgccagcacaacacagagggccagcactgtgaccgctgccggcccctcttctacagagaccccctgaagaccatcagtgacccctatgcctgcatcccctgtgaatgtgaccctgatggcaccatcagcggcggcatctgtgtgagccacagcgaccctgccctgggctctgtggccggccagtgcctgtgcaaggaaaatgtggagggcgccaagtgtgaccagtgcaagcccaaccactacggcctgagcgccacagaccccctgggctgccagccctgtgactgcaaccccctgggcagcctgcccttcctgacctgtgatgtggacaccggccagtgcctgtgcctgtcctatgtgactggagcccactgtgaggagtgcaccgtgggctactggggcctgggcaaccacctgcacggctgcagcccctgtgactgtgacatcggcggggcctacagcaatgtgtgcagccccaagaatggccagtgtgagtgccggccccacgtgacaggccgcagctgcagcgagcccgcccctggctacttctttgcccccctgaacttctacctgtatgaagctgaggaggccaccaccctgcagggcctggcccccctgggcagcgagaccttcggccagagccctgctgtgcacgtggtgctgggggagcctgtgcccggcaaccctgtgacctggacaggccctggctttgcccgggtgctgcctggagctggcctgcgctttgctgtgaacaacatccccttccctgtggacttcaccatcgccatccactatgagacccagagcgctgctgactggacagtgcagatcgtggtgaaccccccaggcggcagcgagcactgcatccccaagaccctgcagagcaagccccagagctttgccctgcctgctgccacccgcatcatgctgctgcccacccccatctgcctggagccagatgtgcagtacagcattgatgtgtacttcagccagcccctgcagggcgagagccacgcccacagccacgtgctggtggacagcctgggcctcatcccccagatcaacagcctggagaacttctgcagcaagcaggacctggatgagtaccagctgcacaactgtgtggagatcgccagcgccatgggcccccaggtgctgcccggggcctgtgagcggctcatcatctccatgtctgccaagctgcatgatggagctgtggcctgcaagtgccacccccagggctctgtgggcagcagctgcagccggctgggcggccagtgccagtgcaagcccctggtggtgggccgctgctgtgaccgctgcagcacaggcagctatgacctgggccaccacggctgccacccctgccactgccacccccagggcagcaaggacacagtgtgtgaccaggtgacaggccagtgcccctgccacggggaggtgtctggaagaagatgtgaccgctgcctggccggctacttcggcttccccagctgccacccctgcccctgcaacagatttgctgagctgtgtgaccctgagaccggcagctgcttcaactgtggcggcttcaccactggaagaaactgtgagcgctgcattgatggctactacggcaaccccagcagcggccagccctgccggccctgcctgtgcccagatgaccccagcagcaaccagtactttgcccacagctgctaccagaacctgtggagcagtgatgtgatctgcaactgcctgcagggctacacaggcacccagtgtggagaatgttccacaggcttctacggcaacccccgcatcagcggggccccctgccagccctgtgcctgcaacaacaacattgatgtgacagatcctgagagctgcagccgggtgactggagagtgcctgcgctgcctgcacaacacccagggcgccaactgccagctgtgcaagccaggccactacggcagcgccctgaaccagacctgccgccgctgcagctgccacgccagcggcgtgagccccatggagtgccccccaggcggcggggcctgcctgtgtgaccctgtgactggagcctgcccctgcctgcccaacgtgacaggcctggcctgtgacagatgtgctgatggctactggaacctggtgcccggccggggctgccagagctgtgactgtgaccccaggaccagccagagcagccactgtgaccagctgaccggccagtgcccctgcaagctgggctatggaggcaagcgctgcagcgagtgccaggagaactactacggggaccccccaggccgctgcatcccctgtgactgcaacagagctggcacccagaagcccatctgtgaccctgacaccggcatgtgccgctgccgggagggcgtgtctggccagagatgtgacagatgtgcccggggccacagccaggagttccccacctgcctgcagtgccacctgtgctttgaccagtgggaccacaccatcagcagcctgagcaaggctgtgcagggcctgatgaggctggccgccaacatggaggacaagcgggagaccctgcctgtgtgtgaggccgacttcaaggacctgcggggaaatgtgtctgaaattgagcgcatcctgaagcaccctgtgttccccagcggcaagttcctgaaggtgaaggactaccatgacagcgtgcggcggcagatcatgcagctgaatgagcagctgaaggctgtgtatgagttccaggacctgaaggacaccatcgagcgggccaagaatgaggccgacctgctgctggaggacctgcaggaggagattgacctgcagagctctgtgctgaatgccagcattgctgacagcagcgagaacatcaagaagtactaccacatcagcagcagcgctgagaagaagatcaatgagaccagcagcaccatcaacaccagcgccaacaccagaaatgacctgctgaccatcctggacaccctgaccagcaagggcaacctgagcctggagcggctgaagcagatcaagatcccagacatccagatcctgaatgagaaggtgtgtggggaccctggaaatgtgccctgtgtgcccctgccctgtggcggggccctgtgcaccggcaggaagggccacaggaagtgccggggccctggctgccacggcagcctgaccctgagcaccaatgccctgcagaaggcccaggaggccaagagcatcatccggaacctggacaagcaggtgcggggcctgaagaaccagatcgagagcatcagcgagcaggccgaggtgtccaagaacaatgccctgcagctgcgggagaagctgggcaacatccggaaccagagcgacagcgaggaggagaacatcaacctcttcatcaagaaggtgaagaacttcctgctggaggagaatgtgcccccagaagatattgagaaggtggccaacggggtgctggacatccacctgcccatccccagccagaacctgacagatgagctggtgaagatccagaagcacatgcagctgtgtgaggactacagaacagatgaaaatcggctgaatgaggaggctgatggagcccagaagctgctggtgaaggccaaggctgctgagaaggccgccaacatcctgctgaacctggacaagaccctgaaccagctgcagcaggcccagatcacccagggccgggccaacagcaccatcacccagctgacagccaacatcaccaagatcaagaagaatgtgctgcaggccgagaaccagacccgggagatgaagtctgagctggagctggccaagcagaggagcggcctggaggatggcctgagcctgctgcagaccaagctgcagaggcaccaggaccatgctgtgaatgccaaggtgcaggccgagagcgcccagcaccaggccggcagcctggagaaggagtttgtggagctgaagaagcagtatgccatcctgcagaggaagaccagcaccaccggcctgaccaaggagaccctgggcaaggtgaagcagctgaaggatgctgctgagaagctggccggggacacagaggccaagatccgccgcatcaccggctgcttccagaacagcgccaggtag

SEQ ID NO: 7629 - DNA, 5286 bp, synthetic construct
  misc_feature 1..5286: note = source = /note="Description of Artificial Sequence: Synthetic coding sequence"
  source 1..5286: mol_type = other DNA
atgcagttccagctgaccctcttcctgcacctgggctggctgagctacagcaaggcccaggatgactgcaacagaggagcctgccaccccaccaccggggacctgctggtgggcaggaacacccagctgatggccagcagcacctgtggcctgagccgggcccagaagtactgcatcctgagctacctggagggggagcagaagtgcttcatctgtgacagccgcttcccctatgacccctatgaccagcccaacagccacaccattgaaaatgtgattgtgtcctttgagccagaccgggagaagaagtggtggcagagtgaaaatggcctggaccacgtgtccatccggctggacctggaggccctcttccgcttcagccacctgatcctgaccttcaagaccttccggcctgctgccatgctggtggagaggagcacagattatggccacaactggaaggtgttcaagtactttgccaaggactgtgccaccagcttccccaacatcaccagcggccaggcccagggcgtgggggacatcgtgtgtgacagcaagtacagcgacatcgagcccagcactggaggagaggtggtgctgaaggtgctggaccccagctttgaaattgagaacccctacagcccctacatccaggacctggtgaccctgaccaacctgcgcatcaacttcaccaagctgcacaccctgggagatgccctgctgggccggcggcagaatgacagcctggacaagtactactatgccctgtatgagatgattgtgcggggcagctgcttctgcaatggccacgcctctgaatgtcggcccatgcagaagatgagaggagatgtgttcagccccccaggcatggtgcacggccagtgtgtgtgccagcacaacacagatggccccaactgtgagcgctgcaaggacttcttccaggatgccccctggaggcctgctgctgacctgcaggacaatgcctgccgcagctgcagctgcaacagccacagcagccgctgccactttgacatgaccacctacctggccagcggcggcctgtctggaggagtgtgtgaggactgccagcacaacacagagggccagcactgtgaccgctgccggcccctcttctacagagaccccctgaagaccatcagtgacccctatgcctgcatcccctgtgaatgtgaccctgatggcaccatcagcggcggcatctgtgtgagccacagcgaccctgccctgggctctgtggccggccagtgcctgtgcaaggaaaatgtggagggcgccaagtgtgaccagtgcaagcccaaccactacggcctgagcgccacagaccccctgggctgccagccctgtgactgcaaccccctgggcagcctgcccttcctgacctgtgatgtggacaccggccagtgcctgtgcctgtcctatgtgactggagcccactgtgaggagtgcaccgtgggctactggggcctgggcaaccacctgcacggctgcagcccctgtgactgtgacatcggcggggcctacagcaatgtgtgcagccccaagaatggccagtgtgagtgccggccccacgtgacaggccgcagctgcagcgagcccgcccctggctacttctttgcccccctgaacttctacctgtatgaagctgaggaggccaccaccctgcagggcctggcccccctgggcagcgagaccttcggccagagccctgctgtgcacgtggtgctgggggagcctgtgcccggcaaccctgtgacctggacaggccctggctttgcccgggtgctgcctggagctggcctgcgctttgctgtgaacaacatccccttccctgtggacttcaccatcgccatccactatgagacccagagcgctgctgactggacagtgcagatcgtggtgaaccccccaggcggcagcgagcactgcatccccaagaccctgcagagcaagccccagagctttgccctgcctgctgccacccgcatcatgctgctgcccacccccatctgcctggagccagatgtgcagtacagcattgatgtgtacttcagccagcccctgcagggcgagagccacgcccacagccacgtgctggtggacagcctgggcctcatcccccagatcaacagcctggagaacttctgcagcaagcaggacctggatgagtaccagctgcacaactgtgtggagatcgccagcgccatgggcccccaggtgctgcccggggcctgtgagcggctcatcatctccatgtctgccaagctgcatgatggagctgtggcctgcaagtgccacccccagggctctgtgggcagcagctgcagccggctgggcggccagtgccagtgcaagcccctggtggtgggccgctgctgtgaccgctgcagcacaggcagctatgacctgggccaccacggctgccacccctgccactgccacccccagggcagcaaggacacagtgtgtgaccaggtgacaggccagtgcccctgccacggggaggtgtctggaagaagatgtgaccgctgcctggccggctacttcggcttccccagctgccacccctgcccctgcaacagatttgctgagctgtgtgaccctgagaccggcagctgcttcaactgtggcggcttcaccactggaagaaactgtgagcgctgcattgatggctactacggcaaccccagcagcggccagccctgccggccctgcctgtgcccagatgaccccagcagcaaccagtactttgcccacagctgctaccagaacctgtggagcagtgatgtgatctgcaactgcctgcagggctacacaggcacccagtgtggagaatgttccacaggcttctacggcaacccccgcatcagcggggccccctgccagccctgtgcctgcaacaacaacattgatgtgacagatcctgagagctgcagccgggtgactggagagtgcctgcgctgcctgcacaacacccagggcgccaactgccagctgtgcaagccaggccactacggcagcgccctgaaccagacctgccgccgctgcagctgccacgccagcggcgtgagccccatggagtgccccccaggcggcggggcctgcctgtgtgaccctgtgactggagcctgcccctgcctgcccaacgtgacaggcctggcctgtgacagatgtgctgatggctactggaacctggtgcccggccggggctgccagagctgtgactgtgaccccaggaccagccagagcagccactgtgaccagctgaccggccagtgcccctgcaagctgggctatggaggcaagcgctgcagcgagtgccaggagaactactacggggaccccccaggccgctgcatcccctgtgactgcaacagagctggcacccagaagcccatctgtgaccctgacaccggcatgtgccgctgccgggagggcgtgtctggccagagatgtgacagatgtgcccggggccacagccaggagttccccacctgcctgcagtgccacctgtgctttgaccagtgggaccacaccatcagcagcctgagcaaggctgtgcagggcctgatgaggctggccgccaacatggaggacaagcgggagaccctgcctgtgtgtgaggccgacttcaaggacctgcggggaaatgtgtctgaaattgagcgcatcctgaagcaccctgtgttccccagcggcaagttcctgaaggtgaaggactaccatgacagcgtgcggcggcagatcatgcagctgaatgagcagctgaaggctgtgtatgagttccaggacctgaaggacaccatcgagcgggccaagaatgaggccgacctgctgctggaggacctgcaggaggagattgacctgcagagctctgtgctgaatgccagcattgctgacagcagcgagaacatcaagaagtactaccacatcagcagcagcgctgagaagaagatcaatgagaccagcagcaccatcaacaccagcgccaacaccagaaatgacctgctgaccatcctggacaccctgaccagcaagggcaacctgagcctggagcggctgaagcagatcaagatcccagacatccagatcctgaatgagaaggtgtgtggggaccctggaaatgtgccctgtgtgcccctgccctgtggcggggccctgtgcaccggcaggaagggccacaggaagtgccggggccctggctgccacggcagcctgaccctgagcaccaatgccctgcagaaggcccaggaggccaagagcatcatccggaacctggacaagcaggtgcggggcctgaagaaccagatcgagagcatcagcgagcaggccgaggtgtccaagaacaatgccctgcagctgcgggagaagctgggcaacatccggaaccagagcgacagcgaggaggagaacatcaacctcttcatcaagaaggtgaagaacttcctgctggaggagaatgtgcccccagaagatattgagaaggtggccaacggggtgctggacatccacctgcccatccccagccagaacctgacagatgagctggtgaagatccagaagcacatgcagctgtgtgaggactacagaacagatgaaaatcggctgaatgaggaggctgatggagcccagaagctgctggtgaaggccaaggctgctgagaaggccgccaacatcctgctgaacctggacaagaccctgaaccagctgcagcaggcccagatcacccagggccgggccaacagcaccatcacccagctgacagccaacatcaccaagatcaagaagaatgtgctgcaggccgagaaccagacccgggagatgaagtctgagctggagctggccaagcagaggagcggcctggaggatggcctgagcctgctgcagaccaagctgcagaggcaccaggaccatgctgtgaatgccaaggtgcaggccgagagcgcccagcaccaggccggcagcctggagaaggagtttgtggagctgaagaagcagtatgccatcctgcagaggaagaccagcaccaccggcctgaccaaggagaccctgggcaaggtgaagcagctgaaggatgctgctgagaagctggccggggacacagaggccaagatccgccgcatcacagacctggagaggaagatccaggacctgaacctgagccggcaggccaaggctgaccagctgcgcatcctggaggaccaggtggtggccatcaagaatgaaattgtggagcaggagaagaagtatgcccgctgctacagctag

SEQ ID NO: 7630 - DNA, 1455 bp, synthetic construct
  misc_feature 1..1455: note = source = /note="Description of Artificial Sequence: Synthetic coding sequence"
  source 1..1455: mol_type = other DNA
atgggcgctgaggccctgcccggcccagatgaggccgctgctgctgctgcctttgctgaggtgaccaccgtgacagtggccaacgtgggcgctgctgctgacaacgtgttcaccacctctgtggccaatgctgccagcatcagcggccacgtgctgagcggccgcacagccctgcagatcggggacagcctgaacacagagaaggccaccctcatcgtggtgcacacagatggcagcatcgtggagaccaccggcctgaagggccctgctgcccccctgaccccaggcccccagagcccccccacccccctggcccctggccaggagaagggcggcaccaagtacaactgggaccccagcgtgtatgacagcgagctgcctgtgcgctgcaggaacatcagcggcaccctgtacaagaaccggctgggcagcggcggccggggccgctgcatcaagcagggcgagaactggtacagccccacagaatttgaggccatggccggccgggccagcagcaaggactggaagaggagcatccgctatgccggccggcccctgcagtgcctgatccaggacggcatcctgaacccccatgctgccagctgcacctgtgccgcctgctgtgatgacatgaccctgagcggccctgtgcggctgtttgtgccctacaagaggaggaagaaggaaaatgagctgcccaccacccctgtgaagaaggacagccccaagaacatcaccctgctgcctgccacagctgccaccaccttcaccgtgaccccatctggccagatcaccaccagcggggccctgacctttgaccgggccagcacagtggaggccacagctgtgatcagcgagagccctgcccagggagatgtgtttgctggggccaccgtgcaggaggcctctgtgcagcccccctgccgggccagccaccctgagccccactacccaggctaccaggacagctgccagatcgcccccttccctgaggccgccctgcccaccagccaccccaagatcgtgctgaccagcctgcctgccctggccgtgcccccacccacccccaccaaggccgcccccccagccctggtgaatggcctggagctgtctgagcccaggtcctggctgtacctggaggagatggtgaacagcctgctgaacacagcccagcagctgaagaccctgtttgagcaggccaagcacgccagcacctaccgggaggccgccaccaaccaggccaagatccacgcagatgctgagaggaaggagcagagctgtgtgaactgtggccgggaggccatgtctgaatgtacaggctgccacaaggtgaactactgcagcaccttctgccagaggaagcgctggagcctgaccatgctgaccagcctggtgtccatctcctggctgcgggccatcctgccctgccagccccccaaggtgctgggcctgtag

SEQ ID NO: 7631 - DNA, 1512 bp, synthetic construct
  misc_feature 1..1512: note = source = /note="Description of Artificial Sequence: Synthetic coding sequence"
  source 1..1512: mol_type = other DNA
atgtctggggccctgctgtggcccctgctgcccctgctgctgctgctgctgagcgccagagatggagtgcgggccgcccagccccaggcccctggctacctgattgctgcccccagcgtcttccgggccggcgtggaggaggtgatctctgtgaccatcttcaacagcccccgggaggtgacagtgcaggcccagctggtggcccagggcgagcctgtggtgcagagccagggcgccatcctggacaagggcaccatcaagctgaaggtgcccaccggcctgcggggccaggccctgctgaaggtgtggggccggggctggcaggccgaggagggccccctcttccacaaccagacctctgtgacagtggatggccgcggggcctctgtgttcatccagacagacaagcctgtgtaccggccccagcaccgggtgctgatcagcatcttcaccgtgagccccaacctgcggcctgtgaatgagaagctggaggcctacatcctggacccccggggcagcaggatgattgagtggaggcacctgaagcccttctgctgcggcatcaccaacatgtccttccccctgagtgaccagcctgtgctgggggagtggttcatctttgtggagatgcagggccacgcctacaacaagagctttgaggtgcagaagtatgtgctgcccaagtttgagctgctgattgatcctccccgctacatccaggacctggatgcctgtgaaacaggaacagtgcgggcccgctacaccttcggcaagcctgtggccggggccctgatgatcaacatgacagtgaatggagtgggctactacagccatgaggtgggccggcctgtgctgcggaccaccaagatcctgggcagccgggactttgacatctgtgtgcgggacatgatcccagcagatgtgcctgagcacttccggggccgggtgtccatctgggccatggtgacctctgtggatggcagccagcaggtggcctttgatgacagcacccctgtgcagaggcagctggtggacatccgctacagcaaggacaccaggaagcagttcaagccaggcctggcctacgtgggcaaggtggagctgagctacccagatggcagccctgctgagggcgtgacagtgcagatcaaggccgagctgacccccaaggacaacatctacaccagcgaggtggtgtcccagaggggcctggtgggctttgagatccccagcatccccaccagcgcccagcacgtgtggctggaggtgttccaggagctggaggactatgatgtgtctgacagctttggagtgtccagagaagatggccccttctggtgggccggcctgacagcccagaggagaagaagaagctctgtgttcccctggccctggggcatcaccaaggacagcggctttgccttcaccgtgagaagaggaaatggaactggaggagatgaccggcccagcgagcctgagcccccagctggccgctggcccctgcacaggtag

SEQ ID NO: 7632 - DNA, 144 bp, synthetic construct
  misc_feature 1..144: note = source = /note="Description of Artificial Sequence: Synthetic coding sequence"
  source 1..144: mol_type = other DNA
atgaagctgtgtgtgacagtgctgagcctgctggtgctggtggccgccttctgcagcctggccctgagcgcccccaaggccagcaagagcgccctgacccctgtgtccccaggcagccgcagcacctgcatgacctggaactag

SEQ ID NO: 7633 - DNA, 861 bp, synthetic construct
  misc_feature 1..861: note = source = /note="Description of Artificial Sequence: Synthetic coding sequence"
  source 1..861: mol_type = other DNA
atggaggtgtacatccgccacctggagaaggtgctgcggcgctacgtgcagaggctgcagtggctgctgagcggccctgtgctgtgcagcaggacctggtaccggcagagcatggacagaggagtgatgatgacagctgccagcggcagcagaagactctttggcaccgtgctggagagcaaggtgtgcatcctgctggacaccagcggctccatgggcccctacctgcagcaggtgaagacagagctggtgctgctgatctgggagcagctgaggaagtgctgtgacagcttcaacctgctgagctttgctgagagcttccagagctggcaggacaccctggtggagaccacagatgctgcctgccacgaggccatgcagtgggtgacccacctgcaggcccagggcagcaccagcatcctgcaggccctgctgaaggccttctccttccatgacctggagggcctgtacctgctgacagatggcaagccagacaccagctgcagcctggtgctgaatgaggtgcagaagctgcgggagaagagagatgtgaaggtgcacaccatcagcctgaactgcagcgacagagctgctgtggagttcctgaggaagctggccagcttcaccggcggccgctaccactgccctgtgggggaggacaccctgagcaagatccacagcctgctgaccaagggcttcatcaatgagaaggaccccaccctgcccccatttgaaggagatgacctgcgcatcctggcccaggagatcaccaaggcccgctccttcctgtggcaggcccagagcttccgcagccagctgcagaagaagaatgatgctgagcccaaggtgaccctgtcctag

SEQ ID NO: 7634 - DNA, 3555 bp, synthetic construct
  misc_feature 1..3555: note = source = /note="Description of Artificial Sequence: Synthetic coding sequence"
  source 1..3555: mol_type = other DNA
atgaagaagtacaggaagatcagcatcggctgctttgccatggccacccagaccagccacgtgttccacggccaggagaacatgttcctggagaaccactgcatcagaagaaacacaggccgggacagcaagaagcccctgaagcagaagaacatgaatggcctgggccagaacagcgacaatggcctgctggtgacccacgtgaaccagacccaggacctgctgcggctgcagggcagcgagacccagagcagtgactgggaggacagcgaggactggctgagcgcccacagcctgaagtgccagaagctgaccctggccgacctgatcagccagggcacagaggtgctggaggagggcaccaacgtggtgcagaagatctgcttcagcacccagatcatccgccactttgagagcaagctgagtgacaccatcgaggtgtaccaggagcgcatccagtggctgacagagaacagcaagaaggccttcggcctcatcaagggggcccgggtgtccatcctgattgatgtgtctgccatcagcagcggcccccagaaggaggagttccagaaggacctgatgagcctgattgatgagcagctgagccacaaggagaagctgtttgtgctgagctttggcaccaatgccggcagcctgtggccagaccccatggaggtgtctgccagcaccctgcaggagctgaagctgtgggtgaagaccctgcagccagatggcggcagcaacctgctgcaggccctgaagaagatcttcaccctgaagggcctggacagcctggtggccatcatgaggagctgcccagaccagcccagcgagatcctgagtgactacatccagcagagcaccatgggccgggacctgatcatccacttcatcacctaccgctgtgatgaccagatgcctcctgctgtgctgaagaacctggccgaggccgtgcggggctactaccactgctacagccccaagatggagcactacaccagccgggacatggatgagctgctggccgagatccagaaggcccagagcctgctgagccacgtgcaggccctgcagcacagcagcccctgtgaggccctgacctgcaccatggaggagatcagcacagagatcaccaacggccccctcatcagcctgctgcccaagccacccaagcatgatgcccccctgaccatcgagttccccaacctggacaagaccagcgctgagtggctgaaggtgaatggcctgaaggccaagaagctgagcctgtaccaggtgctggccccaaatgccttcagccctgtggaggagtttgtgcccatcctgcagaagacagtgagcagcaccatccacgagaaggccatgatccagtttgagtggcatgatggcaccgtgaagaacatccacgtggacccccccttcctgtacaagtaccagcagcagctgagccgggccatgaggatgtatgaaagaagaattgagtggctgagcctggccagccgccgcatctggggcaccgtgtgtgagaagagggtggtggtgctgctggacatcagcgccaccaacagcatgtacatcatccacatccagcacagcctgcggctgctgctggaggagcagctgagcaacaaggactgcttcaacctgattgccttcggcagcaccatcgagagctggaggcctgagatggtgcctgtgagccacaacaacctgcagagcgcctggcgctgggccctgaacctgcgctgccggggcagcagaaatgtgctgagcgccctgaggaaggctgtggaggtggacttcaaggacaaggacaagcaccagagccagggcatctacctgttcaccggcggcatcccagaccaggacatgcccaccctgagcgcctacatggccgaggcctgtggcggctgtgacctgcagctgaatgtgtgcctcttctacgtgggggagcccaagatggacaccaccccaccagcccgctatgccagccacacagacacagctgctgcctacaaggaggtgaccagggctgctgggggccgcttccactggtttggagacaccggcatctatgaaagtgatgacatcaacagcatcatgtctgagatggagaaggccctgaactacagccagaagtgtgccttcctgatggccagcctgaagaaccacagcggcaaggtgctgggcagcagcgccctgcccaaggagaagcccaagaccctgcagctgcggagccagcccaagaagctgtgccccccccggcccaccgtgcccctgggcgccaggatgagcatcaaggatgatcctgaccgggagaagagcccccccctgaagagcctgaagtggaggcccctgagcagccgggtgggcatcagccctgctgctgcccagcccaccaaggagggcatgatggagctgcggaggaagaccaagagccgggaggccgagaccagcctgctgctcttctacacagagaagggaaatgatgtgggctctgtgtacaagaagtacccccagggccggggcctgcggaggaccagcagcagcattgacctgcccaggaaggacacagtgtgcagcagccaggagtgggtggccaagtatggcctgaagaagctgaagctggagatcagccgctgcatgggccccaactgcacccaccagaagagcggccagaggtctgccagcgccaagcactgcagcatcttccccagcgtggagatccacggcgtggtgcgccacatccagtggaccccccgggagatggaggtgtacatccgccacctggagaaggtgctgcggcgctacgtgcagaggctgcagtggctgctgagcggcagcagaagactctttggcaccgtgctggagagcaaggtgtgcatcctgctggacaccagcggctccatgggcccctacctgcagcaggtgaagacagagctggtgctgctgatctgggagcagctgaggaagtgctgtgacagcttcaacctgctgagctttgctgagagcttccagagctggcaggacaccctggtggagaccacagatgctgcctgccacgaggccatgcagtgggtgacccacctgcaggcccagggcagcaccagcatcctgcaggccctgctgaaggccttctccttccatgacctggagggcctgtacctgctgacagatggcaagccagacaccagctgcagcctggtgctgaatgaggtgcagaagctgcgggagaagagagatgtgaaggtgcacaccatcagcctgaactgcagcgacagagctgctgtggagttcctgaggaagctggccagcttcaccggcggccgctaccactgccctgtgggggaggacaccctgagcaagatccacagcctgctgaccaagggcttcatcaatgagaaggaccccaccctgcccccatttgaaggagatgacctgcgcatcctggcccaggagatcaccaaggcccgctccttcctgtggcaggcccagagcttccgcagccagctgcagaagaagaatgatgctgagcccaaggtgaccctgtcctag

SEQ ID NO: 7635 - DNA, 906 bp, synthetic construct; identical to SEQ ID NO: 6929
  misc_feature 1..906: note = source = /note="Description of Artificial Sequence: Synthetic coding sequence"
  source 1..906: mol_type = other DNA

SEQ ID NO: 7636 - DNA, 4722 bp, synthetic construct
  misc_feature 1..4722: note = source = /note="Description of Artificial Sequence: Synthetic coding sequence"
  source 1..4722: mol_type = other DNA
atgagggtgctggcctgcctgctggccgccctggtgggcatccaggccgtggagcggctgcggctggctgatggcccccacggctgtgccggccgcctggaggtgtggcatggaggccgctggggcaccgtgtgtgatgatggctgggacctgagagatgctgctgtggcctgccggcagctgggctgcggcggggccctggccgcccctgggggcgccttctttggagagggcgccggccctgtgtggctgtctgagctggcctgcagaggaaatgaaggccagctgggcctgtgccaccaccggggctggaaggcccacatctgcagccatgaagaagatgctggggtggtgtgtgccggccagagggtggccaacagcagagatgacagcaccagccccctggatggagccccctggccaggcctgctgctggagctgagccccagcacagaggagcccctggtgacccacgcccccaggcctgctggcaacccccagaatgccagcaggaagaagagcccccggcccaagcaggccaagagcacccgggcccccctgctgaccaccggggccccccggcaggagcggctgcggctggtgtctggcccccaccgctgtgccggccgcctggaggtgtggcatggaggccgctggggcaccgtgtgtgatgatggctgggacctgagagatgctgctgtggcctgccgggagctgggctgcggcggggccctggccgcccctgggggcgccaggtttggacctggagctggccctgtgtggatggatgatgtgggctgcggcggcggggagcaggccctgcgggactgccccaggagcccctggggccgcagcaactgtgaccacagtgaagatgctggcctggtgtgcaccggccctgccccccggctgcggctggctgatggcccccacggctgtgccggccgcctggaggtgtggcatggaggccgctggggctctgtgtgtgatgatgcctgggacctgagagatgctgctgtggcctgccgggagctgggctgcggcggggccctggccgcccctgggggcgccttctttggagagggcagcggccccatcatcctggatgacctgcgctgcagaggaaatgaaacagccctgcgcttctgcccagcccggccctggggccagcacgactgccaccacagagaagatgctggagctgtgtgtgatggcatgcccctgggctacgtgcccccaacagcccccacagacagcaacaacagcaccccccgggaggccgccagcaggcctcccagcaccatgaccagccaggcccctggaacagctggggtgtccccacctccagccagccccaccgtgctgtgggagcccggccctgaggccggcagcccccagctgcggctggtggccggccccagcaaatgttctggccgcctggaggtgtggcatgaccagcgctggggcaccgtgtgtgatgacagctgggacatgagggacagcgctgtggtgtgccgggagctgggctgcggcggcccccagcagcctgaccctgctgctggccgcttcggctggggcgccggccccatctggctggatgatgtgggctgtgtgggcacagaggccagcctgagtgactgcccagctgccccctggggcaagcacaactgtgcccacaatgaagatgtgggcgtgacctgcaccggccccccaggcctggacagcatcagtgaccccttctcctggagctggatccctggcctgggccgggacagagatgcctggctgcctggagagctggccaccaagcccagcgcctctgtgacagcctctgtgctggagaagaccaccaccaaggcccctgggaagatgcccaagagcaccaagaagtgggtgaccaagaatgccaagaggcccaccacccagccccctgtgatgcccaccaccaagcacagccgggcccagagccccccagacctgaccagccagaccacagctgccctgaccacagaggccagccggcggcccaccagcgagttcacccggcggcccaccacagaggccccccagcgctggaccagccacaccacagccaccctgaccccccaggccccccgggagaggaccaccaagaccatggccatgctgaccacccagggcccccaggagatgaccagcgagagcaccatcaagagcatcccccaggccagcctggagcccagcgctgagatccctgagggcagccctgagagccccaaggaccctgcccccagccccagcgtgtccaccaccggggagagcggcctcttccgggtgcggctggctgatggccccaacagatgtgccggccgcctggaggtgtggcacgccggccgctggggcaccgtgtgtgatgacaactgggacctgagagatgccaccgtggcctgctgggagctgggctgcggcaaggtgcggccccgggtgggcaagacccactacggccctggcaccggccccatctggctggatgacatgggctgcaagggcagcgaggccagcctgagtgactgccccagcggggcctggggcaagcacaactgtgaccatgaagaagatgtgggcctgacctgcaccggctacacagattatgatgactacccaccctggacctgggaccccaccagccgggaggacctggccaagggcaccaccacagctggggtgcccggccacaccctgccctggaggaccaccaggaggcctggcagcagcagccctgccatccggcggctgcctgacaccggcagcaaggatggctacaagctgccctggacctgggacacccccagcggccggggcctggccgagggcacccccacagctgggaagctgggccccaccctgggcgccggcaccaccaggagccctggcagcccccccaccctgcgggtgcatggagacaccggcagccccaggaagccctggccagagcggcggccccccaggcctgctgccaccaggacagccccacccacccccagccctggccccagcgccagccctggccccccaggccctgccctgaccagtgacagcagccgggagctgaccccccacagcgccctgaccagcgaggccaccagtgatgccccagacaccagcccccccaccccagaccctgccagcaggaccaacccagacctgatcctgaccagcccagactttgccctgagcaccccagacagctctgtggtgcctgccctgaccccagagcccagccccacccccctgcccaccctgcccaaggagctgaccagtgaccccagcacccccagcgaggtgaccagcctgagccccaccagcgagcaggtgcctgagagtgacaccaccccagacctggacaccaccccctacagcagcacagtgtctgagtacagccgcagcccagaccccagccccagcccccaccccaccaccaccccagaccccaccatggccccagaccccatcaccaccctgaaccccaccgtgaccccccacttccccaccaccccccaccccaccaccaccccccaccccaccaccatcacccacagcaccatgatcccagaccccaccaccaccccccagcccttcaccaccatcacccacagcaccatgatcccagaccccaccaccaccccccagcccttcaccaccatgcagcccaccaccaccccccacagcaccaccccccaccccaccaccaccccccaccccaccaccatcacccacagcaccatgatcccagaccccaccaccaccccccagcccttcaccaccatgcagcccaccaccatgccccaccccaccaccaccccccaccccaccaccaccccccaccccaccaccaccccccaccccaccaccaccccccaccccaccatgaccccagaccccaccaccaccccctaccccaccaccaccccagaccccaccaccaccccccaccccaccaccccagaccccagcagcacccctgtgatcaccaccgtgtccctgcccaccagcctgggcacagagctgagcagccccaccctggcccccaccgtgaagcccagcctgcacccccagctgaccttcaccgccccagccccccacaccagcaccagccagatccccaccctggagcccagccctgccctggagagcagccccagccgcagcagcacagccacctccatggaccccctgagcacagaggacttcaagccacccaggagccagagccccaacctgaccccaccacccacccacaccccccacagcgccagtgacctgactgtgtccccagaccccctgctgagccccacagcccaccccctggaccacccccccctggaccccctgaccctgggccccaccccaggccagagccctggcccccacggcccctgtgtggcccccaccccacctgtgcgggtgatggcctgtgagcccccagccctggtggagctggtggccgctgtgagagatgtgggcggccagctgcagaggctgacccaggtggtggagcaggagcggcaggagcggcaggccctgctgctgggcctgacccagctggtggaggccgcccggggcctgggccagctgggggaggccgtgaagaggctggccgagatggcctggaccacctccatgcctgcccccaccaccaccaccccagaggaggaggagcggcccctgcggggagatgtgtag

SEQ ID NO: 7637 - DNA, 1911 bp, synthetic construct; identical to SEQ ID NO: 7237
  misc_feature 1..1911: note = source = /note="Description of Artificial Sequence: Synthetic coding sequence"
  source 1..1911: mol_type = other DNA

SEQ ID NO: 7638 - DNA, 2037 bp, synthetic construct
  misc_feature 1..2037: note = source = /note="Description of Artificial Sequence: Synthetic coding sequence"
  source 1..2037: mol_type = other DNA
atgaggacagtggtgctgaccatgaaggcctctgtgattgagatgttcctggtgctgctggtgactggagtgcacagcaacaaggagacagccaagaagatcaagaggcccaagttcaccgtgccccagatcaactgtgatgtgaaggccggcaagatcatcgaccctgagttcatcgtgaagtgcccagctggctgccaggaccccaagtaccacgtgtatggaacagatgtgtatgccagctacagctctgtgtgtggggctgctgtgcacagcggcgtgctggacaacagcggcggcaagatcctggtgaggaaggtggccggccagagcggctacaagggcagctacagcaatggagtgcagagcctgagcctgccccgctggagggagagcttcatcgtgctggagagcaagcccaagaagggcgtgacctaccccagcgccctgacctacagcagcagcaagagccctgctgcccaggccggggagaccaccaaggcctaccagaggcctcccatccctggcaccacagcccagcctgtgaccctgatgcagctgctggccgtgacagtggccgtggccacccccaccaccctgccccggcccagccccagcgctgccagcaccaccagcatcccccggccccagagcgtgggccacaggagccaggagatggacctgtggagcacagccacctacaccagcagccagaaccggcccagggctgaccccggcatccagaggcaggaccccagcggggccgccttccagaagcctgtgggcgcagatgtgtccctgggcctggtgcccaaggaggagctgagcacccagagcctggagcctgtgtccctgggggaccccaactgcaagattgacctgtccttcctgattgatggcagcaccagcatcggcaagaggcgcttccgcatccagaagcagctgctggctgatgtggcccaggccctggacatcggccctgctggccccctgatgggcgtggtgcagtatggagacaacccagccacccacttcaacctgaagacccacaccaacagccgggacctgaagacagccatcgagaagatcacccagagaggaggcctgagcaatgtgggccgggccatcagctttgtgaccaagaacttcttcagcaaggccaacggcaacagaagtggggcccccaacgtggtggtggtgatggtggatggctggcccacagacaaggtggaggaggccagccggctggcccgggagagcggcatcaacatcttcttcatcaccattgaaggagctgctgaaaatgagaagcagtatgtggtggagcccaactttgccaacaaggctgtgtgcaggaccaacggcttctacagcctgcacgtgcagagctggtttggcctgcacaagaccctgcagcccctggtgaagagggtgtgtgacacagaccggctggcctgcagcaagacctgcctgaacagcgctgacatcggctttgtgattgatggcagcagctctgtgggcaccggcaacttcagaacagtgctgcagtttgtgaccaacctgaccaaggagtttgagatcagtgacacagacacccgcatcggggctgtgcagtacacctatgagcagaggctggagtttggatttgacaagtacagcagcaagccagacatcctgaatgccatcaagagggtgggctactggagcggcggcaccagcactggagctgccatcaactttgccctggagcagctgttcaagaagagcaagcccaacaagaggaagctgatgatcctgatcacagatggccgctcctatgatgatgtgcgcatcccagccatggccgcccacctgaagggcgtcatcacctacgccatcggcgtggcctgggccgcccaggaggagctggaggtgattgccacccacccagcccgggaccacagcttctttgtggatgaatttgacaacctgcaccagtatgtgccccgcatcatccagaacatctgcacagagttcaacagccagcccagaaattag

SEQ ID NO: 7639 - DNA, 324 bp, synthetic construct
  misc_feature 1..324: note = source = /note="Description of Artificial Sequence: Synthetic coding sequence"
  source 1..324: mol_type = other DNA
tgaacagtggccgcccccagcgtcttcatcttccccccatctgatgagcagctgaagagcggcacagcctctgtggtgtgcctgctgaacaacttctacccccgggaggccaaggtgcagtggaaggtggacaatgccctgcagagcggcaacagccaggagagcgtgacagagcaggacagcaaggacagcacctacagcctgagcagcaccctgaccctgagcaaggctgactatgagaagcacaaggtgtatgcctgtgaggtgacccaccagggcctgagcagccctgtgaccaagagcttcaacagaggagagtgctag

SEQ ID NO: 7640 - DNA, 366 bp, synthetic construct
  misc_feature 1..366: note = source = /note="Description of Artificial Sequence: Synthetic coding sequence"
  source 1..366: mol_type = other DNA
atggtgctgcagacccaggtgttcatcagcctgctgctgtggatcagcggggcctatggagacatcgtgatgacccagagcccagacagcctggccgtgtccctgggggagcgggccaccatcaactgcaagagcagccagagcgtgctgtacagcagcaacaacaagaactacctggcctggtaccagcagaagccaggccagccccccaagctgctgatctactgggccagcacccgggagagcggcgtgcctgaccgcttcagcggcagcggcagcggcacagacttcaccctgaccatcagcagcctgcaggctgaagatgtggccgtgtactactgccagcagtactacagcaccccctag

SEQ ID NO: 7641 - DNA, 984 bp, synthetic construct
  misc_feature 1..984: note = source = /note="Description of Artificial Sequence: Synthetic coding sequence"
  source 1..984: mol_type = other DNA
gccagcaccaagggccccagcgtcttccccctggccccctgcagccgcagcaccagcgagagcacagctgccctgggctgcctggtgaaggactacttccctgagcctgtgacagtgtcctggaacagcggggccctgaccagcggcgtgcacaccttccctgctgtgctgcagagcagcggcctgtacagcctgagctctgtggtgacagtgcccagcagcagcctgggcaccaagacctacacctgcaatgtggaccacaagcccagcaacaccaaggtggacaagagggtggagagcaaatatggccccccctgccccagctgcccagcccctgagttcctgggcggccccagcgtcttcctgttcccccccaagcccaaggacaccctgatgatcagcaggaccccagaggtgacctgtgtggtggtggatgtgtcccaggaggaccctgaggtgcagttcaactggtacgtggatggagtggaggtgcacaatgccaagaccaagccccgggaggagcagttcaacagcacctacagagtggtgtctgtgctgactgtgctgcaccaggactggctgaatggcaaggagtacaagtgcaaggtgagcaacaagggcctgcccagcagcattgagaagaccatcagcaaggccaagggccagccccgggagccccaggtgtacaccctgccccccagccaggaggagatgaccaagaaccaggtgtccctgacctgcctggtgaagggcttctaccccagcgacattgctgtggagtgggagagcaatggccagcctgagaacaactacaagaccaccccacctgtgctggacagtgatggcagcttcttcctgtacagccggctgactgtggacaagagccgctggcaggagggcaatgtgttcagctgcagcgtgatgcatgaggccctgcacaaccactacacccagaagagcctgagcctgagcctgggcaagtag

SEQ ID NO: 7642 - DNA, 981 bp, synthetic construct
  misc_feature 1..981: note = source = /note="Description of Artificial Sequence: Synthetic coding sequence"
  source 1..981: mol_type = other DNA
gccagcaccaagggccccagcgtcttccccctggccccctgcagccgcagcaccagcgagagcacagctgccctgggctgcctggtgaaggactacttccctgagcctgtgacagtgtcctggaacagcggggccctgaccagcggcgtgcacaccttccctgctgtgctgcagagcagcggcctgtacagcctgagctctgtggtgacagtgcccagcagcaactttggcacccagacctacacctgcaatgtggaccacaagcccagcaacaccaaggtggacaagacagtggagaggaagtgctgcgtggagtgccccccctgcccagcccctcctgtggccggccccagcgtcttcctgtttcctcccaagcccaaggacaccctgatgatcagcaggaccccagaggtgacctgtgtggtggtggatgtgtcccatgaggaccctgaggtgcagttcaactggtacgtggatggagtggaggtgcacaatgccaagaccaagccccgggaggagcagttcaacagcaccttccgggtggtgtctgtgctgactgtggtgcaccaggactggctgaatggcaaggagtacaagtgcaaggtgagcaacaagggcctgcctgcccccatcgagaagaccatcagcaagaccaagggccagccccgggagccccaggtgtacaccctgccccccagccgggaggagatgaccaagaaccaggtgtccctgacctgcctggtgaagggcttctaccccagcgacatctctgtggagtgggagagcaatggccagcctgagaacaactacaagaccaccccacccatgctggacagtgatggcagcttcttcctgtacagcaagctgactgtggacaagagccgctggcagcagggcaatgtgttcagctgcagcgtgatgcatgaggccctgcacaaccactacacccagaagagcctgagcctgagccctgggaagtag

SEQ ID NO: 7643 - DNA, 993 bp, synthetic construct
  misc_feature 1..993: note = source = /note="Description of Artificial Sequence: Synthetic coding sequence"
  source 1..993: mol_type = other DNA
gccagcaccaagggccccagcgtcttccccctggcccccagcagcaagagcaccagcggcggcacagctgccctgggctgcctggtgaaggactacttccctgagcctgtgacagtgtcctggaacagcggggccctgaccagcggcgtgcacaccttccctgctgtgctgcagagcagcggcctgtacagcctgagctctgtggtgacagtgcccagcagcagcctgggcacccagacctacatctgcaatgtgaaccacaagcccagcaacaccaaggtggacaagaaggtggagcccaagagctgtgacaagacccacacctgccccccctgcccagcccctgagctgctgggcggccccagcgtcttcctgtttcctcccaagcccaaggacaccctgatgatcagcaggaccccagaggtgacctgtgtggtggtggatgtgtcccatgaggaccctgaggtgaagttcaactggtacgtggatggagtggaggtgcacaatgccaagaccaagccccgggaggagcagtacaacagcacctacagagtggtgtctgtgctgactgtgctgcaccaggactggctgaatggcaaggagtacaagtgcaaggtgagcaacaaggccctgcctgcccccatcgagaagaccatcagcaaggccaagggccagccccgggagccccaggtgtacaccctgccccccagcagagatgagctgaccaagaaccaggtgtccctgacctgcctggtgaagggcttctaccccagcgacattgctgtggagtgggagagcaatggccagcctgagaacaactacaagaccaccccacctgtgctggacagtgatggcagcttcttcctgtacagcaagctgactgtggacaagagccgctggcagcagggcaatgtgttcagctgcagcgtgatgcatgaggccctgcacaaccactacacccagaagagcctgagcctgagccctgggaagtag

SEQ ID NO: 7644 - DNA, 651 bp, synthetic construct; identical to SEQ ID NO: 7159
  misc_feature 1..651: note = source = /note="Description of Artificial Sequence: Synthetic coding sequence"
  source 1..651: mol_type = other DNA

SEQ ID NO: 7645 - DNA, 762 bp, synthetic construct; identical to SEQ ID NO: 7063
  misc_feature 1..762: note = source = /note="Description of Artificial Sequence: Synthetic coding sequence"
  source 1..762: mol_type = other DNA

SEQ ID NO: 7646 - DNA, 468 bp, synthetic construct
  misc_feature 1..468: note = source = /note="Description of Artificial Sequence: Synthetic coding sequence"
  source 1..468: mol_type = other DNA
atgttccagaggctgctgctgctgctgctgctgtccatgggcggcacctgggccagcaaggagcccctgcggccccgctgccggcccatcaatgccaccctggccgtggagaaggagggctgccctgtgtgcatcaccgtgaacaccaccatctgtgccggctactgccccaccatgaccagggtgctgcagggcgtgctgcctgccctgccccaggtggtgtgcaactacagagatgtgcgctttgagagcatccggctgcccggctgcccccggggcgtgaaccctgtggtgtcctatgctgtggccctgagctgccagtgtgccctgtgccgccgcagcaccacagactgtggcggccccaaggaccaccccctgacctgtgatgacccccgcttccaggacagcagcagcagcaaggcccccccacccagcctgcccagccccagccggctgcccggcccctag

SEQ ID NO: 7647 - DNA, 1554 bp, synthetic construct
  misc_feature 1..1554: note = source = /note="Description of Artificial Sequence: Synthetic coding sequence"
  source 1..1554: mol_type = other DNA
atggctgtgtccaggaaggactggagcgccctgagcagcctggcccggcagaggaccctggaggatgaggaggagcaggagcgggagaggagaagaagacacaggaacctgagcagcaccacagatgatgaggccccccggctgagccagaatggagaccggcaggccagcgccagcgagcggctgcccagcgtggaggaggccgaggtgcccaagcccctgcccccagccagcaaggatgaagatgaggacatccagagcatcctgcggacccggcaggagcggcggcagaggcggcaggtggtggaggccgcccaggcccccatccaggagcggctggaggccgaggagggcaggaacagcctgagccctgtgcaggccacccagaagcccctggtgtccaagaaggagctggagatccccccaagaagaaggctgagccgggagcagaggggcccctgggccctggaggaggagagcctggtgggccgggagcctgaggagaggaagaagggcgtgcctgagaagagccctgtgctggagaagagctccatgcccaagaagacagcccctgagaagagcctggtgtctgacaagaccagcatcagcgagaaggtgctggccagcgagaagaccagcctgtctgagaagattgctgtgtctgagaagaggaacagcagcgagaagaagtctgtgctggagaagacctctgtgtctgagaagagcctggcccctggcatggccctgggcagcggccgccgcctggtgtctgagaaggccagcatctttgagaaggccctggccagcgagaagagccccacagcagatgccaagccagcccccaagagggccacagccagcgagcagcccctggcccaggagcccccagccagcggcggcagccctgccaccaccaaggagcagaggggccgggccctgcccgggaagaacctgcccagcctggccaagcagggcgccagtgaccccccaacagtggccagccggctgccccctgtgaccctgcaggtgaagatccccagcaaggaggaggaggccgacatgagcagccccacccagaggacctacagcagcagcctgaagaggagcagccccaggaccatctccttcaggatgaagcccaagaaggaaaattctgagaccaccctgaccaggtctgcctccatgaagctgcctgacaacacagtgaagctgggggagaagctggagcgctaccacacagccatccgccgctctgagagcgtgaagagccggggcctgccctgcacagagctgtttgtggcccctgtgggcgtggccagcaagaggcacctgtttgagaaggagctggccggccagagcagagctgagcccgccagcagcaggaaagaaaacctgcggctgagcggcgtggtgaccagccggctgaacctgtggatcagcaggacccaggagagcggggaccaggacccccaggaggcccagaaggccagcagcgccacagagaggacccagtggggccagaagagtgacagcagcctggatgctgaggtgtag

SEQ ID NO: 7648 - DNA, 270 bp, synthetic construct; identical to SEQ ID NO: 7123
  misc_feature 1..270: note = source = /note="Description of Artificial Sequence: Synthetic coding sequence"
  source 1..270: mol_type = other DNA

SEQ ID NO: 7649 - DNA, 1302 bp, synthetic construct
  misc_feature 1..1302: note = source = /note="Description of Artificial Sequence: Synthetic coding sequence"
  source 1..1302: mol_type = other DNA
atgggaaatgcctgctgggagctgtactgcctggagcacggcatccagccagatggccagatgcccagcgacaagaccatcggcggcggagatgacagcttcaccaccttcttctgtgaaacaggagctgggaagcacgtgcccagggctgtgtttgtggacctggagcccaccgtgattgatgagatcagaaatggcccctaccggcagctgttccaccctgagcagctgatcaccgggaaggaggatgctgccaacaactatgcccggggccactacaccatcggcaaggagatcatcgaccctgtgctggaccgcatcaggaagctgagtgaccagtgcaccggcctgcagggcttcctggtgttccacagctttggaggcggcaccggcagcggcttcaccagcctgctgatggagcggctgtctgtggactatggcaagaagagcaagctggagttcagcatctacccagccccccaggtgtccacagctgtggtggagccctacaacagcatcctgaccacccacaccaccctggagcacagcgactgtgccttcatggtggacaatgaggccatctatgacatctgcagaagaaacctggacatcgagcggcccacctacaccaacctgaacagactcatcagccagatcgtgagcagcatcacagccagcctgcgctttgatggagccctgaatgtggacctgacagagttccagaccaacctggtgccctacccccgcatccacttccccctggccacctacgcccctgtgatctctgctgagaaggcctaccacgagcagctgtctgtggccgagatcaccaatgcctgctttgagcccgccaaccagatggtgaagtgtgaccccaggcatggcaagtacatggcctgctgcctgctgtacagaggagatgtggtgcccaaggatgtgaatgctgccatcgccgccatcaagaccaagaggagcatccagtttgtggactggtgccccaccggcttcaaggtgggcatcaactaccagccccccaccgtggtgcctggaggagacctggccaaggtgcagagagctgtgtgcatgctgagcaacaccacagccatcgccgaggcctgggcccggctggaccacaagtttgacctgatgtatgccaagagggcctttgtgcactggtacgtgggggagggcatggaggagggggagttcagcgaggcccgggaggacatggccgccctggagaaggactatgaggaggtgggcatcgacagctatgaagatgaagatgaaggagaggagtag

SEQ ID NO: 7650 - DNA, 1965 bp, synthetic construct; identical to SEQ ID NO: 7022
  misc_feature 1..1965: note = source = /note="Description of Artificial Sequence: Synthetic coding sequence"
  source 1..1965: mol_type = other DNA

SEQ ID NO: 7651 - DNA, 1173 bp, synthetic construct
  misc_feature 1..1173: note = source = /note="Description of Artificial Sequence: Synthetic coding sequence"
  source 1..1173: mol_type = other DNA
atgaagttccagggccccctggcctgcctgctgctggccctgtgcctgggcagcggggaggccggccccctgcagagcggggaggagagcacaggcaccaacattggagaggccctgggccacggcctgggagatgccctgtctgagggcgtgggcaaggccatcggcaaggaggccggcggcgctgctggcagcaaggtgtctgaggccctgggccagggcacccgggaggccgtgggcactggagtgcggcaggtgcccggctttggagtggctgatgccctgggcaacagagtgggggaggccgcccacgccctgggcaacacaggccatgaaattggccggcaggccgaggatgtgatcagacatggagcagatgctgtgcggggctcctggcagggcgtgcccggccacaatggagcctgggagaccagcggcggccacggcatcttcggcagccagggcggcctgggcggccagggccagggcaaccctgggggcctgggcaccccctgggtgcacggctacccaggcaacagcgctggcagctttggcatgaacccccagggcgccccctggggccagggcggcaatggaggcccccccaactttggcaccaacacccagggcgctgtggcccagcccggctacggctctgtgcgggccagcaaccagaatgaaggctgcaccaaccccccaccttctggcagcggcggcggcagcagcaacagcggcggcggcagcggcagccagagcggcagcagcggcagcggcagcaatggagacaacaacaacggcagcagcagcggcggcagcagcagcggcagcagcagcggcggcagcagcggcggcagcagcggcggcagcagcggcaacagcggcggcagcagaggagacagcggcagcgagagctcctggggcagcagcacaggcagcagcagcggcaaccacggcggcagcggcggcggcaatggccacaagccaggctgtgagaagccaggaaatgaggcccggggcagcggggagagcggcatccagggcttccggggccagggcgtgagcagcaacatgaggaacagcgagaccagccctggcatgttcaactttgacaccttctggaagaacttcaagagcaagctgggcttcatcaactgggatgccatcaacaagtag

SEQ ID NO: 7652 - DNA, 846 bp, synthetic construct; identical to SEQ ID NO: 7230
  misc_feature 1..846: note = source = /note="Description of Artificial Sequence: Synthetic coding sequence"
  source 1..846: mol_type = other DNA

SEQ ID NO: 7653 - DNA, 876 bp, synthetic construct
  misc_feature 1..876: note = source = /note="Description of Artificial Sequence: Synthetic coding sequence"
  source 1..876: mol_type = other DNA
gtgctgagcgccagcggccctggcaggaagatgggcagccggggccagggcctgctgctggcctactgcctgctgctggcctttgccagcggcctggtgctgagccgggtgccccacgtgcagggcgagcagcaggagtgggagggcacagaggagctgcccagccccccagaccacgccgagagagctgaggagcagcacgagaagtaccggcccagccaggaccagggcctgcctgccagccgctgcctgcgctgctgtgaccccggcacctccatgtacccagccacagctgtgccccagatcaacatcaccatcctgaagggggagaagggggacagaggagaccggggcctgcagggcaagtatggcaagacaggcagcgctggggcccggggccacacaggccccaagggccagaagggctccatgggcgcccctggagagcgctgcaagagccactacgccgccttctctgtgggcaggaagaagcccatgcacagcaaccactactaccagaccgtcatctttgacacagaatttgtgaacctgtatgaccacttcaacatgttcaccgggaagttctactgctacgtgcccggcctgtacttcttcagcctgaatgtgcacacctggaaccagaaggagacctacctgcacatcatgaagaatgaggaggaggtggtgatcctgtttgcccaggtgggggacaggagcatcatgcagagccagagcctgatgctggagctgcgggagcaggaccaggtgtgggtgcggctgtacaagggggagcgggagaatgccatcttcagcgaggagctggacacctacatcaccttcagcggctacctggtgaagcacgccacagagccctag

SEQ ID NO: 7654 - DNA, 1002 bp, synthetic construct
  misc_feature 1..1002: note = source = /note="Description of Artificial Sequence: Synthetic coding sequence"
  source 1..1002: mol_type = other DNA
atggtgtccaagagccgctggaagctgctggccatgctggccctggtgctggtggtgatggtgtggtacagcatcagccgggaggaccgctacatcgagctgttctacttccccatccctgagaagaaggagccctgcctgcagggcgaggccgagagcaaggccagcaagctgtttggaaactacagccgggaccagcccatcttcctgcggctggaggactacttctgggtgaagacccccagcgcctatgagctgccctacggcaccaagggcagcgaggacctgctgctgcgggtgctggccatcaccagcagcagcatccccaagaacatccagagcctgcgctgccgccgctgtgtggtggtgggcaatggccaccggctgaggaacagcagcctgggagatgccatcaacaagtatgatgtggtgatccggctgaacaatgcccctgtggccggctatgaaggagatgtgggcagcaagaccaccatgaggctcttctacccagagagcgcccactttgaccccaaggtggagaacaacccagacaccctgctggtgctggtggccttcaaggccatggacttccactggattgagaccatcctgagtgacaagaagagggtgaggaagggcttctggaagcagcccccactcatctgggatgtgaaccccaagcagatccgcatcctgaaccccttcttcatggagattgctgctgacaagctgctgagcctgcccatgcagcagcccaggaagatcaagcagaagcccaccaccggcctgctggccatcaccctggccctgcacctgtgtgacctggtgcacatcgccggcttcggctacccagatgcctacaacaagaagcagaccatccactactatgagcagatcaccctgaagtccatggccggcagcggccacaacgtgtcccaggaggccctggccatcaagaggatgctggagatgggcgccatcaagaacctgaccagcttctag

SEQ ID NO: 7655 - DNA, 312 bp, synthetic construct; identical to SEQ ID NO: 7320
  misc_feature 1..312: note = source = /note="Description of Artificial Sequence: Synthetic coding sequence"
  source 1..312: mol_type = other DNA

SEQ ID NO: 7656 - DNA, 312 bp, synthetic construct; identical to SEQ ID NO: 7320
  misc_feature 1..312: note = source = /note="Description of Artificial Sequence: Synthetic coding sequence"
  source 1..312: mol_type = other DNA

SEQ ID NO: 7657 - DNA, 312 bp, synthetic construct; identical to SEQ ID NO: 7320
  misc_feature 1..312: note = source = /note="Description of Artificial Sequence: Synthetic coding sequence"
  source 1..312: mol_type = other DNA

SEQ ID NO: 7658 - DNA, 312 bp, synthetic construct; identical to SEQ ID NO: 7320
  misc_feature 1..312: note = source = /note="Description of Artificial Sequence: Synthetic coding sequence"
  source 1..312: mol_type = other DNA

SEQ ID NO: 7659 - DNA, 2268 bp, synthetic construct
  misc_feature 1..2268: note = source = /note="Description of Artificial Sequence: Synthetic coding sequence"
  source 1..2268: mol_type = other DNA
atgccacccttcctgctgctggaggccgtgtgtgtgttcctgttcagccgggtgccccccagcctgcccctgcaggaggtgcacgtgtccaaggagaccatcggcaagatctctgctgccagcaagatgatgtggtgcagcgctgctgtggacatcatgttcctgctggatggcagcaacagcgtgggcaagggcagctttgagaggagcaagcactttgccatcaccgtgtgtgatggcctggacatcagccctgagcgggtgcgggtgggcgccttccagttcagcagcaccccccacctggagttccccctggacagcttcagcacccagcaggaggtgaaggcccgcatcaagaggatggtgttcaagggcggccgcacagaaacagagctggccctgaagtacctgctgcaccggggcctgcccggcggcagaaatgcctctgtgccccagatcctgatcatcgtgacagatggcaagagccagggagatgtggccctgcccagcaagcagctgaaggagcggggcgtgacagtgtttgctgtgggcgtgcgcttcccccgctgggaggagctgcacgccctggccagcgagccccggggccagcacgtgctgctggccgagcaggtggaggatgccaccaacggcctcttcagcaccctgagcagcagcgccatctgcagcagcgccaccccagactgccgggtggaggcccacccctgtgagcacaggaccctggagatggtgcgggagtttgctggaaatgccccctgctggaggggcagcaggaggaccctggccgtgctggccgcccactgccccttctacagctggaagagggtcttcctgacccacccagccacctgctaccgcaccacctgccccggcccctgtgacagccagccctgccagaatggaggcacctgtgtgcctgagggcctggatggctaccagtgcctgtgccccctggccttcggcggggaggccaactgtgccctgaagctgagcctggagtgccgggtggacctgctcttcctgctggacagcagcgctggcaccaccctggatggcttcctgcgggccaaggtgtttgtgaagagatttgtgcgggctgtgctgtctgaggacagccgggcccgggtgggcgtggccacctacagccgggagctgctggtggccgtgcctgtgggggagtaccaggatgtgcctgacctggtgtggagcctggatggcatccccttccggggcggccccaccctgaccggcagcgccctgcggcaggccgctgagcggggcttcggcagcgccaccaggacaggccaggaccggccccggcgggtggtggtgctgctgacagagagccacagtgaagatgaggtggccggccctgcccggcatgcccgggcccgggagctgctgctgctgggcgtgggcagcgaggccgtgcgggcagagctggaggagatcaccggcagccccaagcacgtgatggtgtacagcgacccccaggacctcttcaaccagatccctgagctgcagggcaagctgtgcagccggcagaggcctggctgcaggacccaggccctggacctggtgttcatgctggacaccagcgcctctgtgggcccagaaaattttgcccagatgcagagctttgtgcgcagctgtgccctgcagtttgaggtgaacccagatgtgacccaggtgggcctggtggtgtatggcagccaggtgcagacagccttcggcctggacaccaagcccacccgggccgccatgctgcgggccatcagccaggccccctacctgggcggcgtgggcagcgctggaacagccctgctgcacatctatgacaaggtgatgacagtgcagagaggagcccggcctggggtgcccaaggctgtggtggtgctgaccggcggcagaggagcagaagatgctgctgtgcctgcccagaagctgaggaacaacggcatctctgtgctggtggtgggcgtgggccctgtgctgtctgagggcctgcggcggctggccggcccccgggacagcctcatccacgtggccgcctatgctgacctgcgctaccaccaggatgtgctgattgagtggctgtgtggggaggccaagcagcctgtgaacctgtgcaagcccagcccctgcatgaatgaaggcagctgtgtgctgcagaatggcagctaccgctgcaagtgcagagatggctgggagggcccccactgtgagaaccgcttcctgcggcggccctag

SEQ ID NO: 7660 - DNA, 816 bp, synthetic construct
  misc_feature 1..816: note = source = /note="Description of Artificial Sequence: Synthetic coding sequence"
  source 1..816: mol_type = other DNA
atgatcactggagtcttctccatgaggctgtggacccctgtgggcgtgctgaccagcctggcctactgcctgcaccagaggagagtggccctggccgagctgcaggaggctgatggccagtgccctgtggacaggagcctgctgaagctgaagatggtgcaggtggtgttcagacatggagcccggagccccctgaagcccctgcccctggaggagcaggtggagtggaacccccagctgctggaggtgcccccccagacccagtttgactacacagtgaccaacctggccggcggccccaagccctacagcccctatgacagccagtaccacgagaccaccctgaagggcggcatgtttgctggccagctgaccaaggtgggcatgcagcagatgtttgccctgggggagcggctgaggaagaactacgtggaggacatccccttcctgagccccaccttcaacccccaggaggtgttcatccgcagcaccaacatcttcaggaacctggagagcacccgctgcctgctggccggcctcttccagtgccagaaggagggccccatcatcatccacacagatgaggccgacagcgaggtgctgtaccccaactaccagagctgctggagcctgcggcagaggacccggggccggcggcagacagccagcctgcagcccggcatcagcgaggacctgaagaaggtgaaggacaggatgggcatcgacagcagtgacaaggtggacttcttcatcctgctggacaacgtggccgctgagcaggagaagatgggcagctgccgcttccacggcagctag

SEQ ID NO: 7661 - DNA, 1395 bp, synthetic construct
  misc_feature 1..1395: note = source = /note="Description of Artificial Sequence: Synthetic coding sequence"
  source 1..1395: mol_type = other DNA
atggagcacagcgtgtgccccagcagcgctgtgcacctgatccctgtgtccacccccaagaatggcatgagcagcaagagcaggaagaggatcatgccagaccctgtgacagagccccctgtgacagatcctgtgtatgaggccctgctgtactgcaacatccccagcgtggccgagaggtccatggagggccacgccccccaccacttcaagctggtgtctgtgcacgtgttcatcagacatggagaccgctaccccctgtatgtgatccccaagaccaagaggcctgagattgactgcaccctggtggccaacaggaagccctaccaccccaagctggaggccttcatcagccacatgagcaagggcagcggggccagctttgagagccccctgaacagcctgcccctgtaccccaaccaccccctgtgtgagatgggagagctgacccagacaggagtggtgcagcacctgcagaatggccagctgctgcgggacatctacctgaagaagcacaagctgctgcccaatgactggagcgctgaccagctgtacctggagaccaccgggaagagcaggaccctgcagagcggcctggccctgctgtatggcttcctgcctgactttgactggaagaagatctacttccgccaccagcccagcgccctcttctgcagcggcagctgctactgccctgtgaggaaccagtacctggagaaggagcagaggcggcagtacctgctgcggctgaagaacagccagctggagaagacctatggagagatggccaagatcgtggatgtgcccaccaagcagctgcgggccgccaaccccatcgacagcatgctgtgccacttctgccacaacgtgtccttcccctgcaccagaaatggctgtgtggacatggagcacttcaaggtgatcaagacccaccagattgaagatgagcgggagcggcgggagaagaagctgtacttcggctacagcctgctgggcgcccaccccatcctgaaccagaccatcggccgcatgcagagggccacagagggcaggaaggaggagctgtttgccctgtacagcgcccatgatgtgaccctgagccctgtgctgagcgccctgggcctgtctgaggcccgcttccccaggtttgctgcccggctcatctttgagctgtggcaggaccgggagaagcccagcgagcacagcgtgcgcatcctgtacaacggggtggatgtgaccttccacaccagcttctgccaggaccaccacaagaggagccccaagcccatgtgccccctggagaacctggtgcgctttgtgaagagggacatgtttgtggccctgggcggcagcggcaccaactactatgatgcctgccaccgggagggcttctag

SEQ ID NO: 7662 - DNA, 1443 bp, synthetic construct; identical to SEQ ID NO: 6994
  misc_feature 1..1443: note = source = /note="Description of Artificial Sequence: Synthetic coding sequence"
  source 1..1443: mol_type = other DNA

SEQ ID NO: 7663 - DNA, 1311 bp, synthetic construct; identical to SEQ ID NO: 7298
  misc_feature 1..1311: note = source = /note="Description of Artificial Sequence: Synthetic coding sequence"
  source 1..1311: mol_type = other DNA

SEQ ID NO: 7664 - DNA, 1161 bp, synthetic construct; identical to SEQ ID NO: 7407
  misc_feature 1..1161: note = source = /note="Description of Artificial Sequence: Synthetic coding sequence"
  source 1..1161: mol_type = other DNA

SEQ ID NO: 7665 - DNA, 990 bp, synthetic construct
  misc_feature 1..990: note = source = /note="Description of Artificial Sequence: Synthetic coding sequence"
  source 1..990: mol_type = other DNA
atgaggcctcctccagccctggccctggccggcctgtgcctgctggccctgcctgctgctgctgccagctacttcggcctgaccggccgggaggtgctgacccccttccctggcctgggcacagctgctgccccagcccagggcggggcccacctgaagcagtgtgacctgctgaagctgagccggcggcagaagcagctgtgcagaagagagcccggcctggccgagaccctgagagatgctgcccacctgggcctgctggagtgccagttccagttcagacatgagcgctggaactgcagcctggagggccgcatgggcctgctgaagaggggcttcaaggagacagccttcctgtatgctgtgagcagcgctgccctgacccacaccctggcccgggcctgcagcgctggccgcatggagcgctgcacctgtgatgacagccctggcctggagagccggcaggcctggcagtggggcgtgtgtggggacaacctgaagtacagcaccaagttcctgagcaacttcctgggcagcaagaggggcaacaaggacctgcgggcccgggcagatgcccacaacacccacgtgggcatcaaggctgtgaagagcggcctgcggaccacctgcaagtgccacggcgtgtctggcagctgtgctgtgaggacctgctggaagcagctgagccccttccgggagaccggccaggtgctgaagctgcgctatgacagcgctgtgaaggtgagcagcgccaccaatgaggccctgggccgcctggagctgtgggccccagcccggcagggcagcctgaccaagggcctggcccccaggtctggggacctggtgtacatggaggacagccccagcttctgccggcccagcaagtacagccctggaacagctggctggagcgctgtggcccggagccagctgatcaccaccagcaccagccgcatccaggccatcctgcccagccagctgcctgagtag

SEQ ID NO: 7666 - DNA, 579 bp, synthetic construct
  misc_feature 1..579: note = source = /note="Description of Artificial Sequence: Synthetic coding sequence"
  source 1..579: mol_type = other DNA
atgaggctggccggccctgagagctctgtgacagctgccccccgggccaggaagtacaagtgtggcctgccccagccctgcccagaggagcacctggccttccgggtggtgtctggggccgccaacgtcatcggccccaagatctgcctggaggacaagatgctgatgagctctgtgaaggacaacgtgggccggggcctgaacatcgccctggtgaatggagtgtctggagagctgattgaggcccgggcctttgacatgtgggccggagatgtgaatgacctgctgaagttcatccggcccctgcacgagggcaccctggtgtttgtggccagctatgatgatcctgccaccaagatgaatgaggagaccaggaagctgttcagcgagctgggcagcagaaatgccaaggagctggccttccgggacagctgggtgtttgtgggcgccaagggcgtgcagaacaagagcccctttgagcagcacgtgaagaacagcaagcacagcaacaagtatgagggctggccagaggccctggagatggagggctgcatccccaggaggagcacagccagctag

SEQ ID NO: 7667 - DNA, 1053 bp, synthetic construct; identical to SEQ ID NO: 7256
  misc_feature 1..1053: note = source = /note="Description of Artificial Sequence: Synthetic coding sequence"
  source 1..1053: mol_type = other DNA

SEQ ID NO: 7668 - DNA, 189 bp, synthetic construct
  misc_feature 1..189: note = source = /note="Description of Artificial Sequence: Synthetic coding sequence"
  source 1..189: mol_type = other DNA
atgaagatccagctgttcttcttcatcctgcacttctgggtgaccatcctgcctgcccggagcaactttgagcccaagtacagatttgagcgctgtgagaaggtgcggggcatctgcaagaccttctgtgatgatgtggagtatgactatggctactgcatcaagtggaggagccagtgctgcgtgtag

SEQ ID NO: 7669 - DNA, 738 bp, synthetic construct
  misc_feature 1..738: note = source = /note="Description of Artificial Sequence: Synthetic coding sequence"
  source 1..738: mol_type = other DNA
atgaccctcttccctgtgctgctcttcctggtggccggcctgctgcccagcttccctgccaatgaagacaaggaccctgccttcaccgccctgctgaccacccagacccaggtgcagcgggagatcgtgaacaagcacaatgagctgcggcgggctgtgtccccaccagccaggaacatgctgaagatggagtggaacaaggaggccgccgccaatgcccagaagtgggccaaccagtgcaactaccgccacagcaaccccaaggacaggatgaccagcctgaagtgtggggagaacctgtacatgagcagcgccagcagctcctggagccaggccatccagagctggtttgatgagtacaatgactttgattttggagtgggccccaagaccccaaatgctgtggtgggccactacacccaggtggtgtggtacagcagctacctggtgggctgtggaaatgcctactgccccaaccagaaggtgctgaagtactactacgtgtgccagtactgcccagctggcaactgggccaaccggctgtatgtgccctatgagcagggcgccccctgtgccagctgcccagacaactgtgatgatggcctgtgcaccaacggctgcaagtatgaggacctgtacagcaactgcaagagcctgaagctgaccctgacctgcaagcaccagctggtgcgggacagctgcaaggccagctgcaactgcagcaacagcatctactag

SEQ ID NO: 7670 - DNA, 1341 bp, synthetic construct; identical to SEQ ID NO: 6995
  misc_feature 1..1341: note = source = /note="Description of Artificial Sequence: Synthetic coding sequence"
  source 1..1341: mol_type = other DNA

SEQ ID NO: 7671 - DNA, 585 bp, synthetic construct; identical to SEQ ID NO: 6927
  misc_feature 1..585: note = source = /note="Description of Artificial Sequence: Synthetic coding sequence"
  source 1..585: mol_type = other DNA

SEQ ID NO: 7672 - DNA, 585 bp, synthetic construct; identical to SEQ ID NO: 6927
  misc_feature 1..585: note = source = /note="Description of Artificial Sequence: Synthetic coding sequence"
  source 1..585: mol_type = other DNA

SEQ ID NO: 7673 - DNA, 348 bp, synthetic construct
  misc_feature 1..348: note = source = /note="Description of Artificial Sequence: Synthetic coding sequence"
  source 1..348: mol_type = other DNA
atgaccatgaggcacaactggaccccagacctgagccccctgtgggtgctgctgctgtgtgcccacgtggtgaccctgctggtgcgggccacccctgtgtcccagaccaccacagctgccacagcctctgtgcgcagcaccaaggacccctgccccagccagccccctgtgtttcctgctgccaagcagtgcccagccctggaggtgacctggccagaggtggaggtgcccctgtcctgggccgagggcaacctggccccccaccccaggagccctgccctgcagccccagcagagcacagctgctggcctgcggctgagcacaggccctgctgctgcccagccctag

SEQ ID NO: 7674 - DNA, 528 bp, synthetic construct; identical to SEQ ID NO: 7066
  misc_feature 1..528: note = source = /note="Description of Artificial Sequence: Synthetic coding sequence"
  source 1..528: mol_type = other DNA

SEQ ID NO: 7675 - DNA, 993 bp, synthetic construct
  misc_feature 1..993: note = source = /note="Description of Artificial Sequence: Synthetic coding sequence"
  source 1..993: mol_type = other DNA
atgggcaagctgtgcctgggccccaccctgtgcccagctgctgctgctgaggagagcagagatgctgagccccggcgggagctgctgtgcagcggccggccctggacctggagggctgctgcccgggtgaccaccatgatcccctgggtgctgctggcctgtgccctgccctgtgccgctgaccccctgctgggcgcctttgcccggcgggacttcaggaagggcagcccccagctggtgtgcagcctgcccggcccccagggccccccaggccccccaggggcccctggccccagcggcatgatgggccgcatgggcttccctgggaaggatggccaggacggccatgatggagacagaggagacagcggggaggagggccccccaggccgcacaggcaacagaggcaagccaggccccaagggcaaggccggggccatcggccgggccggcccccggggccccaagggcgtgaatggcacccctgggaagcacggcacccctgggaagaagggccccaagggcaagaagggggagcccggcctgcccggcccctgcagctgtggcagcggccacaccaagagcgccttctctgtggccgtgaccaagagctacccccgggagcggctgcccatcaagtttgacaagatcctgatgaatgaaggaggccactacaatgccagcagcggcaagtttgtgtgtggggtgcccggcatctactacttcacctatgacatcaccctggccaacaagcacctggccatcggcctggtgcacaacggccagtaccgcatccgcacctttgatgccaacacaggcaaccatgatgtggccagcggcagcaccatcctggccctgaagcagggagatgaggtgtggctgcagatcttctacagcgagcagaatggcctcttctatgacccctactggacagacagcctcttcaccggcttcctgatctatgctgaccaggatgaccccaatgaggtgtag

SEQ ID NO: 7676 - DNA, 390 bp, synthetic construct
  misc_feature 1..390: note = source = /note="Description of Artificial Sequence: Synthetic coding sequence"
  source 1..390: mol_type = other DNA
atgaggctgctgctgctggtgcccctgctgctggccccagcccctggcagcagcgcccccaaggtgcggcggcagagcgacacctggggcccctggagccagtggagcccctgcagcaggacctgtggcggcggcgtgtccttccgggagcggccctgctacagccagaggagagatggcggcagcagctgtgtgggccctgcccggagccacaggagctgcaggacagagagctgcccagatggagcccgggacttccgggcagagcagtgtgccgagtttgatggagctgagttccagggccgccgctaccgctggctgccctactacagcgcccccaacaagtgtgagctgaactgcatccccaagggcctgggcctgcagggctag

SEQ ID NO: 7677 - DNA, 1227 bp, synthetic construct
  misc_feature 1..1227: note = source = /note="Description of Artificial Sequence: Synthetic coding sequence"
  source 1..1227: mol_type = other DNA
atgttcagcaatgccaacagccgcagcaagatgtggctgctgctgaccatggccagcctcatctctgtgctgggcaccacccacggcctgtttgggaagctgcaccctggcagccctgaggtgaccatgaacatcagccagatgatcacctactggggctacccaaatgaggagtatgaggtggtgacagaagatggctacatcctggaggtgaaccgcatcccctacggcaagaagaacagcggcaacacaggccagaggcctgtggtgttcctgcagcacggcctgctggccagcgccaccaactggatcagcaacctgcccaacaacagcctggccttcatcctggctgatgctggctatgatgtgtggctgggcaacagccggggcaacacctgggcccggaggaacctgtactacagcccagacagcgtggagttctgggccttctcctttgatgagatggccaagtatgacctgcctgccaccatcgacttcatcgtgaagaagacaggccagaagcagctgcactacgtgggccacagccagggcaccaccatcggcttcatcgccttcagcaccaaccccagcctggccaagaggatcaagaccttctacgccctggcccctgtggccaccgtgaagtacaccaagagcctcatcaacaagctgcgctttgtgccccagagcctcttcaagttcatctttggagacaagatcttctacccccacaacttctttgaccagttcctggccacagaggtgtgcagccgggagatgctgaacctgctgtgcagcaatgccctcttcatcatctgtggctttgacagcaagaacttcaacaccagccggctggatgtgtacctgagccacaacccagctggcacctctgtgcagaacatgttccactggacccaggccgtgaagagcggcaagttccaggcctatgactggggcagccctgtgcagaacaggatgcactatgaccagagccagcccccctactacaacgtgacagccatgaatgtgcccatcgctgtgtggaatggaggcaaggacctgctggccgacccccaggatgtgggcctgctgctgcccaagctgcccaacctgatctaccacaaggagatccccttctacaaccacctggacttcatctgggccatggatgccccccaggaggtgtacaatgacatcgtgtccatgatcagcgaggacaagaagtag

SEQ ID NO: 7678 - DNA, 393 bp, synthetic construct; identical to SEQ ID NO: 7216
  misc_feature 1..393: note = source = /note="Description of Artificial Sequence: Synthetic coding sequence"
  source 1..393: mol_type = other DNA

SEQ ID NO: 7679 - DNA, 393 bp, synthetic construct; identical to SEQ ID NO: 7216
  misc_feature 1..393: note = source = /note="Description of Artificial Sequence: Synthetic coding sequence"
  source 1..393: mol_type = other DNA

SEQ ID NO: 7680 - DNA, 1731 bp, synthetic construct
  misc_feature 1..1731: note = source = /note="Description of Artificial Sequence: Synthetic coding sequence"
  source 1..1731: mol_type = other DNA
atgattgtgtttggctgggccgtgttcctggccagccgcagcctgggccagggcctgctgctgaccctggaggagcacatcgcccacttcctgggcactggaggagctgccaccaccatgggcaacagctgcatctgcagagatgacagcggcacagatgattctgtggacacccagcagcagcaggccgagaacagcgctgtgcccacagctgacaccaggagccagccccgggaccctgtgcggcccccaagaagaggccggggcccccatgagcccaggaggaagaagcagaatgtggatggcctggtgctggacaccctggccgtcatccgcaccctggtggacaatgaccaggagcccccctacagcatgatcaccctgcacgagatggccgagacagatgagggctggctggatgtggtgcagagcctcatccgggtcatccccctggaggaccccctgggccctgctgtgatcaccctgctgctggatgagtgccccctgcccaccaaggatgccctgcagaagctgacagagatcctgaacctgaatggagaggtggcctgccaggacagcagccacccagccaagcacaggaacaccagcgctgtgctgggctgcctggccgagaagctggccggccctgccagcatcggcctgctgagccctggcatcctggagtacctgctgcagtgcctgaagctgcagagccaccccaccgtgatgctgtttgccctgattgccctggagaagtttgcccagaccagcgagaacaagctgaccatcagcgagagcagcatcagtgaccggctggtgaccctggagagctgggccaatgaccctgactacctgaagaggcaggtgggcttctgtgcccagtggagcctggacaacctcttcctgaaggagggccggcagctgacctatgagaaggtgaacctgagcagcatccgggccatgctgaacagcaatgatgtgtctgagtacctgaagatcagcccccacggcctggaggcccgctgtgatgccagcagctttgaatctgtgcgctgcaccttctgtgtggatgctggggtgtggtactatgaggtgacagtggtgaccagcggcgtgatgcagatcggctgggccacccgggacagcaagttcctgaaccacgagggctacggcattggagatgatgagtacagctgtgcctatgatggctgccggcagctgatctggtacaatgcccggagcaagccccacatccacccctgctggaaggagggggacacagtgggcttcctgctggacctgaatgagaagcagatgatcttcttcctgaatggaaaccagctgcccccagagaagcaggtgttcagcagcacagtgtctggcttctttgctgctgccagcttcatgagctaccagcagtgtgagttcaactttggagccaagcccttcaagtacccacccagcatgaagttcagcaccttcaatgactatgccttcctgacagctgaggagaagatcatcctgcccaggcaccggcggctggccctgctgaagcaggtgtccatccgggagaactgctgcagcctgtgctgtgatgaggtggccgacacccagctgaagccctgtggccacagcgacctgtgcatggactgtgccctgcagctggagacctgccccctgtgcaggaaggagatcgtgagccgcatccggcagatcagccacatctcctag

SEQ ID NO: 7681 - DNA, 360 bp, synthetic construct
  misc_feature 1..360: note = source = /note="Description of Artificial Sequence: Synthetic coding sequence"
  source 1..360: mol_type = other DNA
atggcccggcccggcatggagcgctggagggaccggctggccctggtgactggagccagcggcggcattggagctgctgtggcccgggccctggtgcagcagggcctgaaggtggtgggctgtgccaggacagtgggcaacatcgaggagctggccgctgagtgcaagtctgctggctacccaggcaccctcatcccctaccgctgtgacctgagcaatgaggaggacatcctgtccatgttcagcgccatccgcagccagcacagcggcgtggacatctgcatcaacaatgccggcctggcccggccagacaccctgctgagcggcagcaccagcggctggaaggacatgttcaactag

SEQ ID NO: 7682 - DNA, 144 bp, synthetic construct
  misc_feature 1..144: note = source = /note="Description of Artificial Sequence: Synthetic coding sequence"
  source 1..144: mol_type = other DNA
atgcaggtgtccacagctgccctggccgtgctgctgtgcaccatggccctgtgcaaccaggtgctgagcgccccccaggccggccgctctgtgctgacccctgtgcgcagcggcagcaggaacacctctgtgacctggagctag

SEQ ID NO: 7683 - DNA, 159 bp, synthetic construct
  misc_feature 1..159: note = source = /note="Description of Artificial Sequence: Synthetic coding sequence"
  source 1..159: mol_type = other DNA
atgcaggtgtccacagctgccctggccgtgctgctgtgcaccatggccctgtgcaaccaggtgctgagcgcccccctgagccggccccgggaggccggccgctctgtgctgacccctgtgcgcagcggcagcaggaacacctctgtgacctggagctag

SEQ ID NO: 7684 - DNA, 1272 bp, synthetic construct
  misc_feature 1..1272: note = source = /note="Description of Artificial Sequence: Synthetic coding sequence"
  source 1..1272: mol_type = other DNA
atggagctggagctgatgcccttcaacgtgctgctgcggaccaccctggacctgctgcaggagaaggaccctgcccacatctttgctgagcctgtgaacctgtctgaggtgcctgactacctggagttcatcagcaagcccatggacttcagcaccatgaggaggaagctggagagccacctgtaccgcaccctggaggagtttgaggaggacttcaacctgattgtgaccaactgcatgaagtacaatgccaaggacaccatcttccacagagctgctgtgcggctgcgggacctgggcggggccatcctgcggcatgcccggcggcaggccgagaacatcggctatgaccctgagcggggcacccacctgcctgagagccccaagctggaggacttctaccgcttctcctgggaggatgtggacaacatcctgatccctgagaacagagcccacctgagccctgaggtgcagctgaaggagctgctggagaagctggacctggtgtctgccatgaggagcagcggggcccggacccggcgggtgcggctgctgcggcgggagatcaatgccctgcggcagaagctggcccagcccccaccaccccagccccccagcctgaacaagacagtgtccaatggagagctgcctgctggcccccagggagatgctgctgtgctggagcaggccctgcaggaggagccagaagatgatggagacagagatgacagcaagctgcccccaccacccaccctggagcccactggacctgcccccagcctgtctgagcaggagagccccccagagccccccaccctgaagcccatcaatgacagcaagccacccagccgcttcctgaagcccaggaaggtggaggaggatgagctgctggagaagagccccctgcagctgggcaatgagcccctgcagaggctgctgagtgacaatggcatcaaccggctgagcctgatggccccagacaccccagctggcacccccctgtctggagtgggccgccgcacctctgtgctcttcaagaaggccaagaatggagtgaagctgcagaggagcccagacagagtgctggagaatggagaggaccacggcgtggccggcagccctgccagccctgccagcattgaggaggagcggcacagcaggaagaggcccaggagccgcagctgcagcgagagcgagggggagaggagcccccagcaggaggaggagaccggcatgaccaacggctttgggaagcacaggaagagggtgtag

SEQ ID NO: 7685 - DNA, 3030 bp, synthetic construct
  misc_feature 1..3030: note = source = /note="Description of Artificial Sequence: Synthetic coding sequence"
  source 1..3030: mol_type = other DNA
atgggcagcggccgggtgcccggcctgtgcctgctggtgctgctggtgcacgcccgggccgcccagtacagcaaggccgcccaggatgtggatgaatgtgtggagggcacagacaactgccacattgatgccatctgccagaacacccccaggagctacaagtgcatctgcaagagcggctacacaggagatggcaagcactgcaaggatgtggatgaatgtgaaagagaagataatgccggctgtgtgcatgactgtgtgaacatccctggcaactaccgctgcacctgctatgatggcttccacctggcccatgatggccacaactgcctggatgtggatgaatgtgccgagggcaatggaggctgccagcagagctgtgtgaacatgatgggcagctatgagtgccactgccgggagggcttcttcctgagtgacaaccagcacacctgcatccagaggcctgaggagggcatgaactgcatgaacaagaaccacggctgtgcccacatctgccgggagacccccaagggcggcatcgcctgtgaatgtcggcccggctttgagctgaccaagaaccagagggactgcaagctgacctgcaactatggaaatggaggctgccagcacacctgtgatgacacagagcagggcccccgctgtggctgccacatcaagtttgtgctgcacacagatggcaagacctgcattggagagcggcggctggagcagcacatccccacccaggccgtgtccaatgagacctgtgctgtgaacaacggcggctgtgacagcaagtgccatgatgctgccaccggggtgcactgcacctgccctgtgggcttcatgctgcagcctgacaggaagacctgcaaggacattgatgagtgccgcctgaacaatggaggctgtgaccacatctgcaggaacacagtgggcagctttgagtgcagctgcaagaagggctacaagctgctgatcaatgaaagaaactgccaggacattgatgaatgttcctttgacaggacctgtgaccacatctgtgtgaacaccccaggcagcttccagtgcctgtgccaccggggctacctgctgtatggcatcacccactgtggagatgtggatgagtgcagcatcaacagaggaggctgccgcttcggctgcatcaacaccccaggcagctaccagtgcacctgcccagctggccagggccgcctgcactggaatggcaaggactgcacagagcccctgaagtgccagggcagccctggggccagcaaggccatgctgagctgcaacagaagtggcaagaaggacacctgtgccctgacctgccccagccgggcccgcttcctgcctgagagtgaaaatggcttcaccgtgtcctgtggcacccccagcccccgggccgccccagcccgggccggccacaacggcaacagcaccaacagcaaccactgccacgaggccgctgtgctgagcatcaagcagagggccagcttcaagatcaaggatgccaagtgccgcctgcacctgagaaataaaggcaagacagaggaggccggccgcatcactggacctggaggagccccctgcagcgagtgccaggtgaccttcatccacctgaagtgtgacagcagcaggaaaggaaaaggaagaagagcccggaccccacctgggaaggaggtgacccggctgaccctggagctggaggccgaggtgcgggcagaggagaccacagccagctgtggcctgccctgcctgcggcagaggatggagcggcggctgaagggcagcctgaagatgctgaggaagagcatcaaccaggaccgcttcctgctgcggctggccggcctggactatgagctggcccacaagccaggcctggtggccggggagagagctgagcccatggagagctgcaggcctggccagcaccgggccggcaccaagtgtgtgtcctgcccccagggcacctactaccacggccagacagagcagtgtgtgccctgcccagctggcaccttccaggagcgggagggccagctgagctgtgacctgtgccccggcagtgatgcccacggccccctgggcgccaccaacgtgaccacctgtgccggccagtgccccccaggccagcacagcgtggatggcttcaagccctgccagccctgcccccggggcacctaccagcctgaggccggccgcaccctgtgcttcccctgtggcggcggcctgaccaccaagcatgagggcgccatctccttccaggactgtgacaccaaggtgcagtgcagccctggccactactacaacaccagcatccaccgctgcatccgctgtgccatgggcagctaccagcctgacttccggcagaacttctgcagccgctgccccggcaacaccagcacagactttgatggcagcacctctgtggcccagtgcaagaaccggcagtgtggcggggagctgggggagttcaccggctacatcgagagccccaactacccaggcaactacccagctggggtggagtgcatctggaacatcaaccccccacccaagaggaagatcctgattgtggtgcctgagatcttcctgcccagtgaagatgaatgtggagatgtgctggtgatgaggaagaacagcagccccagcagcatcaccacctatgagacctgccagacctatgagcggcccatcgccttcaccgcccggagcaggaagctgtggatcaacttcaagaccagcgaggccaacagcgcccggggcttccagatcccctacgtgacctatgatgaggactatgagcagctggtggaggacatcgtgagagatggccgcctgtatgccagcgagaaccaccaggagatcctgaaggacaagaagctgatcaaggccttctttgaggtgctggcccacccccagaactacttcaagtacacagagaagcacaaggagatgctgcccaagagcttcatcaagctgctgcggagcaaggtgtcctccttcctgcggccctacaagtag

SEQ ID NO: 7686 - DNA, 984 bp, synthetic construct
  misc_feature 1..984: note = source = /note="Description of Artificial Sequence: Synthetic coding sequence"
  source 1..984: mol_type = other DNA
atgacagccctggagctggcccggcggggggcccgggtggtgctggcctgccgcagccaggagcggggggaggccgccgcctttgacctgcggcaggagagcggcaacaatgaagtcatcttcatggccctggacctggccagcctggcctctgtgcgggcctttgccacagccttcctgagcagcgagccccggctggacatcctgatccacaatgccggcatcagcagctgtggccgcacccgggaggccttcaacctgctgctgcgggtgaaccacatcggccccttcctgctgacccacctgctgctgccctgcctgaaggcctgtgcccccagccgggtggtggtggtggccagcgctgcccactgccggggccgcctggacttcaagaggctggacaggcctgtggtgggctggaggcaggagctgcgggcctatgctgacaccaagctggccaacgtgctgtttgcccgggagctggccaaccagctggaggccaccggggtgacctgctacgccgcccaccctggccctgtgaacagcgagctgttcctgcggcacgtgcccggctggctgcggcccctgctgcggcccctggcctggctggtgctgcgggccccccggggcggggcccagacccccctgtactgtgccctgcaggagggcatcgagcccctgagcggccgctactttgccaactgccacgtggaggaggtgcccccagctgccagagatgacagagctgcccaccggctgtgggaggccagcaagaggctggccggcctgggccctggagaagatgctgagccagatgaggacccccagagcgaggacagcgaggcccccagcagcctgagcaccccccaccctgaggagcccaccgtgtcccagccctaccccagcccccagagcagcccagacctgagcaagatgacccaccgcatccaggccaaggtggagcctgagatccagctgtcctag

SEQ ID NO: 7687 - DNA, 1320 bp, synthetic construct; identical to SEQ ID NO: 6983
  misc_feature 1..1320: note = source = /note="Description of Artificial Sequence: Synthetic coding sequence"
  source 1..1320: mol_type = other DNA

SEQ ID NO: 7688 - DNA, 3687 bp, synthetic construct; identical to SEQ ID NO: 6944
  misc_feature 1..3687: note = source = /note="Description of Artificial Sequence: Synthetic coding sequence"
  source 1..3687: mol_type = other DNA

SEQ ID NO: 7689 - DNA, 1596 bp, synthetic construct
  misc_feature 1..1596: note = source = /note="Description of Artificial Sequence: Synthetic coding sequence"
  source 1..1596: mol_type = other DNA
atgaagggggcccggctgtttgtgctgctgagcagcctgtggagcggcggcatcggcctgaacaacagcaagcacagctggaccatcccagaagatggcaacagccagaagaccatgcccagcgcctctgtgccccccaacaagatccagagcctgcagatcctgcccaccaccagggtgatgtctgctgagatcgccaccaccccagagaaggccgagggcgtggtgaagctgcagaacctgaccctgcccaccaatgccagcatcaagttcaaccctggagctgagagcgtggtgctgagcaacagcaccctgaagttcctgcagagctttgccaggaagagcaatgagcaggccaccagcctgaacacagtgggcggcaccggcggcattggaggagtgggcggcactggaggagtgggcaacagagccccccgggagacctacctgagcagaggagacagcagcagcagccagaggacagactaccagaagagcaactttgagaccacccggggcaagaactggtgtgcctacgtgcacacccggctgagccccaccgtcatcctggacaaccaggtgacctacgtgcctgggggcaagggcccctgtggctggacaggaggcagctgcccccagaggagccagaagatcagcaaccctgtgtacaggatgcagcacaagatcgtgaccagcctggactggcgctgctgccccggctacagcggccccaagtgccagctgcgggcccaggagcagcagagcctcatccacaccaaccaggccgagagccacacagctgtgggccggggcgtggccgagcagcagcagcagcagggctgtggggaccctgaggtgatgcagaagatgacagaccaggtgaactaccaggccatgaagctgaccctgctgcagaagaagattgacaacatcagcctgactgtgaatgatgtgaggaacacctacagcagcctggagggcaaggtgtctgaggacaagagccgggagttccagagcctgctgaaggaggagtacagcagctgcagccgccacccctgccagaatggaggcacctgcatcaatggaagaaccagcttcacctgtgcctgccgccaccccttcaccggggacaactgcaccatcaagctggtggaggagaatgccctggccccagacttcagcaagggcagctaccgctatgcccccatggtggccttctttgccagccacacctacggcatgaccatccctggccccatcctcttcaacaacctggatgtgaactatggagccagctacacccccaggacaggcaagttccgcatcccctacctgggcgtgtatgtgttcaagtacaccatcgagagcttcagcgcccacatcagcggcttcctggtggtggatggcatcgacaagctggcctttgaaagtgagaacatcaacagcgagatccactgtgacagagtgctgactggagatgccctgctggagctgaactacggccaggaggtgtggctgcggctggccaagggcaccatcccagccaagttcccccctgtgaccaccttcagcggctacctgctgtaccgcacctag

SEQ ID NO: 7690 - DNA, 942 bp, synthetic construct; identical to SEQ ID NO: 7248
  misc_feature 1..942: note = source = /note="Description of Artificial Sequence: Synthetic coding sequence"
  source 1..942: mol_type = other DNA

SEQ ID NO: 7691 - DNA, 834 bp, synthetic construct
  misc_feature 1..834: note = source = /note="Description of Artificial Sequence: Synthetic coding sequence"
  source 1..834: mol_type = other DNA
atgtgcaccgtggtggaccccagaattgtgcggcgctacctgctgcggcggcagctgggccagggcgcctacggcatcgtgtggaaggctgtggacagaagaactggagaggtggtggccatcaagaagatctttgatgccttccgggacaagacagatgcccagaggaccttccgggagatcaccctgctgcaggagtttggagaccaccccaacatcatcagcctgctggatgtgatccgggcagaaaatgaccgggacatctacctggtgtttgagttcatgggctgcccccccagccccccaccacccacagctgtgaggaccctgtctgctgacacagacctgaatgctgtgatcaggaagggcggcctgctgcaggatgtgcacgtgcgcagcatcttctaccagctgctgcgggccacccgcttcctgcacagcggccacgtggtgcaccgggaccagaagcccagcaatgtgctgctggatgccaactgcaccgtgaagctgtgtgactttggcctggcccggagcctgggggacctgcctgagggccctgaggaccaggccgtgacagaatatgtggccacccgctggtaccgggcccctgaggtgctgctgagcagccaccgctacaccctgggcgtggacatgtggagcctgggctgcatcctgggggagatgctgcggggccggcccctcttccctggcaccagcaccctgcaccagctggagctgatcctggagaccatccccccaccttctgaggaggacctgctggccctgggcagcggctgccgggcctctgtgctgcaccagctgggcagcaggtag

SEQ ID NO: 7692 - DNA, 765 bp, synthetic construct
  misc_feature 1..765: note = source = /note="Description of Artificial Sequence: Synthetic coding sequence"
  source 1..765: mol_type = other DNA
atgtgcaccgtggtggaccccagaattgtgcggcgctacctgctgcggcggcagctgggccagggcgcctacggcatcgtgtggaaggctgtggacagaagaactggagaggtggtggccatcaagaagatctttgatgccttccgggacaagacagatgcccagaggaccttccgggagatcaccctgctgcaggagtttggagaccaccccaacatcatcagcctgctggatgtgatccgggcagaaaatgaccgggacatctacctggtgtttgagttcatggacacagacctgaatgctgtgatcagaaaaggaggcctgctgcaggatgtgcacgtgcgcagcatcttctaccagctgctgcgggccacccgcttcctgcacagcggccacgtggtgcaccgggaccagaagcccagcaatgtgctgctggatgccaactgcaccgtgaagctgtgtgactttggcctggcccggagcctgggggacctgcctgagggccctgaggaccaggccgtgacagaatatgtggccacccgctggtaccgggcccctgaggtgctgctgagcagccaccgctacaccctgggcgtggacatgtggagcctgggctgcatcctgggggagatgctgcggggccggcccctcttccctggcaccagcaccctgcaccagctggagctgatcctggagaccatccccccacccagcgaggagggcgcccagacagcctgccgcagcggcaccggggccagcacctag

SEQ ID NO: 7693 - DNA, 474 bp, synthetic construct
  misc_feature 1..474: note = source = /note="Description of Artificial Sequence: Synthetic coding sequence"
  source 1..474: mol_type = other DNA
atggccctgctgctgtgcctggtgtgcctgacagctgccctggcccacggctgcctgcactgccacagcaacttcagcaagaagttctccttctaccgccaccacgtgaacttcaagtcctggtgggtgggggacatccctgtgtctggggccctgctgacagactggagcgatgacaccatgaaggagctgcacctggccatcccagccaagatcacccgggagaagctggaccaggtggccacagctgtgtaccagatgatggaccagctgtaccagggcaagatgtacttccctggctacttccccaatgagctgaggaacatcttccgggagcaggtgcacctgatccagaatgccatcatcgagcggcacctggcccctggctcctggggcggcggccagctgagccgggagggccccagcctggcccctgagggctccatgcccagccccaggggggacctgccctag

SEQ ID NO: 7694 - DNA, 699 bp, synthetic construct
  misc_feature 1..699: note = source = /note="Description of Artificial Sequence: Synthetic coding sequence"
  source 1..699: mol_type = other DNA
atggccctgctgctgtgcctggtgtgcctgacagctgccctggcccacggctgcctgcactgccacagcaacttcagcaagaagttctccttctaccgccaccacgtgaacttcaagtcctggtgggtgggggacatccctgtgtctggggccctgctgacagactggagcgatgacaccatgaaggagctgcacctggccatcccagccaagatcacccgggagaagctggaccaggtggccacagctgtgtaccagatgatggaccagctgtaccagggcaagatgtacttccctggctacttccccaatgagctgaggaacatcttccgggagcaggtgcacctgatccagaatgccatcatcgagagcagaattgactgccagcaccgctgtggcatcttccagtatgagaccatcagctgcaacaactgcacagacagccacgtggcctgcttcggctacaactgtgagagcagcgcccagtggaagtctgctgtgcagggcctgctgaactacatcaacaactggcacaagcaggacacctccatgaggcccaggagcagcgccttctcctggccaggcacccaccgggccaccccagccttcctggtgtccccagccctgcgctgcctggagcccccccacctggccaacctgaccctggaggatgctgctgaatgtctgaagcagcactag

SEQ ID NO: 7695 - DNA, 396 bp, synthetic construct
  misc_feature 1..396: note = source = /note="Description of Artificial Sequence: Synthetic coding sequence"
  source 1..396: mol_type = other DNA
atgggaggagatggccgctacgtgctgaatggccactgggtggtgtccccacctggcacctatgaagctgctggcacccacgtggtgtacacccgggacaccggcccccaggagaccctgcaggccgccggccccaccagccatgacctgctgctgcaggtgctgctgcaggagcccaaccctggcattgaatttgagttctggctgccccgggagcgctacagccccttccaggcccgggtgcaggccctgggctggcccctgcggcagccccagccccggggcgtggagccccagcccccagctgccccagctgtgaccccagcccagacccccaccctggcccctggccccagcgctggccccccacctcctggccctggggaccccctgtag

SEQ ID NO: 7696 - DNA, 447 bp, synthetic construct
  misc_feature 1..447: note = source = /note="Description of Artificial Sequence: Synthetic coding sequence"
  source 1..447: mol_type = other DNA
atggcccgcatccccacagctgccctgggctgcatcagcctgctgtgcctgcagctgcccggcagcctgagccgcagcctgggcggggaccccaggcctgtgaagccccgggagcccccagcccggagccccagcagcagcctgcagcccaggcacccagcccccaggcctgtggtgtggaagctgcaccgggccctgcaggcccagagaggagctggcctggcccctgtgatgggccagcccctgagagatggcggccggcagcacagcggccccaggaggcacagcggccccaggaggacccaggcccagctgctgcgggtgggctgtgtgctgggcacctgccaggtgcagaacctgagccaccggctgtggcagctgatgggccctgctggccggcaggacagcgcccctgtggaccccagcagcccccacagctatggatag

SEQ ID NO: 7697 - DNA, 447 bp, synthetic construct; identical to SEQ ID NO: 7696
  misc_feature 1..447: note = source = /note="Description of Artificial Sequence: Synthetic coding sequence"
  source 1..447: mol_type = other DNA

SEQ ID NO: 7698 - DNA, 537 bp, synthetic construct
  misc_feature 1..537: note = source = /note="Description of Artificial Sequence: Synthetic coding sequence"
  source 1..537: mol_type = other DNA
atggaccgggccgcccgctgcagcggggccagcagcctgcccctgctgctggccctggccctgggcctggtgatcctgcactgtgtggtggctgatggcaacagcaccaggagccctgagaccaacggcctgctgtgtggggaccctgaggagaactgtgccgccaccaccacccagagcaagaggaagggccacttcagccgctgccccaagcagtacaagcactactgcatcaagggccgctgccgctttgtggtggccgagcagacccccagctgtgtgtgtgatgagggctacatcggggcccgctgtgagcgggtggacctcttctacctgcggggggaccggggccagatcctggtgatctgcctgattgctgtgatggtggtgttcatcatcctggtgattggagtgtgcacctgctgccaccccctgaggaagaggaggaagaggaagaagaaggaggaggagatggagaccctgggcaaggacatcacccccatcaatgaagacatcgaggagaccaacatcgcctag

SEQ ID NO: 7699 - DNA, 1251 bp, synthetic construct
  misc_feature 1..1251: note = source = /note="Description of Artificial Sequence: Synthetic coding sequence"
  source 1..1251: mol_type = other DNA
atgagcatcagcctgagcagcctcatcctgctgcccatctggatcaacatggcccagatccagcagggcggcccagatgagaaggagaagaccacagccctgaaggacctgctgagcagaattgacctggatgagctgatgaagaaggatgagccccccctggacttcccagacaccctggagggctttgaatatgccttcaatgagaagggccagctgcggcacatcaagacaggagagccctttgtgttcaactaccgggaggacctgcaccgctggaaccagaagagatatgaggccctgggggagatcatcaccaagtatgtgtatgagctgctggagaaggactgcaacctgaagaaggtgtccatccctgtggatgccacagaaagtgagcccaagagcttcatcttcatgtctgaagatgccctgaccaacccccagaagctgatggtgctgattcatggcagcggcgtggtgcgggccggccagtgggcccggcggctcatcatcaatgaagacctggacagcggcacccagatccccttcatcaagagagctgtggccgagggctacggcgtgattgtgctgaaccccaatgaaaactacatcgaggtggagaagcccaagatccacgtgcagagcagcagtgacagcagtgatgagcctgctgagaagcgggagaggaaggacaaggtgtccaaggagaccaagaagaggcgggacttctatgagaagtacagaaacccccagcgggagaaggagatgatgcagctgtacatcagagaaaatggcagccctgaggagcacgccatctacgtgtgggaccacttcatcgcccaggccgctgctgaaaatgtgttctttgtggcccacagctatggaggcctggcctttgtggagctgatgatccagcgggaggctgatgtgaagaacaaggtgacagctgtggccctgacagacagcgtgcacaacgtgtggcaccaggaggccggcaagaccatccgggagtggatgagggagaactgctgcaactgggtgagcagcagcgagcccctggacacctctgtggagagcatgctgcctgactgcccccgggtgtctgctggaacagacagacatgagctgacctcctggaagagcttccccagcatcttcaagttcttcacagaggccagcgaggccaagaccagcagcctgaagccagctgtgacccggcgcagccaccgcatcaagcatgaggagctgtag

SEQ ID NO: 7700 - DNA, 840 bp, synthetic construct
  misc_feature 1..840: note = source = /note="Description of Artificial Sequence: Synthetic coding sequence"
  source 1..840: mol_type = other DNA
atgaagatcatcatcctgctgggcttcctgggcgccaccctgagcgcccccctcatcccccagaggctgatgtctgccagcaacagcaatgagctgctgctgaacctgaacaacggccagctgctgcccctgcagctgcagggccccctgaacagctggatcccccccttcagcggcatcctgcagcagcagcagcaggcccagatccctggcctgagccagttcagcctgagcgccctggaccagtttgctggcctgctgcccaaccagatccccctgaccggggaggccagctttgcccagggcgcccaggccggccaggtggaccccctgcagctgcagaccccaccccagacccagcccggccccagccacgtgatgccctacgtgttctccttcaagatgccccaggagcagggccagatgttccagtactaccctgtgtacatggtgctgccctgggagcagccccagcagacagtgcccaggagcccccagcagacccggcagcagcagtatgaggagcagatccccttctacgcccagtttggctacatcccccagctggccgagcccgccatcagcggcggccagcagcagctggcctttgacccccagctgggcacagcccctgagattgctgtgatgagcactggagaggagatcccctacctgcagaaggaggccatcaacttcagacatgacagcgctggggtcttcatgcccagcaccagccccaagcccagcaccaccaacgtgttcaccagcgctgtggaccagaccatcaccccagagctgcctgaggagaaggacaagacagacagcctgcgggagccctag

SEQ ID NO: 7701 - DNA, 444 bp, synthetic construct
  misc_feature 1..444: note = source = /note="Description of Artificial Sequence: Synthetic coding sequence"
  source 1..444: mol_type = other DNA
atgggccctgaggccctgagcagcctgctgctgctgctgctggtggccagcggagatgctgacatgaagggccactttgatcctgccaagtgccgctatgccctgggcatgcaggacaggaccatcccagacagcgacatcagcgccagcagctcctggagcgacagcacagctgcccggcacagccggctggagagcagtgatggagatggagcctggtgcccagctggcagcgtcttccccaaggaggaggagtacctgcaggtggacctgcagaggctgcacctggtggccctggtgggcacccagggcagacatgctgggggcctgggcaaggagttcagccgcagctaccgcctgcgctacagcagagatggaagacgctggatgggctggaaggaccgctggggccaggaggtgatctctggaaatgaagacccctag

SEQ ID NO: 7702 - DNA, 618 bp, synthetic construct
  misc_feature 1..618: note = source = /note="Description of Artificial Sequence: Synthetic coding sequence"
  source 1..618: mol_type = other DNA
atgggcggccctgtgcgggagcccgccctgtctgtggccctgtggctgtcctggggcgccgccctgggcgctgtggcctgtgccatggccctgctgacccagcagacagagctgcagagcctgcggcgggaggtgtcccggctgcagggcactggaggccccagccagaatggagagggctacccctggcagagcctgcctgagcagcacagcgtgctgcacctggtgcccatcaatgccaccagcaaggatgacagtgatgtgacagaggtgatgtggcagcctgccctgcggcggggccggggcctgcaggcccagggctacggcgtgcgcatccaggatgctggggtgtacctgctgtacagccaggtgctcttccaggatgtgaccttcaccatgggccaggtggtgtcccgggagggccagggccggcaggagaccctcttccgctgcatccgctccatgcccagccacccagaccgggcctacaacagctgctacagcgctggggtcttccacctgcaccagggcgacatcctgagcgtcatcatcccccgggcccgggccaagctgaacctgagcccccacggcaccttcctgggctttgtgaagctgtag

SEQ ID NO: 7703 - DNA, 744 bp, synthetic construct
  misc_feature 1..744: note = source = /note="Description of Artificial Sequence: Synthetic coding sequence"
  source 1..744: mol_type = other DNA
atgcctgccagcagccccttcctgctggcccccaagggccccccaggcaacatgggcggccctgtgcgggagcccgccctgtctgtggccctgtggctgtcctggggcgccgccctgggcgctgtggcctgtgccatggccctgctgacccagcagacagagctgcagagcctgcggcgggaggtgtcccggctgcagggcaccggcggccccagccagaatggagagggctacccctggcagagcctgcctgagcagagcagtgatgccctggaggcctgggagaatggagagaggagcaggaagagaagagctgtgctgacccagaagcagaagaagcagcacagcgtgctgcacctggtgcccatcaatgccaccagcaaggatgacagtgatgtgacagaggtgatgtggcagcctgccctgcggcggggccggggcctgcaggcccagggctatggagtgcgcatccaggatgctggggtgtacctgctgtacagccaggtgctcttccaggatgtgaccttcaccatgggccaggtggtgtcccgggagggccagggccggcaggagaccctcttccgctgcatccgctccatgcccagccacccagaccgggcctacaacagctgctacagcgctggggtcttccacctgcaccagggcgacatcctgagcgtcatcatcccccgggcccgggccaagctgaacctgagcccccacggcaccttcctgggcctgtag

SEQ ID NO: 7704 - DNA, 39 bp, synthetic construct
  misc_feature 1..39: note = source = /note="Description of Artificial Sequence: Synthetic coding sequence"
  source 1..39: mol_type = other DNA
atgggcaagtctgagagcctgcagagcctgcagaggtag

SEQ ID NO: 7705 - DNA, 4266 bp, synthetic construct
  misc_feature 1..4266: note = source = /note="Description of Artificial Sequence: Synthetic coding sequence"
  source 1..4266: mol_type = other DNA
atgatgctgccccagaacagctggcacatcgactttggccgctgctgctgccaccagaacctcttctctgctgtggtgacctgcatcctgctgctgaacagctgcttcctgatcagcagcttcaacggcacagacctggagctgcggctggtgaatggagatggcccctgcagcggcaccgtggaggtgaagttccagggccagtggggcaccgtgtgtgatgatggctggaacaccacagccagcacagtggtgtgcaagcagctgggctgccccttctcctttgccatgttccgcttcggccaggccgtgaccaggcatggcaagatctggctggatgatgtgtcctgctatggaaatgaaagtgccctgtgggagtgccagcaccgggagtggggcagccacaactgctaccatggagaagatgtgggcgtgaactgctacggggaggccaacctgggcctgcggctggtggatggcaacaacagctgcagcggccgggtggaggtgaagttccaggagcgctggggcaccatctgtgatgatggctggaacctgaacacagctgctgtggtgtgccggcagctgggctgccccagcagcttcatcagcagtggagtggtgaacagccctgctgtgctgcggcccatctggctggatgacatcctgtgccagggcaatgagctggccctgtggaactgccgccaccggggctggggcaaccacgactgcagccacaatgaagatgtgaccctgacctgctatgacagcagtgacctggagctgcggctggtgggcggcaccaaccgctgcatgggccgggtggagctgaagatccagggccgctggggcaccgtgtgccaccacaagtggaacaatgctgctgctgatgtggtgtgcaagcagctgggctgcggcacagccctgcactttgctggcctgccccacctgcagagcggcagtgatgtggtgtggctggatggagtgtcctgcagcggaaatgaaagcttcctgtgggactgccgccacagcggcaccgtgaactttgactgcctgcaccagaatgatgtgtctgtcatctgcagtgatggagctgacctggagctgcggctggctgatggcagcaacaactgcagcggccgggtggaggtgcgcatccacgagcagtggtggaccatctgtgaccagaactggaagaatgagcaggccctggtggtgtgcaagcagctgggctgccccttctctgtgtttggcagccggcgggccaagcccagcaatgaggcccgggacatctggatcaacagcatcagctgcacaggaaatgaaagtgccctgtgggactgcacctatgatggcaaggccaagaggacctgcttccgccgcagtgatgctggggtcatctgcagcgacaaggctgacctggacctgcggctggtgggcgcccacagcccctgctacggccgcctggaggtgaagtaccagggcgagtggggcaccgtgtgccacgaccgctggagcaccagaaatgctgctgtggtgtgcaagcagctgggctgcggcaagcccctgcacgtgtttggcatgacctacttcaaggaggccagcggccccatctggctggatgatgtgtcctgcattggaaatgaaagcaacatctgggactgtgagcacagcggctggggcaagcacaactgtgtgcacagagaagatgtgattgtgacctgcagcggagatgccacctggggcctgcggctggtgggcggcagcaaccgctgcagcggccgcctggaggtgtacttccagggccgctggggcaccgtgtgtgatgatggctggaacagcaaggctgctgctgtggtgtgcagccagctggactgccccagcagcatcatcggcatgggcctgggcaatgccagcacaggctacggcaagatctggctggatgatgtgtcctgtgatggagatgaaagtgacctgtggagctgcagaaattctggctggggcaacaatgactgcagccacagtgaagatgtgggcgtcatctgcagtgatgccagtgacatggagctgcggctggtgggcggcagcagccgctgtgccggcaaggtggaggtgaatgtgcagggcgctgtgggcatcctgtgtgccaacggctggggcatgaacattgctgaggtggtgtgccggcagctggagtgtggcagcgccatccgggtgtcccgggagccccacttcacagagaggaccctgcacatcctgatgagcaacagcggctgcaccggcggggaggccagcctgtgggactgcatccgctgggagtggaagcagacagcctgccacctgaacatggaggccagcctcatctgcagcgcccaccggcagccccggctggtgggcgctgacatgccctgcagcggccgggtggaggtgaagcatgctgacacctggaggtctgtgtgtgacagcgacttcagcctgcacgccgccaacgtgctgtgccgggagctgaactgtggagatgccatcagcctgtctgtgggggaccactttggaaaaggaaatggcctgacctgggccgagaagttccagtgtgagggcagcgagacccacctggccctgtgccccatcgtgcagcaccctgaggacacctgcatccacagccgggaggtgggcgtggtgtgcagccgctacacagatgtgcggctggtgaatggcaagagccagtgtgatggccaggtggagatcaacgtgctgggccactggggcagcctgtgtgacacccactgggaccctgaagatgcccgggtgctgtgccggcagctgagctgtggcacagccctgagcaccaccggcggcaagtacatcggggagaggtctgtgcgggtgtggggccaccgcttccactgcctgggcaatgaaagcctgctggacaactgccagatgacagtgctgggcgccccaccctgcatccacggcaacacagtgtctgtcatctgcaccggcagcctgacccagcccctcttcccctgcctggccaacgtgtctgacccctacctgtctgctgtgcctgagggcagcgccctgatctgcctggaggacaagaggctgcggctggtggatggagacagccgctgtgccggccgggtggagatctaccatgatggcttctggggcaccatctgtgatgatggctgggacctgagtgatgcccacgtggtgtgccagaagctgggctgcggcgtggccttcaatgccaccgtgtctgcccactttggagagggcagcggccccatctggctggatgacctgaactgcaccggcatggagagccacctgtggcagtgccccagccggggctggggccagcacgactgccgccacaaggaggatgctggggtcatctgcagcgagttcaccgccctgcggctgtacagcgagacagaaacagagagctgtgccggccgcctggaggtgttctacaacggcacctggggctctgtgggcagaagaaacatcaccacagccatcgccggcatcgtgtgccggcagctgggctgtggggagaatggagtggtgtccctggcccccctgagcaagacaggcagcggcttcatgtgggtggatgacatccagtgccccaagacccacatcagcatctggcagtgcctgagcgccccctgggagcggcgcatcagcagccctgctgaggagacctggatcacctgtgaagatcgcatccgggtgcggggcggggacacagagtgcagcggccgggtggagatctggcacgccggctcctggggcaccgtgtgtgatgacagctgggacctggccgaggccgaggtggtgtgccagcagctgggctgcggcagcgccctggccgccctgagagatgccagctttggccagggcaccggcaccatctggctggatgacatgcgctgcaagggaaatgaaagcttcctgtgggactgccacgccaagccctggggccagagcgactgtggccacaaggaggatgctggggtgcgctgcagcggccagagcctgaagagcctgaatgccagcagcggccacctggccctgatcctgagcagcatcttcggcctgctgctgctggtgctcttcatcctcttcctgacctggtgccgggtgcagaagcagaagcacctgcccctgagagatgacacccccaaccacggctgtgaagatgccagtgacaccagcctgctgggcgtgctgcctgccagcgaggccaccaagtag

SEQ ID NO: 7706 - DNA, 1410 bp, synthetic construct; identical to SEQ ID NO: 6897
  misc_feature 1..1410: note = source = /note="Description of Artificial Sequence: Synthetic coding sequence"
  source 1..1410: mol_type = other DNA

SEQ ID NO: 7707 - DNA, 837 bp, synthetic construct; identical to SEQ ID NO: 7217
  misc_feature 1..837: note = source = /note="Description of Artificial Sequence: Synthetic coding sequence"
  source 1..837: mol_type = other DNA

SEQ ID NO: 7708 - DNA, 1128 bp, synthetic construct
  misc_feature 1..1128: note = source = /note="Description of Artificial Sequence: Synthetic coding sequence"
  source 1..1128: mol_type = other DNA
atggagtttgagatcaccttccggccagattctggagatggagtgctgctgtacagctatgacaccggcagcaaggacttcctgagcatcaacctggccggcggccacgtggagttccgctttgactgtggcagcggcactggagtgctgcggtctgaggaccccctgaccctgggcaactggcatgagctgcgggtgtccaggacagccaagaatggcatcctgcaggtggacaagcagaagatcgtggagggcatggccgagggcggcttcacccagatcaagtgcaacacagacatcttcatcggcggcgtgcccaactatgatgatgtgaagaagaacagcggcgtgctgaagcccttcagcggcagcatccagaagatcatcctgaatgacaggaccatccacgtgaagcatgacttcaccagcggcgtgaatgtggagaatgctgcccacccctgtgtgcgggccccctgtgcccatggaggcagctgccggcccaggaaggagggctatgactgtgactgccccctgggctttgagggcctgcactgccagaaggccatcatcgaggccatcgagatcccccagttcatcggccgcagctacctgacctatgacaacccagacatcctgaagagggtgtctggcagccgcagcaatgtgttcatgaggttcaagaccacagccaaggatggcctgctgctgtggaggggggacagccccatgaggcccaacagcgacttcatcagcctgggcctgagagatggagccctggtgttctcctacaacctgggcagcggcgtggccagcatcatggtgaatggcagcttcaatgatggccgctggcaccgggtgaaggctgtgagagatggccagagcggcaagatcaccgtggatgattatggagccaggacaggcaagagccctggcatgatgaggcagctgaacatcaatggagccctgtatgtgggcggcatgaaggagatcgccctgcacaccaaccggcagtacatgaggggcctggtgggctgcatcagccacttcaccctgagcacagactaccacatcagcctggtggaggatgctgtggatggcaagaacatcaacacctgtggggccaagtag

SEQ ID NO: 7709 - DNA, 459 bp, synthetic construct
  misc_feature 1..459: note = source = /note="Description of Artificial Sequence: Synthetic coding sequence"
  source 1..459: mol_type = other DNA
atgaggttcaagaccacagccaaggatggcctgctgctgtggaggggggacagccccatgaggcccaacagcgacttcatcagcctgggcctgagagatggagccctggtgttctcctacaacctgggcagcggcgtggccagcatcatggtgaatggcagcttcaatgatggccgctggcaccgggtgaaggctgtgagagatggccagagcggcaagatcaccgtggatgattatggagccaggacaggcaagagccctggcatgatgaggcagctgaacatcaacggggccctgtatgtgggcggcatgaaggagatcgccctgcacaccaaccggcagtacatgaggggcctggtgggctgcatcagccacttcaccctgagcacagactaccacatcagcctggtggaggatgctgtggatggcaagaacatcaacacctgtggggccaagtag

SEQ ID NO: 7710 - DNA, 1050 bp, synthetic construct
  misc_feature 1..1050: note = source = /note="Description of Artificial Sequence: Synthetic coding sequence"
  source 1..1050: mol_type = other DNA
atgacagccctgcccggccccctgtggctgctgggcctggccctgtgtgccctgggcggcggcggccctggcctgcggcccccacctggctgcccccagaggcggctgggcgcccgggagaggagagatgtgcagcgggagatcctggccgtgctgggcctgcccggccggccccggccccgggcccctcctgctgccagccggctgcctgccagcgcccccctcttcatgctggacctgtaccacgccatggctggagatgatgatgaagatggagccccagctgagcggcggctgggccgggctgacctggtgatgagctttgtgaacatggtggagcgggaccgggccctgggccaccaggagccccactggaaggagttccgctttgacctgacccagatcccagctggggaggccgtgacagctgctgagttccgcatctacaaggtgcccagcatccacctgctgaacagaaccctgcacgtgtccatgttccaggtggtgcaggagcagagcaaccgggagagtgacctcttcttcctggacctgcagaccctgcgggctggagatgagggctggctggtgctggatgtgacagctgccagtgactgctggctgctgaagaggcacaaggacctgggcctgcggctgtatgtggagacagaagatggagagacctggacaggctggggctggaccaaggacagccggctgcagatgtggaagctgcggctgagcaggaccccctgggtgctgagcctgcacgcccctggccctgcccaggccccagctgagcggcccctgctgtgcctgctgcagggccactgcccagccagccccagccccatccgcacccccagggctgtgcggcccctgcggcggcggcagcccaagaagagcaatgagctgccccaggccaaccggctgcccggcatctttgatgatgtgcacggcagccacggccggcaggtgtgcagaagacatgagctgtatgtgtccttccaggacctgggctggctggtgattgctgacagcagctgcttctag

SEQ ID NO: 7711 - DNA, 1617 bp, synthetic construct; identical to SEQ ID NO: 7043
  misc_feature 1..1617: note = source = /note="Description of Artificial Sequence: Synthetic coding sequence"
  source 1..1617: mol_type = other DNA

SEQ ID NO: 7712 - DNA, 630 bp, synthetic construct
  misc_feature 1..630: note = source = /note="Description of Artificial Sequence: Synthetic coding sequence"
  source 1..630: mol_type = other DNA
atgtccttcagcgccaccatcctcttcagccccccatctggcagcgaggcccgctgctgctgctgtgcctgcaagtctgagaccaatggaggcaacacaggcagccagggcggcaaccccccacccagcacccccatcaccgtgactggacatggcctggccgtgcagagcagcgagcagctgctgcacgtgatctaccagagggtggacaaggctgtgggcctggccgaggccgccctgggcctggcccgggccaacaatgagctgctgaagaggctgcaggaggaggtgggggacctgcggcagggcaaggtgtccatcccagatgaagatggagagagccgggcccacagcagccccccagaggagcccggccccctgaaggagagccctggagaggccttcaaggccctgtctgctgtggaggaggagtgtgacagcgtgggcagcggcgtgcaggtggtgattgaggagctgcggcagctgggcgccgcctctgtgggccctggccccctgggcttccctgccacccagagggacatgaggctgcccggctgcaccctggccgccagcgaggccgcccccctgctgaaccccctggtggatgattatgtggccagcgagggctag

SEQ ID NO: 7713 - DNA, 1617 bp, synthetic construct; identical to SEQ ID NO: 7043
  misc_feature 1..1617: note = source = /note="Description of Artificial Sequence: Synthetic coding sequence"
  source 1..1617: mol_type = other DNA

SEQ ID NO: 7714 - DNA, 1524 bp, synthetic construct; identical to SEQ ID NO: 7049
  misc_feature 1..1524: note = source = /note="Description of Artificial Sequence: Synthetic coding sequence"
  source 1..1524: mol_type = other DNA

SEQ ID NO: 7715 - DNA, 753 bp, synthetic construct
  misc_feature 1..753: note = source = /note="Description of Artificial Sequence: Synthetic coding sequence"
  source 1..753: mol_type = other DNA
atggccagcgagcggctgcccaacagacctgcctgcctgctggtggccagcggggctgctgagggcgtgtctgcccagagcttcctgcactgcttcaccatggccagcacagccttcaacctgcaggtggccacccctgggggcaaggccatggagtttgtggatgtgacagagagcaatgcccgctgggtgcaggacttccggctgaaggcctatgccagccctgccaagctggagagcattgatggagcccgctaccacgccctgctgatccccagctgccctggggccctgacagacctggccagcagcggcagcctggcccgcatcctgcagcacttccacagcgagagcaagcccatctgtgctgtgggccacggcgtggccgccctgtgctgtgccaccaatgaagatcgctcctgggtgtttgacagctacagcctgaccggccccagcgtgtgtgagctggtgcgggcccctggctttgcccggctgcccctggtggtggaggactttgtgaaggacagcggggcctgcttctctggagctgctgccagctgccccaaggctgacagacactggcagcacttccctgtggaggagatcttcctggcctgtggcttcaaggtggccggcctgggcgccgcccctggctggggccggggcggcaagcaggaggacaggcctcctgaggagcagaggcgggccggggaggacttccccatctaccagtgtgtgttcatctacccctag

SEQ ID NO: 7716 - DNA, 1386 bp, synthetic construct; identical to SEQ ID NO: 7292
  misc_feature 1..1386: note = source = /note="Description of Artificial Sequence: Synthetic coding sequence"
  source 1..1386: mol_type = other DNA

SEQ ID NO: 7717 - DNA, 1386 bp, synthetic construct; identical to SEQ ID NO: 7292
  misc_feature 1..1386: note = source = /note="Description of Artificial Sequence: Synthetic coding sequence"
  source 1..1386: mol_type = other DNA

SEQ ID NO: 7718 - DNA, 1386 bp, synthetic construct; identical to SEQ ID NO: 7292
  misc_feature 1..1386: note = source = /note="Description of Artificial Sequence: Synthetic coding sequence"
  source 1..1386: mol_type = other DNA

SEQ ID NO: 7719 - DNA, 1452 bp, synthetic construct
  misc_feature 1..1452: note = source = /note="Description of Artificial Sequence: Synthetic coding sequence"
  source 1..1452: mol_type = other DNA
atgatcacagcccactgcagcctggacctgctgggctctgtggccgtgctgtgtgtgtgtgacctgagccctgcccagtgtgacatcaactgctgctgtgaccctgactgcagctctgtggacttctctgtgttcagcgcctgcagcgtgcctgtggtgactggagacagccagttctgcagccagaaggccgtcatctacagcctgaacttcaccgccaaccccccccagagggtgtttgagctggtggaccagatcaaccccagcatcttctgcatccacatcaccaactacaagccagccctgtccttcatcaaccctgaggtgcctgatgagaacaactttgacaccctgatgaagaccagtgatggcttcaccctgaatgctgagagctatgtgtccttcaccaccaagctggacatccccacagctgccaagtatgaatatggagtgcccctgcagaccagtgacagcttcctgcgcttccccagcagcctgaccagcagcctgtgcacagacaacaacccagctgccttcctggtgaaccaggccgtgaagtgcaccaggaagatcaacctggagcagtgtgaggagattgaggccctgtccatggccttctacagcagccctgagatcctgcgggtgcctgacagcaggaagaaggtgcccatcaccgtgcagagcatcgtcatccagagcctgaacaagaccctgacccggcgggaggacacagatgtgctgcagcccaccctggtgaatgccggccacttcagcctgtgtgtgaatgtggtgctggaggtgaagtacagcctgacctacacagatgctggggaggtgaccaaggctgacctgagctttgtgctgggcaccgtgtcctctgtggtggtgcccctgcagcagaagtttgagatccacttcctgcaggagaacacccagcctgtgcccctgagcggcaaccctggctacgtggtgggcctgcccctggccgccggcttccagccccacaagacaggagccctgccctgccagctggtggcccagaaggtgaagagcctgctgtggggccagggcttcccagactatgtggccccctttggaaacagccaggcccaggacatgctggactgggtgcccatccacttcatcacccagagcttcaacaggaagcactttgtgctgcaggacagctgccagctgcccggggccctggtgattgaggtgaagtggaccaagtatggcagcctgctgaacccccaggccaagatcgtgaatgtgacagccaacctgatcagcagcagcttccctgaggccaacagcggaaatgaaagaaccatcctgatcagcacagctgtgacctttgtggatgtgtctgccccagctgaggccggcttccgggcccccccagccatcaatgcccggctgcccttcaacttcttcttcccctttgtgtag

SEQ ID NO: 7720 - DNA, 1596 bp, synthetic construct
  misc_feature 1..1596: note = source = /note="Description of Artificial Sequence: Synthetic coding sequence"
  source 1..1596: mol_type = other DNA
atgtgccagctgctggagagcaccgtcatccagccccagggcgacagccctgtggccgtgctgtgtgtgtgtgacctgagccctgcccagtgtgacatcaactgctgctgtgaccctgactgcagctctgtggacttctctgtgttcagcgcctgcagcgtgcctgtggtgactggagacagccagttctgcagccagaaggccgtcatctacagcctgaacttcaccgccaaccccccccagagggtgtttgagctggtggaccagatcaaccccagcatcttctgcatccacatcaccaactacaagccagccctgtccttcatcaaccctgaggtgcctgatgagaacaactttgacaccctgatgaagaccagtgatggcttcaccctgaatgctgagagctatgtgtccttcaccaccaagctggacatccccacagctgccaagtatgaatatggagtgcccctgcagaccagtgacagcttcctgcgcttccccagcagcctgaccagcagcctgtgcacagacaacaacccagctgccttcctggtgaaccaggccgtgaagtgcaccaggaagatcaacctggagcagtgtgaggagattgaggccctgtccatggccttctacagcagccctgagatcctgcgggtgcctgacagcaggaagaaggtgcccatcaccgtgcagagcatcgtcatccagagcctgaacaagaccctgacccggcgggaggacacagatgtgctgcagcccaccctggtgaatgccggccacttcagcctgtgtgtgaatgtggtgctggaggtgaagtacagcctgacctacacagatgctggggaggtgaccaaggctgacctgagctttgtgctgggcaccgtgtcctctgtggtggtgcccctgcagcagaagtttgagatccacttcctgcaggagaacacccagcctgtgcccctgagcggcaaccctggctacgtggtgggcctgcccctggccgccggcttccagccccacaagatgagcggcatcatccagaccaccaacagatatggccagctgaccatcctgcacagcaccacagagcaggactgcctggccctggagggcgtgaggacccctgtgctgtttggctacaccatgcagagcggctgcaagctgcggctgaccggggccctgccctgccagctggtggcccagaaggtgaagagcctgctgtggggccagggcttcccagactatgtggcccccttcggcaacagccaggcccaggacatgctggactgggtgcccatccacttcatcacccagagcttcaacaggaaggacagctgccagctgcccggggccctggtgattgaggtgaagtggaccaagtatggcagcctgctgaacccccaggccaagatcgtgaatgtgacagccaacctgatcagcagcagcttccctgaggccaacagcggaaatgaaagaaccatcctgatcagcacagctgtgacctttgtggatgtgtctgccccagctgaggccggcttccgggcccccccagccatcaatgcccggctgcccttcaacttcttcttcccctttgtgtag

SEQ ID NO: 7721 - DNA, 1722 bp, synthetic construct
  misc_feature 1..1722: note = source = /note="Description of Artificial Sequence: Synthetic coding sequence"
  source 1..1722: mol_type = other DNA
atgaggccccggggcctgccccccctgctggtggtgctgctgggctgctgggcctctgtgtctgcccagacagatgccaccccagctgtgaccacagagggcctgaacagcacagaggccgccctggccaccttcggcaccttccccagcaccaggcctcctggcaccccccgggcccctggccccagcagcggcccccggcccacccctgtgacagatgtggccgtgctgtgtgtgtgtgacctgagccctgcccagtgtgacatcaactgctgctgtgaccctgactgcagctctgtggacttctctgtgttcagcgcctgcagcgtgcctgtggtgactggagacagccagttctgcagccagaaggccgtcatctacagcctgaacttcaccgccaaccccccccagagggtgtttgagctggtggaccagatcaaccccagcatcttctgcatccacatcaccaactacaagccagccctgtccttcatcaaccctgaggtgcctgatgagaacaactttgacaccctgatgaagaccagtgatggcttcaccctgaatgctgagagctatgtgtccttcaccaccaagctggacatccccacagctgccaagtatgaatatggagtgcccctgcagaccagtgacagcttcctgcgcttccccagcagcctgaccagcagcctgtgcacagacaacaacccagctggccaggcctactggttcacccctgtgatcccagccctgtgggaggccgaggcccggggcagcctggaggtgcctgacagcaggaagaaggtgcccatcaccgtgcagagcatcgtcatccagagcctgaacaagaccctgacccggcgggaggacacagatgtgctgcagcccaccctggtgaatgccggccacttcagcctgtgtgtgaatgtggtgctggaggtgaagtacagcctgacctacacagatgctggggaggtgaccaaggctgacctgagctttgtgctgggcaccgtgtcctctgtggtggtgcccctgcagcagaagtttgagatccacttcctgcaggagaacacccagcctgtgcccctgagcggcaaccctggctacgtggtgggcctgcccctggccgccggcttccagccccacaagggcagcggcatcatccagaccaccaacagatatggccagctgaccatcctgcacagcaccacagagcaggactgcctggccctggagggcgtgaggacccctgtgctgtttggctacaccatgcagagcggctgcaagctgcggctgaccggggccctgccctgccagctggtggcccagaaggtgaagagcctgctgtggggccagggcttcccagactatgtggcccccttcggcaacagccaggcccaggacatgctggactgggtgcccatccacttcatcacccagagcttcaacaggaaggacagctgccagctgcccggggccctggtgattgaggtgaagtggaccaagtatggcagcctgctgaacccccaggccaagatcgtgaatgtgacagccaacctgatcagcagcagcttccctgaggccaacagcggaaatgaaagaaccatcctgatcagcacagctgtgacctttgtggatgtgtctgccccagctgaggccggcttccgggcccccccagccatcaatgcccggctgcccttcaacttcttcttcccctttgtgtag

SEQ ID NO: 7722 - DNA, 1230 bp, synthetic construct
  misc_feature 1..1230: note = source = /note="Description of Artificial Sequence: Synthetic coding sequence"
  source 1..1230: mol_type = other DNA
atgaagaccagtgatggcttcaccctgaatgctgagagctatgtgtccttcaccaccaagctggacatccccacagctgccaagtatgaatatggagtgcccctgcagaccagtgacagcttcctgcgcttccccagcagcctgaccagcagcctgtgcacagacaacaacccagctgccttcctggtgaaccaggccgtgaagtgcaccaggaagatcaacctggagcagtgtgaggagattgaggccctgtccatggccttctacagcagccctgagatcctgcgggtgcctgacagcaggaagaaggtgcccatcaccgtgcagagcatcgtcatccagagcctgaacaagaccctgacccggcgggaggacacagatgtgctgcagcccaccctggtgaatgccggccacttcagcctgtgtgtgaatgtggtgctggaggtgaagtacagcctgacctacacagatgctggggaggtgaccaaggctgacctgagctttgtgctgggcaccgtgtcctctgtggtggtgcccctgcagcagaagtttgagatccacttcctgcaggagaacacccagcctgtgcccctgagcggcaaccctggctacgtggtgggcctgcccctggccgccggcttccagccccacaagggcagcggcatcatccagaccaccaacagatatggccagctgaccatcctgcacagcaccacagagcaggactgcctggccctggagggcgtgaggacccctgtgctgtttggctacaccatgcagagcggctgcaagctgcggctgaccggggccctgccctgccagctggtggcccagaaggtgaagagcctgctgtggggccagggcttcccagactatgtggcccccttcggcaacagccaggcccaggacatgctggactgggtgcccatccacttcatcacccagagcttcaacaggaaggacagctgccagctgcccggggccctggtgattgaggtgaagtggaccaagtatggcagcctgctgaacccccaggccaagatcgtgaatgtgacagccaacctgatcagcagcagcttccctgaggccaacagcggaaatgaaagaaccatcctgatcagcacagctgtgacctttgtggatgtgtctgccccagctgaggccggcttccgggcccccccagccatcaatgcccggctgcccttcaacttcttcttcccctttgtgtag

SEQ ID NO: 7723 - DNA, 1779 bp, synthetic construct
  misc_feature 1..1779: note = source = /note="Description of Artificial Sequence: Synthetic coding sequence"
  source 1..1779: mol_type = other DNA
atgaggccccggggcctgccccccctgctggtggtgctgctgggctgctgggcctctgtgtctgcccagacagatgccaccccagctgtgaccacagagggcctgaacagcacagaggccgccctggccaccttcggcaccttccccagcaccaggcctcctggcaccccccgggcccctggccccagcagcggcccccggcccacccctgtgacagatgtggccgtgctgtgtgtgtgtgacctgagccctgcccagtgtgacatcaactgctgctgtgaccctgactgcagctctgtggacttctctgtgttcagcgcctgcagcgtgcctgtggtgactggagacagccagttctgcagccagaaggccgtcatctacagcctgaacttcaccgccaaccccccccagagggtgtttgagctggtggaccagatcaaccccagcatcttctgcatccacatcaccaactacaagccagccctgtccttcatcaaccctgaggtgcctgatgagaacaactttgacaccctgatgaagaccagtgatggcttcaccctgaatgctgagagctatgtgtccttcaccaccaagctggacatccccacagctgccaagtatgaatatggagtgcccctgcagaccagtgacagcttcctgcgcttccccagcagcctgaccagcagcctgtgcacagacaacaacccagctgccttcctggtgaaccaggccgtgaagtgcaccaggaagatcaacctggagcagtgtgaggagattgaggccctgtccatggccttctacagcagccctgagatcctgcgggtgcctgacagcaggaagaaggtgcccatcaccgtgcagagcatcgtcatccagagcctgaacaagaccctgacccggcgggaggacacagatgtgctgcagcccaccctggtgaatgccggccacttcagcctgtgtgtgaatgtggtgctggaggtgaagtacagcctgacctacacagatgctggggaggtgaccaaggctgacctgagctttgtgctgggcaccgtgtcctctgtggtggtgcccctgcagcagaagtttgagatccacttcctgcaggagaacacccagcctgtgcccctgagcggcaaccctggctacgtggtgggcctgcccctggccgccggcttccagccccacaagggcagcggcatcatccagaccaccaacagatatggccagctgaccatcctgcacagcaccacagagcaggactgcctggccctggagggcgtgaggacccctgtgctgtttggctacaccatgcagagcggctgcaagctgcggctgaccggggccctgccctgccagctggtggcccagaaggtgaagagcctgctgtggggccagggcttcccagactatgtggcccccttcggcaacagccaggcccaggacatgctggactgggtgcccatccacttcatcacccagagcttcaacaggaagcactttgtgctgcaggacagctgccagctgcccggggccctggtgattgaggtgaagtggaccaagtatggcagcctgctgaacccccaggccaagatcgtgaatgtgacagccaacctgatcagcagcagcttccctgaggccaacagcggaaatgaaagaaccatcctgatcagcacagctgtgacctttgtggatgtgtctgccccagctgaggccggcttccgggcccccccagccatcaatgcccggctgcccttcaacttcttcttcccctttgtgtag

SEQ ID NO: 7724 - DNA, 552 bp, synthetic construct
  misc_feature 1..552: note = source = /note="Description of Artificial Sequence: Synthetic coding sequence"
  source 1..552: mol_type = other DNA
atgatcttcctgctgctgatgctgagcctggagctgcagctgcaccagattgctgccctcttcaccgtgacagtgcccaaggagctgtacatcatcgagcacggcagcaatgtgaccctggagtgcaactttgacaccggcagccacgtgaacctgggcgccatcacagccagcctgcagaaggtggagaatgacaccagcccccaccgggagcgggccaccctgctggaggagcagctgcccctgggcaaggccagcttccacatcccccaggtgcaggtgagagatgagggccagtaccagtgcatcatcatctacggcgtggcctgggactacaagtacctgaccctgaaggtgaagggccagatggagcccaggacccaccccacctggctgctgcacatcttcatccccttctgcatcatcgccttcatcttcatcgccaccgtgattgccctgaggaagcagctgtgccagaagctgtacagcagcaaggacaccaccaagaggcctgtgaccaccaccaagcgggaggtgaacagcgccatctag

SEQ ID NO: 7725 - DNA, 822 bp, synthetic construct
  misc_feature 1..822: note = source = /note="Description of Artificial Sequence: Synthetic coding sequence"
  source 1..822: mol_type = other DNA
atgatcttcctgctgctgatgctgagcctggagctgcagctgcaccagattgctgccctcttcaccgtgacagtgcccaaggagctgtacatcatcgagcacggcagcaatgtgaccctggagtgcaactttgacaccggcagccacgtgaacctgggcgccatcacagccagcctgcagaaggtggagaatgacaccagcccccaccgggagcgggccaccctgctggaggagcagctgcccctgggcaaggccagcttccacatcccccaggtgcaggtgagagatgagggccagtaccagtgcatcatcatctacggcgtggcctgggactacaagtacctgaccctgaaggtgaaggccagctacaggaagatcaacacccacatcctgaaggtgcctgagacagatgaggtggagctgacctgccaggccaccggctaccccctggccgaggtgtcctggcccaacgtgtctgtgcctgccaacaccagccacagcaggaccccagagggcctgtaccaggtgacctctgtgctgcggctgaagcccccacctggcaggaacttcagctgtgtgttctggaacacccacgtgcgggagctgaccctggccagcattgacctgcagagccagatggagcccaggacccaccccacctggctgctgcacatcttcatccccttctgcatcatcgccttcatcttcatcgccaccgtgattgccctgaggaagcagctgtgccagaagctgtacagcagcaaggacaccaccaagaggcctgtgaccaccaccaagcgggaggtgaacagcgccatctag

SEQ ID NO: 7726 - DNA, 372 bp, synthetic construct
  misc_feature 1..372: note = source = /note="Description of Artificial Sequence: Synthetic coding sequence"
  source 1..372: mol_type = other DNA
ctgggggaccggcggggccgcagcagcggggcccgggctgctgctgtgggcagcactggagagcggctggagatggaggaggacatcctgcagctgcaggccgaggccacagctgaggtgctgggggaggtggcccaggcccagaaggtgctgcgggacagcgtgcagaggctggaggtgcagctgcggagcgcctggctgggccctgcctaccgggagtttgaggtgctgaaggcccatgctgacaagcagagccacatcctgtgggccctgaccggccacgtgcagaggcagaggcgggagatggtggcccagcagcaccggctgcggcagatccaggagcggctgcacacagctgccctgcctgcctag

SEQ ID NO: 7727 - DNA, 345 bp, synthetic construct
  misc_feature 1..345: note = source = /note="Description of Artificial Sequence: Synthetic coding sequence"
  source 1..345: mol_type = other DNA
atggccagcttcaagctggccgacagcgtgtgggaggacagcctgagcaagaggcagaggaaccagggccgcatgaagaccctgcctgtgctggtgctgagcctgaccctgctgactgtgttcagcgagaccagccccatcctgacagagaagcaggccaagcagctgctgcggagccggcggcaggaccggcccagcaagccaggcttcccagatgagcccatgagggagtacatgcaccacctgctggccctggagcacagagctgaggagcagttcctggagcactggctgaacccccactgcaagccccactgtgacaggaaccgcatccaccctgtgtag

SEQ ID NO: 7728 - DNA, 345 bp, synthetic construct; identical to SEQ ID NO: 7727
  misc_feature 1..345: note = source = /note="Description of Artificial Sequence: Synthetic coding sequence"
  source 1..345: mol_type = other DNA

SEQ ID NO: 7729 - DNA, 444 bp, synthetic construct
  misc_feature 1..444: note = source = /note="Description of Artificial Sequence: Synthetic coding sequence"
  source 1..444: mol_type = other DNA
atggccctgcagaggacccacagcctgctgctgctgctgctgctgaccctgctgggcctgggcctggtgcagcccagctatggccaggacggcatgtaccagcgcttcctgcggcagcacgtgcaccctgaggagaccggcggcagtgaccgctactgcaacctgatgatgcagaggaggaagatgaccctgtaccactgcaagcgcttcaacaccttcatccacgaggacatctggaacatccgcagcatctgcagcaccaccaacatccagtgcaagaatggcaagatgaactgccacgagggcgtggtgaaggtgacagactgccgggacaccggcagcagccgggcccccaactgccgctaccgggccatcgccagcaccaggagagtggtgattgcctgtgagggcaacccccaggtgcctgtgcactttgatggatag

SEQ ID NO: 7730 - DNA, 1302 bp, synthetic construct
  misc_feature 1..1302: note = source = /note="Description of Artificial Sequence: Synthetic coding sequence"
  source 1..1302: mol_type = other DNA
atggagccccagctgggccctgaggccgccgccctgcggcccggctggctggccctgctgctgtgggtgtctgccctgagctgcagcttcagcctgcctgccagcagcctgagcagcctggtgccccaggtgaggaccagctacaactttggccgcaccttcctgggcctggacaagtgcaatgcctgcatcggcaccagcatctgcaagaagttcttcaaggaggagatccgcagtgacaactggctggccagccacctgggcctgcccccagacagcctgctgagctacccagccaactacagtgatgacagcaagatctggaggcctgtggagatcttccggctggtgtccaagtaccagaatgagatcagtgaccggcgcatctgtgccagcgccagcgcccccaagacctgcagcattgagcgggtgctgaggaagacagagcgcttccagaagtggctgcaggccaagaggctgaccccagacctggtgcagggcctggccagccccctgctgcgctgccccagccagaggctgctggacagagtggtgcggcgctatgcagaggtggctgatgctggcagcatcttcatggaccacttcacagaccgggacaagctgcggctgctgtacaccctggccgtgaacagccaccccatcctgctgcagatcttccctggagctgagggctggcccctgcccaagtacctgggcagctgtggccgcttcctggtgtccaccagcacccggcccctgcaggagttctatgatgcccccccagaccaggccgctgacctggcctaccagctgctgggcgtgctggagagcctgcggagcaatgacctgaactacttcttctacttcacccacattgatgctggcatgtttggagtcttcaacaacggccacctgttcatcagagatgccagcgctgtgggcgtcatcgacaagcaggagggcagccaggaggccaacagagctggggagaacaaggacatcttcagctgcctggtgtctggctgccaggcccagctgcccagctgtgagagcatcagcgagaagcagagcctggtgctggtgtgccagaagctgctgccccggctgctgcagggccgcttccccagccctgtgcaggatgacatcgacagcatcctggtgcagtgtggggacagcatccggccagaccctgaggtgctgggcgccgccagccagctgaaggacatcctgcggcccctgcggacctgtgacagcagatttgcctaccgctacccagactgcaagtacaatgacaagttctag

SEQ ID NO: 7731 - DNA, 600 bp, synthetic construct; identical to SEQ ID NO: 7206
  misc_feature 1..600: note = source = /note="Description of Artificial Sequence: Synthetic coding sequence"
  source 1..600: mol_type = other DNA

SEQ ID NO: 7732 - DNA, 600 bp, synthetic construct; identical to SEQ ID NO: 7206
  misc_feature 1..600: note = source = /note="Description of Artificial Sequence: Synthetic coding sequence"
  source 1..600: mol_type = other DNA

SEQ ID NO: 7733 - DNA, 291 bp, synthetic construct
  misc_feature 1..291: note = source = /note="Description of Artificial Sequence: Synthetic coding sequence"
  source 1..291: mol_type = other DNA
atgctgccctgcctggccctgctgctgctgatggagctgtctgtgtgcaccgtggccggagatggaggagaggagcagaccctgagcacagaggccgagacctgggagggcgccggccccagcatccagctgcagctgcaggaggtgaagacaggcaaggccagccagttcttcggcctgatgggcaagagggtgggcgcctaccagctggagcacaccttccagggcctgctgggcaagaggagcctcttcacagagggcagagaagatgaggcccagggcagcgagtag

SEQ ID NO: 7734 - DNA, 981 bp, synthetic construct
  misc_feature 1..981: note = source = /note="Description of Artificial Sequence: Synthetic coding sequence"
  source 1..981: mol_type = other DNA
atgacaggcctgtgtggctacagcgccccagacatgaggggcctgcggctcatcatgatccctgtggagctgctgctgtgctacctgctgctgcaccctgtggatgccaccagctatggcaagcagaccaacgtgctgatgcacttccccctgagcctggagagccagacccccagcagtgaccccctgagctgccagttcctgcaccccaagagcctgcccggcttcagccacatggcccccctgcccaagttcctggtgtccctggccctgagaaatgccctggaggaggccggctgccaggctgatgtgtgggccctgcagctgcagctgtaccggcagggcggcgtgaatgccacccaggtgctgatccagcacctgcggggcctgcagaagggccgcagcacagaaagaaatgtgtctgtggaggccctggccagcgccctgcagctgctggcccgggagcagcagagcacaggccgggtgggccgcagcctgcccacagaggactgtgaaaatgagaaggagcaggccgtgcacaacgtggtgcagctgctgcccggggtgggcaccttctacaacctgggcacagccctgtactatgccacccagaactgcctgggcaaggcccgggagcggggcagagatggagccatcgacctgggctatgacctgctgatgaccatggccggcatgtctgggggccccatgggcctggccatctctgctgccctgaagccagccctgcggtctggagtgcagcagctgatccagtactaccaggaccagaaggatgccaacatcagccagcctgagaccaccaaggagggcctgcgggccatcagtgatgtgtctgacctggaggagaccaccaccctggccagcttcatcagcgaggtggtgtcctctgccccctactggggctgggccatcatcaagagctatgacctggaccctggagctggcagcctggagatctag

SEQ ID NO: 7735 - DNA, 1476 bp, synthetic construct
  misc_feature 1..1476: note = source = /note="Description of Artificial Sequence: Synthetic coding sequence"
  source 1..1476: mol_type = other DNA
atgcgctggatcctgtgctggagcctgaccctgtgcctgatggcccagacagccctgggcgccctgcacaccaagaggccccaggtggtgaccaagtatggcaccctgcagggcaagcagatgcacgtgggcaagacccccatccaggtgttcctgggcgtgcccttcagcaggcctcccctgggcatcctgcgctttgcccctcctgagcccccagagccctggaagggcatcagagatgccaccacctacccacctggctgcctgcaggagagctggggccagctggcctccatgtatgtgtccacccgggagcgctacaagtggctgcgcttcagcgaggactgcctgtacctgaatgtgtatgccccagcccgggcccctggggacccccagctgcctgtgatggtgtggttccctgggggcgccttcatcgtgggcgccgccagcagctatgagggcagtgacctggccgcccgggagaaggtggtgctggtgttcctgcagcaccggctgggcatcttcggcttcctgagcacagatgacagccacgcccggggcaactggggcctgctggaccagatggccgccctgcgctgggtgcaggagaacattgctgccttcggcggggaccctggaaatgtgaccctgtttggccagagcgctggggccatgagcatcagcggcctgatgatgagccccctggccagcggcctcttccaccgggccatcagccagagcggcacagccctcttccgcctcttcatcaccagcaaccccctgaaggtggccaagaaggtggcccacctggccggctgcaaccacaacagcacccagatcctggtgaactgcctgcgggccctgagcggcaccaaggtgatgagggtgagcaacaagatgaggttcctgcagctgaacttccagagggaccctgaggagatcatctggagcatgagccctgtggtggatggagtggtgatcccagatgaccccctggtgctgctgacccagggcaaggtgtcctctgtgccctacctgctgggcgtgaacaacctggagttcaactggctgctgccctacaacatcaccaaggagcaggtgcccctggtggtggaggagtacctggacaacgtgaatgaacatgactggaagatgctgaggaacaggatgatggacatcgtgcaggatgccacctttgtgtatgccaccctgcagacagcccactaccaccggggcctgtccatgggcaaggagaaggccctgagcctgcagatgatgaagtactgggccaactttgccaggactggaaaccccaatgatggcaacctgccctgctggccccgctacaacaaggatgagaagtacctgcagctggacttcaccaccagggtgggcatgaagctgaaggagaagaagatggccttctggatgagcctgtaccagagccagaggcctgagaagcagaggcagttctag

SEQ ID NO: 7736 - DNA, 285 bp, synthetic construct
  misc_feature 1..285: note = source = /note="Description of Artificial Sequence: Synthetic coding sequence"
  source 1..285: mol_type = other DNA
atggccgccttcccccacaagatcatcttcttcctggtgtgcagcaccctgacccacgtggccttcagcggcatcttcaacaagagggacttcacccgctggcccaagccccgctgcaagatgtacatccccctggaccctgactacaatgctgactgccccaacgtgacagcccctgtgtgtgccagcaatggccacaccttccagaatgaatgcttcttctgtgtggagcagcgggagttccactaccgcatcaagtttgagaagtatggaaaatgtgactag

SEQ ID NO: 7737 - DNA, 402 bp, synthetic construct
  misc_feature 1..402: note = source = /note="Description of Artificial Sequence: Synthetic coding sequence"
  source 1..402: mol_type = other DNA
atgaggcagaggctgctgcccagcgtgaccagcctgctgctggtggccctgctcttccctggcagcagccaggcccggcacgtgaaccacagcgccacagaggccctgggggagctgcgggagcgggcccctggccagggcaccaacggcttccagctgctgcggcatgctgtgaagagggacctgctgccccccaggaccccaccctaccagggagatgtgcccccaggcatccggaacaccatctgccacatgcagcagggcatctgccgcctcttcttctgccacagcggggagaagaagagggacatctgcagcgacccctggaaccgctgctgcgtgagcaacacagatgaggagggcaaggagaagccagagatggatggccgcagcggcatctag

SEQ ID NO: 7738 - DNA, 564 bp, synthetic construct
  misc_feature 1..564: note = source = /note="Description of Artificial Sequence: Synthetic coding sequence"
  source 1..564: mol_type = other DNA
atgggctgctgcggctgcagcggcggctgcggcagcggctgcggcggctgcggcagcggctgcggcggctgcggcagcagctgctgcgtgcccatctgctgctgcaagcctgtgtgctgctgcgtgcctgcctgcagctgcagcagctgtggcagctgtggcggcagcaaaggaggccggggcagctgtggcggcagcaaaggagactgtggcagctgtggcggcagcaaaggaggctgcggcagctgtggctgcagccagtgcagctgctacaagccctgctgctgcagcagcggctgcggcagcagctgctgccagagcagctgctgcaagccctgctgcagccagagcagctgctgcaagccctgcagctgcagcagcggctgcggcagcagctgctgccagagcagctgctgcaagccctgctgcagccagagcagctgctgcaagccctgctgctgcagcagcggctgcggcagcagctgctgccagagcagctgctgcaagccctgctgcagccagagcagctgctgcgtgcccatctgctgccagtgcaagatctag

SEQ ID NO: 7739 - DNA, 564 bp, synthetic construct
  misc_feature 1..564: note = source = /note="Description of Artificial Sequence: Synthetic coding sequence"
  source 1..564: mol_type = other DNA
atgaggcccctggccggggcccctgtgcccaagaggcagaagtgtgaccactggaccccctgccccagcgacacctacgcctaccgcctgctgagcggcggcggccgcagcaaatatgccaagatctgctttgaggacaacctgctgatgggagagcagctgggcaatgtggcccggggcatcaacatcgccatcgtgaactacgtgactggaaatgtgacagccacccgctgctttgacatgtatgaaggagacaacagcggccccatgaccaagttcatccagagcgctgcccccaagagcctgctcttcatggtgacctatgatgatggcagcacccggctgaacaatgatgccaagaatgccatcgaggccctgggcagcaaggagatccggaacatgaagttccgcagctcctgggtgttcatcgccgccaagggcctggagctgcccagcgagatccagcgggagaagatcaaccacagtgatgccaagaacaaccgctacagcggctggccagctgagatccagatcgagggctgcatccccaaggagaggagctag

SEQ ID NO: 7740 - DNA, 249 bp, synthetic construct
  misc_feature 1..249: note = source = /note="Description of Artificial Sequence: Synthetic coding sequence"
  source 1..249: mol_type = other DNA
atgaagatcctgtgcatcttcctgacctttgtgttcaccgtgtcctgtggccccagcgtgccccagaagaagacccgggaggtggccgagaggaagcgggagtgccagctggtgcggggggcctgcaagccagagtgcaacagctgggagtatgtgtactactactgcaatgtgaacccctgctgtgctgtgtgggagtaccagaagcccatcatcaacaagatcaccagcaagctgcaccagaagtag

SEQ ID NO: 7741 - DNA, 186 bp, synthetic construct
  misc_feature 1..186: note = source = /note="Description of Artificial Sequence: Synthetic coding sequence"
  source 1..186: mol_type = other DNA
atgaagatccacgtgttcctgtttgtgctcttcttcttcctggtgcccatcgccaccagggtgaagtgtgctgtgaaggacacctacagctgcttcatcatgagaggaaaatgtagacatgaatgtcatgactttgagaagcccatcggcttctgcaccaagctgaatgccaactgctacatgtag

SEQ ID NO: 7742 - DNA, 1056 bp, synthetic construct
  misc_feature 1..1056: note = source = /note="Description of Artificial Sequence: Synthetic coding sequence"
  source 1..1056: mol_type = other DNA
atgggcaacctcttcatgctgtgggccgccctgggcatctgctgtgccgccttcagcgccagcgcctggagcgtgaacaacttcctgatcaccggccccaaggcctacctgacctacaccacctctgtggccctgggcgcccagagcggcatcgaggagtgcaagttccagtttgcctgggagcgctggaactgcccagaaaatgccctgcagctgagcacccacaaccggctgcggagcgccacccgggagaccagcttcatccacgccatcagcagcgctggggtgatgtacatcatcaccaagaactgcagcatgggagactttgagaactgtggctgtgatggcagcaacaacgggaagacaggaggccacggctggatctggggcggctgcagcgacaacgtggagtttggagagcgcatcagcaagctgtttgtggacagcctggagaagggcaaggatgcccgggccctgatgaacctgcacaacaacagagctggccgcctggccgtgcgggccaccatgaagaggacctgcaagtgccacggcatcagcggcagctgcagcatccagacctgctggctgcagctggccgagttccgggagatgggagactacctgaaggccaagtatgaccaggccctgaagattgagatggacaagaggcagctgcgggccggcaacagcgctgagggccactgggtgcctgctgaggccttcctgcccagcgctgaggccgagctgatcttcctggaggagagcccagactactgcacctgcaacagcagcctgggcatctacggcacagagggccgggagtgcctgcagaacagccacaacaccagccgctgggagaggaggagctgtggccgcctgtgcacagaatgtggcctgcaggtggaggagaggaagacagaggtgatcagcagctgcaactgcaagttccagtggtgctgcaccgtgaagtgtgaccagtgcagacatgtggtgtccaagtactactgtgcccggagccctggcagcgcccagagcctgggcaagggcagcgcctag

SEQ ID NO: 7743 - DNA, 1446 bp, synthetic construct
  misc_feature 1..1446: note = source = /note="Description of Artificial Sequence: Synthetic coding sequence"
  source 1..1446: mol_type = other DNA
atgcagagccggctgctgctgctgggcgcccctgggggccacggcggccctgccagcaggaggatgaggctgctgctgcggcaggtggtgcagaggaggcctggaggagaccggcagaggcctgaggtgcggctgctgcacgccggcagcggggctgacaccggggacacagtgaacattggagatgtgtcctacaagctgaagatccccaagaaccctgagctggtgccccagaactacatcagtgacagcctggcccagagcgtggtgcagcacctgcgctggatcatgcagaaggacctgctgggccaggatgtgttcctgattggccccccaggccccctgcggcgcagcatcgccatgcagtacctggagctgaccaagcgggaggtggagtacatcgccctgagccgggacaccacagaaacagacctgaagcagaggcgggagatccgggccggcacagccttctacatcgaccagtgtgctgtgcgggccgccacagagggccgcaccctcatcctggagggcctggagaaggccgagagaaatgtgctgcctgtgctgaacaacctgctggagaaccgggagatgcagctggaggatggccgcttcctgatgtctgctgagagatatgacaagctgctgcgggaccacaccaagaaggagctggacagctggaagatcgtgcgggtgtctgagaacttccgggtgattgccctgggcctgcctgtgccccgctacagcggcaaccccctggacccccccctgcggagccgcttccaggcccgggacatctactacctgcccttcaaggaccagctgaagctgctgtacagcattggagccaacgtgtctgctgagaaggtgtcccagctgctgagctttgccaccaccctgtgcagccaggagagcagcaccctgggcctgcctgacttccccctggacagcctggccgctgctgtgcagatcctggacagcttccccatgatgcccatcaagcacgccatccagtggctgtacccctacagcatcctgctgggccacgagggcaagatggctgtggagggcgtgctgaagagatttgagctgcaggacagcggcagcagcctgctgcccaaggagatcgtgaaggtggagaagatgatggagaaccacgtgtcccaggcctctgtgaccatcagaattgctgacaaggaggtgaccatcaaggtgcctgctggcacccggctgctgagccagccctgtgccagtgaccgcttcatccagaccctgagccacaagcagctgcaggccgagatgatgcagagccacatggtgaaggacatctgcctgattggaggcaagggctgcggcaagacagtcatcgccaagaactttgctgacaccctgggctacaacatcgagcccatcatgctgtaccagcacaaggtgccccacatctag

SEQ ID NO: 7744 - DNA, 786 bp, synthetic construct
  misc_feature 1..786: note = source = /note="Description of Artificial Sequence: Synthetic coding sequence"
  source 1..786: mol_type = other DNA
atggccagcctggccgtgagcaactggcccaagcccatgcccctcatcccctgcctgtcctggagcacagccagcggggtcttcaccaccggggtgctgagcaagagcatcaactggagggagctggagaagcagtactacacccagacagtgtatgaggaggagatcatccacatgctggagtactgcggcacagacagcttcaagatgggccaggagtttgtgaagcacttcaccagcagcgctgacaagctgaccaacctgaacctggtgtccaggaccctgaacctggacatcagcaaccaggtggtgtcccagaagccagctgactgccacaacagcagcaagacctctgtgtctgccaccagcgagggcctgctgctgcaggacaccagcaagatgaagcgcttcaaccagaccctgagcaccaacaagagcggctacaccagcaggaacccccagagctaccacctgctgagcaaggagcagagcaggaacagcctgaggaaggagagcctcatcttcatgaagggcgtgatggatgagtgcacccacgtggccaacttctctgtgcctgtggaccccagcctcatcatcgtggtgcaggccaaggaggatgcctacatccccaggactggagtgcgcagcctgcaggagatctggccaggctgtgagatccgctacctggagggcggccacatcagcgcctacctgttcaagcagggcctcttccggcaggccatctatgatgcctttgaccgcttcctgcacaagtatgccaactag

SEQ ID NO: 7745 - DNA, 1245 bp, synthetic construct
  misc_feature 1..1245: note = source = /note="Description of Artificial Sequence: Synthetic coding sequence"
  source 1..1245: mol_type = other DNA
atgggcgtgtccaagctggacatcctgtacagaaggctgctgctgaccaagctgttcatccggggctggggccggcctgaggacctgaagaggctgtttgagttcaggaagatgattggcaaccgggagcgctgccagaacctggtgtccagtgactaccctgtgcacatcgacaagattgaggagcagagcgactgcaagatcctggatggccactttgtgagccccatggcccactacgtgcctgacatcatgcccattgaatctgtgattgcccgcttccagttcatcgtgcccaaggagtggaacagcaagtacagacctgtgtgcatccacctggccggcaccggggaccaccactactggaggaggaggaccctgatggcccggcccatgatcaaggaggccaggatggccagcctgctgctggagaacccctactacggctgcaggaagcccaaggaccaggtgcgcagcagcctgaagaatgtgtctgacctgtttgtgatgggcggggccctggtgctggagagcgctgccctgctgcactggctggagcgggagggctacggccccctgggcatgacaggcatctccatgggcggccacatggccagcctggccgtgagcaactggcccaagcccatgcccctcatcccctgcctgtcctggagcacagccagcggggtcttcaccaccacagacagcttcaagatgggccaggagtttgtgaagcacttcaccagcagcgctgacaagctgaccaacctgaacctggtgtccaggaccctgaacctggacatcagcaaccaggtggtgtcccagaagccagctgactgccacaacagcagcaagacctctgtgtctgccaccagcgagggcctgctgctgcaggacaccagcaagatgaagcgcttcaaccagaccctgagcaccaacaagagcggctacaccagcaggaacccccagagctaccacctgctgagcaaggagcagagcaggaacagcctgaggaaggagagcctcatcttcatgaagggcgtgatggatgaatgtacccacgtggccaacttctctgtgcctgtggaccccagcctcatcatcgtggtgcaggccaaggaggatgcctacatccccaggactggagtgcgcagcctgcaggagatctggccaggctgtgagatccgctacctggagggcggccacatcagcgcctacctgttcaagcagggcctcttcagatag

SEQ ID NO: 7746 - DNA, 747 bp, synthetic construct
  misc_feature 1..747: note = source = /note="Description of Artificial Sequence: Synthetic coding sequence"
  source 1..747: mol_type = other DNA
atgaagctgaccttcttcctgggcctgctggccctgatcagctgcttcaccccatctgagagccagcgcttcagccggcggccctacctgcccggccagctgcccccaccacccctgtaccggccccgctgggtgccccccagccccccaccaccctatgacagccggctgaacagccccctgagcctgccctttgtgcccggccgggtgccccccagcagcttcagccgcttcagccaggccgtcatcctgagccagctgttccccctggagagcatccggcagcccaggctcttccctggctaccccaacctgcacttccccctgcggccctactacgtgggccccatccgcatcctgaagccacccttcccccccatccccttcttcctggccatctacctgcccatcagcaaccctgagccccagatcaacatcaccacagctgacaccaccatcaccaccaacccccccaccacagccacagccaccaccagcaccagcaccaagcccaccatgaccatcagcagcagcacagtgcccatcagcagcaccccagagcccgccaccagcatctctgctgccaccccagctgccagcacagagaacaccacccagatcctggccaaccggccccacacagtgctgctgaatgccaccgtgcaggtgaccaccagcaaccagaccatcctgagcagccctgccttcaagagcttctggcagaagctgtttgccatctttggatag

SEQ ID NO: 7747 - DNA, 231 bp, synthetic construct
  misc_feature 1..231: note = source = /note="Description of Artificial Sequence: Synthetic coding sequence"
  source 1..231: mol_type = other DNA
atgggcgccgccatcagccagggcgccctgattgccatcgtgtgcaatggcctggtgggcttcctgctgctgctgctgtgggtgatcctgtgctgggcctgccacagccgctctgcagatgtggacagcctgtctgagagcagccccaacagcagccctggcccctgcccagagaaggcccccccaccccagaagcccagccatgagggcagctacctgctgcagccctag

SEQ ID NO: 7748 - DNA, 1536 bp, synthetic construct; identical to SEQ ID NO: 6937
  misc_feature 1..1536: note = source = /note="Description of Artificial Sequence: Synthetic coding sequence"
  source 1..1536: mol_type = other DNA

SEQ ID NO: 7749 - DNA, 1536 bp, synthetic construct; identical to SEQ ID NO: 6937
  misc_feature 1..1536: note = source = /note="Description of Artificial Sequence: Synthetic coding sequence"
  source 1..1536: mol_type = other DNA

SEQ ID NO: 7750 - DNA, 240 bp, synthetic construct
  misc_feature 1..240: note = source = /note="Description of Artificial Sequence: Synthetic coding sequence"
  source 1..240: mol_type = other DNA
atgaagctgcacagcctcatctctgtgctgctgctgtttgtgaccctcatccccaagggcaagacaggagtcatccctggccagaagcagtgcatcgccctgaagggcgtgtgccgggacaagctgtgcagcaccctggatgacaccatcggcatctgcaatgaaggcaagaagtgctgccgccgctggtggatcctggagccctaccccacccctgtgcccaagggcaagagcccctag

SEQ ID NO: 7751 - DNA, 351 bp, synthetic construct; identical to SEQ ID NO: 7504
  misc_feature 1..351: note = source = /note="Description of Artificial Sequence: Synthetic coding sequence"
  source 1..351: mol_type = other DNA

SEQ ID NO: 7752 - DNA, 543 bp, synthetic construct
  misc_feature 1..543: note = source = /note="Description of Artificial Sequence: Synthetic coding sequence"
  source 1..543: mol_type = other DNA
caggtgatccccatcaacagcggggacctgtttgtgcaccccctgtggaacagaagctgtgtggcctgtggaaatgacatcgccctgatcaagctgagccgcagcgcccagctgggagatgctgtgcagctggccagcctgcccccagctggggacatcctgcccaatgagaccccctgctacatcaccggctggggccgcctgtacaccaacggccccctgcctgacaagctgcaggaggccctgctgcctgtggtggactatgagcactgcagccgctggaactggtggggcagctctgtgaagaagaccatggtgtgtgccggcggggacatccgcagcggctgcaatggagacagcggcggccccctgaactgccccacagaagatggcggctggcaggtgcacggcgtgaccagctttgtgtctgccttcggctgcaacaccaggaggaagcccaccgtcttcaccagggtgtctgccttcatcgactggattgaggagaagctgcagggcaacaaggcccctgagagcaggacatag

SEQ ID NO: 7753 - DNA, 1215 bp, synthetic construct
  misc_feature 1..1215: note = source = /note="Description of Artificial Sequence: Synthetic coding sequence"
  source 1..1215: mol_type = other DNA
atgccacccttcctgatcaccctcttcctgttccacagctgctgcctgcgggccaacggccacctgcgggagggcatgaccctgctgaagacagaatttgccctgcacctgtaccagagcgtggccgcctgcagaaatgagaccaacttcgtcatcagccctgctggggtgtccctgcccctggagatcctgcagtttggagctgagggcagcacaggccagcagctggctgatgccctgggctacacagtgcatgacaagagggtgaaggacttcctgcatgctgtgtatgccaccctgcccaccagcagccagggcacagagatggagctggcctgcagcctgtttgtgcaggtgggcacccccctgagcccctgctttgtggagcacgtgtcctggtgggccaacagcagcctggagcctgctgacctgtctgagcccaacagcacagccatccagaccagcgagggcgccagccgggagacagctgggggcggccccagcgagggccctgggggctggccctgggagcaggtgtctgctgcctttgcccagctggtgctggtgtccaccatgtccttccagggcacctggaggaagcgcttcagcagcacagacacccagatcctgcccttcacctgtgcctacggcctggtgctgcaggtgcccatgatgcaccagaccacagaggtgaactacggccagttccaggacacagctggccaccaggtgggcgtgctggagctgccctacctgggcagcgctgtgtccctcttcctggtgctgccccgggacaaggacacccccctgagccacatcgagccccacctgacagccagcaccatccacctgtggaccaccagcctgcggcgggccaggatggatgtgttcctgccccgcttccgcatccagaaccagttcaacctgaagagcatcctgaacagctggggcgtgacagacctgtttgaccccctgaaggccaacctgaagggcatcagcggccaggacggcttctacgtgtctgaggccatccacaaggccaagattgaggtgctggaggagggcaccaaggccagcggggccacagccctgctgctgctgaagaggagccgcatccccatcttcaaggctgaccggcccttcatctacttcctgcgggagcccaacacaggctttgtgttcagcatcggccgggtgagcaaccccctggactag

SEQ ID NO: 7754 - DNA, 444 bp, synthetic construct; identical to SEQ ID NO: 7701
  misc_feature 1..444: note = source = /note="Description of Artificial Sequence: Synthetic coding sequence"
  source 1..444: mol_type = other DNA

SEQ ID NO: 7755 - DNA, 2631 bp, synthetic construct; identical to SEQ ID NO: 6925
  misc_feature 1..2631: note = source = /note="Description of Artificial Sequence: Synthetic coding sequence"
  source 1..2631: mol_type = other DNA

SEQ ID NO: 7756 - DNA, 2631 bp, synthetic construct; identical to SEQ ID NO: 6925
  misc_feature 1..2631: note = source = /note="Description of Artificial Sequence: Synthetic coding sequence"
  source 1..2631: mol_type = other DNA

SEQ ID NO: 7757 - DNA, 2742 bp, synthetic construct; identical to SEQ ID NO: 7141
  misc_feature 1..2742: note = source = /note="Description of Artificial Sequence: Synthetic coding sequence"
  source 1..2742: mol_type = other DNA

SEQ ID NO: 7758 - DNA, 444 bp, synthetic construct; identical to SEQ ID NO: 7701
  misc_feature 1..444: note = source = /note="Description of Artificial Sequence: Synthetic coding sequence"
  source 1..444: mol_type = other DNA

SEQ ID NO: 7759 - DNA, 2631 bp, synthetic construct; identical to SEQ ID NO: 6925
  misc_feature 1..2631: note = source = /note="Description of Artificial Sequence: Synthetic coding sequence"
  source 1..2631: mol_type = other DNA

SEQ ID NO: 7760 - DNA, 2631 bp, synthetic construct; identical to SEQ ID NO: 6925
  misc_feature 1..2631: note = source = /note="Description of Artificial Sequence: Synthetic coding sequence"
  source 1..2631: mol_type = other DNA

SEQ ID NO: 7761 - DNA, 2631 bp, synthetic construct; identical to SEQ ID NO: 6925
  misc_feature 1..2631: note = source = /note="Description of Artificial Sequence: Synthetic coding sequence"
  source 1..2631: mol_type = other DNA

SEQ ID NO: 7762 - DNA, 2742 bp, synthetic construct; identical to SEQ ID NO: 7141
  misc_feature 1..2742: note = source = /note="Description of Artificial Sequence: Synthetic coding sequence"
  source 1..2742: mol_type = other DNA

SEQ ID NO: 7763 - DNA, 2742 bp, synthetic construct; identical to SEQ ID NO: 7141
  misc_feature 1..2742: note = source = /note="Description of Artificial Sequence: Synthetic coding sequence"
  source 1..2742: mol_type = other DNA

SEQ ID NO: 7764 - DNA, 309 bp, synthetic construct
  misc_feature 1..309: note = source = /note="Description of Artificial Sequence: Synthetic coding sequence"
  source 1..309: mol_type = other DNA
atgtctgtgatgaagccctgcctgatgaccatcgccatcctgatgatcctggcccagaagacccctgggggcctcttccgcagccacaacgggaagagccgggagccctggaacccctgtgagctgtaccagggcatgtgcagaaatgcctgccgggagtatgagatccagtacctgacctgccccaatgaccagaagtgctgcctgaagctgtctgtgaagatcaccagcagcaagaatgtgaaggaggactatgacagcaacagcaacctgtctgtgaccaacagcagcagctacagccacatctag

SEQ ID NO: 7765 - DNA, 267 bp, synthetic construct
  misc_feature 1..267: note = source = /note="Description of Artificial Sequence: Synthetic coding sequence"
  source 1..267: mol_type = other DNA
atgctgcctgaccacttcagccccctgagcggggacatcaagctgtctgtgctggccctggtggtgctggtggtgctggcccagacagccccagatggctggatccgccgctgctactacggcaccggccgctgcaggaagagctgcaaggagattgaaaggaagaaggagaagtgtggggagaagcacatctgctgcgtgcccaaggagaaggacaagctgagccacatccatgaccagaaggagaccagcgagctgtacatctag

SEQ ID NO: 7766 - DNA, 1401 bp, synthetic construct; identical to SEQ ID NO: 7220
  misc_feature 1..1401: note = source = /note="Description of Artificial Sequence: Synthetic coding sequence"
  source 1..1401: mol_type = other DNA

SEQ ID NO: 7767 - DNA, 207 bp, synthetic construct
  misc_feature 1..207: note = source = /note="Description of Artificial Sequence: Synthetic coding sequence"
  source 1..207: mol_type = other DNA
atgaagctgtgtgtgacagtgctgagcctgctggtgctggtggccgccttctgcagcctggccctgagcgcccccaccaagagcagcgagtggaagctgcagggcgtgtgcttccagtgctgcagcggcaaggaccccatccaccagagctgccccacctggaccatggtgcggcagaggaagatgcccaccactggaaaaggatag

SEQ ID NO: 7768 - DNA, 420 bp, synthetic construct
  misc_feature 1..420: note = source = /note="Description of Artificial Sequence: Synthetic coding sequence"
  source 1..420: mol_type = other DNA
atgtacaagctggccagctgctgcctgctcttcatcggcttcctgaaccccctgctgagcctgcccctgctggacagccgggagatctccttccagctgagcgcccctcatgaagatgcccggctgaccccagaggagctggagcgggccagcctgctgcagatcctgcctgagatgctgggcgctgagcggggggacatcctgaggaaggctgacagcagcaccaacatcttcaacccccggggcaacctgaggaagttccaggacttcagcggccaggaccccaacatcctgctgagccacctgctggcccgcatctggaagccctacaagaagcagaggaggaagctgcggcaggacctgcggctgtggaagaaggagcccggcctgcgcatcttcaagaactacgtgtacatctag

SEQ ID NO: 7769 - DNA, 1974 bp, synthetic construct
  misc_feature 1..1974: note = source = /note="Description of Artificial Sequence: Synthetic coding sequence"
  source 1..1974: mol_type = other DNA
atgaggacagtggtgctgaccatgaaggcctctgtgattgagatgttcctggtgctgctggtgactggagtgcacagcaacaaggagacagccaagaagatcaagaggcccaagttcaccgtgccccagatcaactgtgatgtgaaggccggcaagatcatcgaccctgagttcatcgtgaagtgcccagctggctgccaggaccccaagtaccacgtgtatggaacagatgtgtatgccagctacagctctgtgtgtggggctgctgtgcacagcggcgtgctggacaacagcggcggcaagatcctggtgaggaaggtggccggccagagcggctacaagggcagctacagcaatggagtgcagagcctgagcctgccccgctggagggagagcttcatcgtgctggagagcaagcccaagaagggcgtgacctaccccagcgccctgacctacagcagcagcaagagccctgctgcccaggccggggagaccaccaaggcctaccagaggcctcccatccctggcaccacagcccagcctgtgaccctgatgcagctgctggccgtgacagtggccgtggccacccccaccaccctgccccggcccagccccagcgctgccagcaccaccagcatcccccggccccagagcgtgggccacaggagccaggagatggacctgtggagcacagccacctacaccagcagccagaaccggcccagggctgaccccggcatccagaggcaggaccccagcggggccgccttccagaagcctgtgggcgcagatgtgtccctggactgcaagattgacctgtccttcctgattgatggcagcaccagcatcggcaagaggcgcttccgcatccagaagcagctgctggctgatgtggcccaggccctggacatcggccctgctggccccctgatgggcgtggtgcagtacggggacaacccagccacccacttcaacctgaagacccacaccaacagccgggacctgaagacagccatcgagaagatcacccagaggggcggcctgagcaatgtgggccgggccatcagctttgtgaccaagaacttcttcagcaaggccaatggaaacagaagtggggccccaaatgtggtggtggtgatggtggatggctggcccacagacaaggtggaggaggccagccggctggcccgggagagcggcatcaacatcttcttcatcaccatcgagggcgctgctgaaaatgagaagcagtatgtggtggagcccaactttgccaacaaggctgtgtgcaggaccaacggcttctacagcctgcacgtgcagagctggtttggcctgcacaagaccctgcagcccctggtgaagagggtgtgtgacacagaccggctggcctgcagcaagacctgcctgaacagcgctgacattggatttgtgattgatggcagcagctctgtgggcactggaaacttcagaacagtgctgcagtttgtgaccaacctgaccaaggagtttgagatcagtgacacagacaccagaattggagctgtgcagtacacctatgagcagaggctggagtttggatttgacaagtacagcagcaagccagacatcctgaatgccatcaagagggtgggctactggagcggcggcaccagcactggagctgccatcaactttgccctggagcagctgttcaagaagagcaagcccaacaagaggaagctgatgatcctgatcacagatggccgctcctatgatgatgtgcgcatcccagccatggccgcccacctgaagggcgtcatcacctacgccatcggcgtggcctgggccgcccaggaggagctggaggtgattgccacccacccagcccgggaccacagcttctttgtggatgaatttgacaacctgcaccagtatgtgccccgcatcatccagaacatctgcacagagttcaacagccagcccaggaactag

SEQ ID NO: 7770 - DNA, 3975 bp, synthetic construct
  misc_feature 1..3975: note = source = /note="Description of Artificial Sequence: Synthetic coding sequence"
  source 1..3975: mol_type = other DNA
atgagacatggagtggcctgggccctgctggtggccgccgccctgggcctgggcgcccggggcgtgagaggagctgtggccctggccgacttctacccctttggagctgagagaggagatgctgtgacccccaagcaggatgatggcggcagcggcctgcggcccctgtctgtgcccttccccttctttggagctgagcacagcggcctgtatgtgaacaacaacggcatcatctccttcctgaaggaggtgtcccagttcacccctgtggccttccccatcgccaaggacagatgtgtggtggccgccttctgggcagatgtggacaacagaagagctggagatgtgtactaccgggaggccacagatcctgccatgctgcggcgggccacagaagatgtgcgccactacttccctgagctgctggacttcaatgccacctgggtgtttgtggccacctggtacagagtgaccttcttcggcggcagcagcagcagccctgtgaacaccttccagacagtgctgatcacagatggcaagctgtccttcaccatcttcaactatgagagcatcgtgtggaccaccggcacccacgccagcagcggcggcaatgccaccggcctgggcggcattgctgcccaggccggcttcaatgctggagatggccagcgctacttcagcatccctggcagcaggacagctgacatggccgaggtggagaccaccaccaacgtgggcgtgcccggccgctgggccttcagaattgatgatgcccaggtgcgggtgggcggctgcggccacaccacctctgtgtgcctggccctgcggccctgcctgaatggaggaaaatgtattgatgactgtgtgacaggcaaccccagctacacctgcagctgcctgagcggcttcaccggccgccgctgccacctggatgtgaatgaatgtgccagccagccctgccagaatggaggcacctgcacccacggcatcaacagcttccgctgccagtgcccagctggctttggaggccccacctgtgaaacagcccagagcccctgtgacaccaaggagtgccagcacggcggccagtgccaggtggagaatggcagcgctgtgtgtgtgtgccaggccggctacaccggggccgcctgtgagatggatgtggatgactgcagcccagacccctgcctgaatggaggcagctgtgtggacctggtgggcaactacacctgcctgtgtgccgagcccttcaagggcctgcgctgtgagaccggggaccaccctgtgcctgatgcctgcctgagcgccccctgccacaacggcggcacctgtgtggatgctgaccagggctacgtgtgtgagtgcccagagggcttcatgggcctggactgccgggagcgggtgcctgatgactgtgaatgtagaaatggaggccgctgcctgggcgccaacaccaccctgtgccagtgccccctgggcttcttcggcctgctgtgtgaatttgagatcacagccatgccctgcaacatgaacacccagtgcccagatggcggctactgcatggagcacggcggcagctacctgtgtgtgtgccacacagaccacaatgccagccacagcctgcccagcccctgtgacagcgacccctgcttcaacggcggcagctgtgatgcccatgatgacagctacacctgtgagtgcccccggggcttccacggcaagcactgtgagaaggcccggccccacctgtgcagcagcggcccctgcagaaatggaggcacctgcaaggaggccggcggggagtaccactgcagctgcccctaccgcttcaccggccgccactgtgaaattggcaagccagacagctgtgccagcggcccctgccacaacggcggcacctgcttccactacatcggcaagtacaagtgtgactgccccccaggcttcagcggccgccactgtgagatcgcccccagcccctgcttccgcagcccctgtgtgaatggaggcacctgtgaagatcgggacacagacttcttctgccactgccaggccggctacatgggccgccgctgccaggccgaggtggactgtggccccccagaggaggtgaagcacgccaccctgcgcttcaacggcacccggctgggcgctgtggccctgtatgcctgtgaccggggctacagcctgagcgcccccagccgcatccgggtgtgccagccccacggcgtgtggagcgagcccccccagtgcctggagattgatgagtgccgcagccagccctgcctgcacggcggcagctgccaggacagagtggccggctacctgtgcctgtgcagcacaggctatgaaggagcccactgtgagctggagagagatgagtgccgggcccacccctgcagaaatggaggcagctgcaggaacctgcccggggcctacgtgtgccgctgcccagctggctttgtgggcgtgcactgtgaaacagaggtggatgcctgtgacagcagcccctgccagcacggcggccgctgtgagagcggcggcggggcctacctgtgtgtgtgcccagagagcttcttcggctaccactgtgagaccgtgtctgacccctgcttcagcagcccctgtggcggccggggctactgcctggccagcaatggcagccacagctgcacctgcaaggtgggctacaccggggaggactgtgccaaggagctgttccccccaacagccctgaagatggagcgggtggaggagagcggcgtgtccatctcctggaacccccccaacggccctgctgcccggcagatgctggatggctatgctgtgacctacgtgtccagtgatggcagctacagaagaacagactttgtggacaggaccaggagcagccaccagctgcaggccctggccgccggccgggcctacaacatctctgtgttttctgtgaagaggaacagcaacaacaagaatgacatcagcaggcctgctgtgctgctggcccggacccggcccaggcctgtggagggctttgaggtgaccaacgtgacagccagcaccatctctgtgcagtgggccctgcaccgcatcagacatgccaccgtgtctggagtgcgggtgtccatccgccaccctgaggccctgcgggaccaggccacagatgtggacagatctgtggaccgcttcaccttccgggccctgctgcccgggaagcgctacaccatccagctgaccaccctgagcggcctgcggggggaggagcaccccacagagagcctggccacagcccccacccacgtgtggacccggcccctgcccccagccaacctgacagctgcccgggtgacagccaccagcgcccacgtggtgtgggatgcccccaccccaggcagcctgctggaggcctacgtgatcaacgtgaccaccagccagagcaccaagagccgctacgtgcccaacgggaagctggccagctacacagtgcgggacctgctgcccggccgccgctaccagctgtctgtgattgctgtgcagagcacagagctgggcccccagcacagcgagcccgcccacctgtacatcatcaccagccccagagatggagctgaccggcgctggcaccagggcggccaccacccccgggtgctgaagaaccggcccccaccagcccggctgcctgagctgcggctgctgaatgaccacagcgcccctgagacccccacccagcccccacgcttcagcgagctggtggatggccggggccgggtgtctgccaggtttggaggcagccccagcaaggccgccaccgtgcgcagccagcccacagccagcgcccagctggagaacatggaggaggcccccaagagggtgtccctggccctgcagctgcctgagcacggcagcaaggacatcggcagcgagagcgctgccctggtgggcaccctgggcctgacagactgcagccagggcccctag

SEQ ID NO: 7771 - DNA, 732 bp, synthetic construct
  misc_feature 1..732: note = source = /note="Description of Artificial Sequence: Synthetic coding sequence"
  source 1..732: mol_type = other DNA
atgggcatcttcctggtgtatgtgggctttgtgttcttctctgtgctgtatgtgcagcagggcctgagcagccaggccaagttcacagagttccccagaaatgtgacagccacagagggccagaatgtggagatgagctgtgccttccagagcggcagcgcctctgtgtacctggagatccagtggtggttcctgcggggccctgaggacctggaccctggagctgagggcgctggggcccaggtggagctgctgcctgaccgggaccctgacagtgatggcaccaagatcagcacagtgaaggtgcagggcaatgacatcagccacaagctgcagatcagcaaggtgaggaagaaggatgagggcctgtatgaatgtcgggtgacagatgccaactatggagagctgcaggagcacaaggcccaggcctacctgaaggtgaatgccaacagccacgcccggaggatgcaggcctttgaggccagccccatgtggctgcaggacatgaagcccaggaagaatgtgtctgctgccatccccagcagcatccacggcagcgccaaccagaggacccacagcaccagcagcccccaggtggtggccaagatccccaagcagagcccccagagcggcatggagacccactttgagcccttcatcctgcccctgaccaatgccccccagaagggccagagctacagagtggaccgcttcatgaatggagacttctag

SEQ ID NO: 7772 - DNA, 1218 bp, synthetic construct; identical to SEQ ID NO: 7261
  misc_feature 1..1218: note = source = /note="Description of Artificial Sequence: Synthetic coding sequence"
  source 1..1218: mol_type = other DNA

SEQ ID NO: 7773 - DNA, 573 bp, synthetic construct
  misc_feature 1..573: note = source = /note="Description of Artificial Sequence: Synthetic coding sequence"
  source 1..573: mol_type = other DNA
atgaggacagtggtgctgaccatgaaggcctctgtgattgagatgttcctggtgctgctggtgactggagtgcacagcaacaaggagacagccaagaagatcaagaggcccaagttcaccgtgccccagatcaactgtgatgtgaaggccggcaagatcatcgaccctgagttcatcgtgaagtgcccagctggctgccaggaccccaagtaccacgtgtatggaacagatgtgtatgccagctacagctctgtgtgtggggctgctgtgcacagcggcgtgctggacaacagcggcggcaagatcctggtgaggaaggtggccggccagagcggctacaagggcagctacagcaatggagtgcagagcctgagcctgccccgctggagggagagcttcatcgtgctggagagcaagcccaagaagggcgtgacctaccccagcgccctgacctacagcagcagcaagagccctgctgcccaggccgacctgtggagcacagccacctacaccagcagccagaaccggcccagggctgaccctgtgcagaggcagccctgctacagcctgtag

SEQ ID NO: 7774 - DNA, 399 bp, synthetic construct
  misc_feature 1..399: note = source = /note="Description of Artificial Sequence: Synthetic coding sequence"
  source 1..399: mol_type = other DNA
atggcccccagccccaggacaggcagccggcaggatgccacagccctgcccagcatgagcagcaccttctgggccttcatgatcctggccagcctgctgattgcctactgcagccagctggccgccggcacctgtgaaattgtgaccctggaccgggacagcagccagcccaggaggaccatcgcccggcagacagcccgctgtgcctgcaggaagggccagattgctggcaccacccgggcccggcctgcctgtgtggatgcccgcatcatcaagaccaagcagtggtgtgacatgctgccctgcctggagggggagggctgtgacctgctgatcaacagaagtggctggacctgcacccagcccggcggccgcatcaagaccaccaccgtgtcctag

SEQ ID NO: 7775 - DNA, 957 bp, synthetic construct; identical to SEQ ID NO: 7094
  misc_feature 1..957: note = source = /note="Description of Artificial Sequence: Synthetic coding sequence"
  source 1..957: mol_type = other DNA

SEQ ID NO: 7776 - DNA, 399 bp, synthetic construct
  misc_feature 1..399: note = source = /note="Description of Artificial Sequence: Synthetic coding sequence"
  source 1..399: mol_type = other DNA
atgctgcccctgaccatgacagtgctgatcctgctgctgctgcccaccggccaggccgcccccaaggatggagtgaccaggccagacagcgaggtgcagcaccagctgctgcccaaccccttccagcccggccaggagcagctgggcctgctgcagagctacctgaagggcctgggccgcacagaggtgcagctggagcacctgagccgggagcaggtgctgctgtacctgtttgccctgcatgactatgaccagagcggccagctggatggcctggagctgctgtccatgctgacagctgccctggcccctggggccgccaacagccccaccaccaaccctggcaacctggatgcccggctggatggaggagagaaggccatgcagccccagtggtag

SEQ ID NO: 7777 - DNA, 732 bp, synthetic construct
  misc_feature 1..732: note = source = /note="Description of Artificial Sequence: Synthetic coding sequence"
  source 1..732: mol_type = other DNA
atgctgctgagcctgctgggcgcctgtgctgtggtgggccccttccacggccctgagtgggagcctgtgcagggcctgctgagccagaaccacagctgccgggacccccagtgctgcggcaacctgctggtgctgtgcctcttcctggtgtggcaggtgcgccactgctggcaccaggtgaccaggacccgcttcagcaccagaaatgtcatcaaggtgcccctgcagaagagagctgtgcccagcatgagatgtgaaacagtgttcaagctgaccccagagttcttcagccctgggaagagccggggcctggacagccagcagtgtgcccagaggcagcgctggggctaccgccgcagcctgcaggagagctgggcccagaacctgctgagcccccagcacccctgccccggccccccatctggagtgcacacccacagcgagcccatcttctgcaccaccagcatcagcaacacctgcctgctgccccagaacagctcctggaaggcctggcaggtgccctggtgcctgcatgatggccagaccaggcctgccctggacatgtgccaggagatggagcagctgctgctgcacagccaggagcggctggtgtccctggagcccgtcatctctgtgcgcagccggcccacctccatgaccctgaccaccagcctgcccaacctgctgtctgctgagcggctgcagttctgcccccagagggccccagcctag

SEQ ID NO: 7778 - DNA, 2505 bp, synthetic construct; identical to SEQ ID NO: 7110
  misc_feature 1..2505: note = source = /note="Description of Artificial Sequence: Synthetic coding sequence"
  source 1..2505: mol_type = other DNA

SEQ ID NO: 7779 - DNA, 1185 bp, synthetic construct
  misc_feature 1..1185: note = source = /note="Description of Artificial Sequence: Synthetic coding sequence"
  source 1..1185: mol_type = other DNA
atgtggcgctgccccctgggcctgctgctgctgctgcccctggccggccacctggccctgggcgcccagcagggccggggccggcgggagctggcccctggcctgcacctgcggggcatcagagatgctgggggccgctactgccaggagcaggacctgtgctgccggggccgggcagatgactgtgccctgccctacctgggcgccatctgctactgtgacctcttctgcaacagaacagtgtctgactgctgccccttcccccccatccagggctgcatgcatggaggccgcatctaccctgtgctgggcacctactgggacaactgcaaccgctgcacctgccaggagaaccggcagtggcagtgtgaccaggagccctgcctggtggaccctgacatgatcaaggccatcaaccagggcaactacggctggcaggccggcaaccacagcgccttctggggcatgaccctggatgagggcatccgctaccgcctgggcaccatccggcccagcagctctgtgatgaacatgcatgagatctacacagtgctgaaccctggagaggtgctgcccacagcctttgaggccagcgagaagtggcccaacctgatccacgagcccctggaccagggcaactgtgccggctcctgggccttcagcacagctgctgtggccagtgacagagtgtccatccacagcctgggccacatgacccctgtgctgagcccccagaacctgctgagctgtgacacccaccagcagcagggctgccggggcggccgcctggatggagcctggtggttcctgcggcggcggggcgtggtgtctgaccactgctaccccttcagcggccgggagagagatgaagctggccctgccccaccctgcatgatgcacagccgggccatgggccggggcaagaggcaggccacagcccactgccccaacagctatgtgaacaacaatgacatctaccaggtgacccctgtgtaccgcctgggcagcaatgacaaggagatcatgaaggagctgatggagaatggacctgtgcaggccctgatggaggtgcatgaggacttcttcctgtacaagggcggcatctacagccacacccctgtgtccctgggccggcctgagcgctacagaagacatggcacccacagcgtgaagatcactggatag

SEQ ID NO: 7780 - DNA, 303 bp, synthetic construct
  misc_feature 1..303: note = source = /note="Description of Artificial Sequence: Synthetic coding sequence"
  source 1..303: mol_type = other DNA
atggctgctgccctggccctggtggccggcgtgctgtctggagctgtgctgcccctgtggagcgccctgccccagtacaagaagaagatcacagaccgctgcttccaccacagcgagtgctacagcggctgctgcctgatggacctggacagcggcggggccttctgtgccccccgggcccgcatcaccatgatctgcctgccccagaccaagggggccaccaacatcatctgcccctgcaggatgggcctgacctgcatcagcaaggacctgatgtgcagccgccgctgccacatgatctag

SEQ ID NO: 7781 - DNA, 978 bp, synthetic construct
  misc_feature 1..978: note = source = /note="Description of Artificial Sequence: Synthetic coding sequence"
  source 1..978: mol_type = other DNA
atgaggctgcccaggagagctgccctgggcctgctgcccctgctgctgctgctgcccccagcccctgaggccgccaagaagcccaccccctgccaccgctgccggggcctggtggacaagttcaaccagggcatggtggacacagccaagaagaactttggaggcggcaacacagcctgggaggagaagaccctgagcaaatatgagagcagcgagatccggctgctggagatcctggagggcctgtgtgagagcagtgactttgagtgcaaccagatgctggaggcccaggaggagcacctggaggcctggtggctgcagctgaagtctgagtacccagacctgtttgagtggttctgtgtgaagaccctgaaggtgtgctgcagccctggcacctacggccctgactgcctggcctgccagggcggcagccagaggccctgcagcggaaatggccactgcagcggagatggcagccggcagggagatggcagctgccgctgccacatgggctaccagggccccctgtgcacagactgcatggatggctacttcagcagcctgagaaatgagacccacagcatctgcacagcctgtgatgagagctgcaagacctgcagcggcctgaccaacagagactgtggggagtgtgaggtgggctgggtgctggatgagggcgcctgtgtggagtgtgacagcagctgtgtgggctgcacaggagagggccctggcaactgcaaggagtgcatcagcggctacgcccgggagcacggccagtgtgctgatgtggatgaatgttccctggccgagaagacctgtgtgaggaagaatgaaaactgctacaacaccccaggcagctatgtgtgtgtgtgcccagatggctttgaggagacagaagatgcctgtgtgcccccagctgaggccgaggccacagaaggagagagccccacccagctgcccagccgggaggacctgtag

SEQ ID NO: 7782 - DNA, 459 bp, synthetic construct
  misc_feature 1..459: note = source = /note="Description of Artificial Sequence: Synthetic coding sequence"
  source 1..459: mol_type = other DNA
atgaggggccctggccaccccctgctgctgggcctgctgctggtgctgggcgctgctggccggggccggggcggcgctgagccccgggagccagcagatggccaggccctgctgcggctggtggtggagctggtgcaggagctgaggaagcaccacagcgctgagcacaagggcctgcagctgctgggccgggactgtgccctgggccgggcagaggccgccggcctgggccccagccctgagcagagggtggagatcgtgccccgggacctgaggatgaaggacaagttcctgaagcacctgaccggccccctgtacttcagccccaagtgcagcaagcacttccaccggctgtaccacaacacccgggactgcaccatcccagcctactacaagagatgtgcccggctgctgacccggctggccgtgtcccctgtgtgcatggaggacaagcagtag

SEQ ID NO: 7783 - DNA, 411 bp, synthetic construct; identical to SEQ ID NO: 7174
  misc_feature 1..411: note = source = /note="Description of Artificial Sequence: Synthetic coding sequence"
  source 1..411: mol_type = other DNA

SEQ ID NO: 7784 - DNA, 1209 bp, synthetic construct
  misc_feature 1..1209: note = source = /note="Description of Artificial Sequence: Synthetic coding sequence"
  source 1..1209: mol_type = other DNA
atgaggctgcccaggagagctgccctgggcctgctgcccctgctgctgctgctgcccccagcccctgaggccgccaagaagcccaccccctgccaccgctgccggggcctggtggacaagttcaaccagggcatggtggacacagccaagaagaactttggaggcggcaacacagcctgggaggagaagaccctgagcaaatatgagagcagcgagatccggctgctggagatcctggagggcctgtgtgagagcagtgactttgagtgcaaccagatgctggaggcccaggaggagcacctggaggcctggtggctgcagctgaagtctgagtacccagacctgtttgagtggttctgtgtgaagaccctgaaggtgtgctgcagccctggcacctacggccctgactgcctggcctgccagggcggcagccagaggccctgcagcggaaatggccactgcagcggagatggcagccggcagggagatggcagctgccgctgccacatgggctaccagggccccctgtgcacagactgcatggatggctacttcagcagcctgagaaatgagacccacagcatctgcaccgtgaggacaggcctgagtgacagctacccaccctgctgcctgagcctgggctgctggaggggcgtgggccacgcctggatccggggcaggaacacccacacccagcccggctacagcagccgggtgtggattgctgccttcagccctgcctgtgatgagagctgcaagacctgcagcggcctgaccaacagagactgtggagaatgtgaggtgggctgggtgctggatgaaggagcctgtgtggatgtggatgaatgtgccgctgagcccccaccctgcagcgctgcccagttctgcaagaatgccaacggcagctacacctgtgaagaatgtgacagcagctgtgtgggctgcaccggggagggccctggcaactgcaaggagtgcatcagcggctacgcccgggagcacggccagtgtgctgatgtggatgagtgcagcctggccgagaagacctgtgtgaggaagaatgaaaactgctacaacaccccaggcagctatgtgtgtgtgtgcccagatggctttgaggagacagaagatgcctgtgtgcccccagctgaggccgaggccacagaaggagagagccccacccagctgcccagccgggaggacctgtag

SEQ ID NO: 7785 - DNA, 633 bp, synthetic construct
  misc_feature 1..633: note = source = /note="Description of Artificial Sequence: Synthetic coding sequence"
  source 1..633: mol_type = other DNA
atgtctgctgggaagatgatgaggaccctcatcaccacccaccccctgcccctgctgctgctgccccagcagctgctgcagctggtgcagttccaggaggtggacacagactttgacttccctgaggaggacaagaaggaggagtttgaagaatgtctggagaagttcttcagcactggacctgcccggccccccaccaaggagaaggtgaagagaagagtgctgattgagcccggcatgcccctgaaccacatcgagtactgcaaccacgagatcatgggcaagaatgtgtactacaagcaccgctgggtggccgagcactacttcctgctgatgcagtatgatgagctgcagaagatctgctacaacagatttgtgccctgcaagaatggcatcaggaagtgcaacagaagcaagggcctggtggagggcgtgtactgcaacctgacagaggcctttgagatcccagcctgcaagtatgagagcctgtacaggaagggctacgtgctgatcacctgctcctggcagaatgagatgcagaagaggatcccccacaccatcaatgacctggtggagcccccagagcacaggagcttcctgtctgaagatggagtgtttgtgatcagcccctag

SEQ ID NO: 7786 - DNA, 585 bp, synthetic construct; identical to SEQ ID NO: 6927
  misc_feature 1..585: note = source = /note="Description of Artificial Sequence: Synthetic coding sequence"
  source 1..585: mol_type = other DNA

SEQ ID NO: 7787 - DNA, 4059 bp, synthetic construct
  misc_feature 1..4059: note = source = /note="Description of Artificial Sequence: Synthetic coding sequence"
  source 1..4059: mol_type = other DNA
atgagacatggagtggcctgggccctgctggtggccgccgccctgggcctgggcgcccggggcgtgagaggagctgtggccctggccgacttctacccctttggagctgagagaggagatgctgtgacccccaagcaggatgatggcggcagcggcctgcggcccctgtctgtgcccttccccttctttggagctgagcacagcggcctgtatgtgaacaacaacggcatcatctccttcctgaaggaggtgtcccagttcacccctgtggccttccccatcgccaaggacagatgtgtggtggccgccttctgggcagatgtggacaacagaagagctggagatgtgtactaccgggaggccacagatcctgccatgctgcggcgggccacagaagatgtgcgccactacttccctgagctgctggacttcaatgccacctgggtgtttgtggccacctggtacagagtgaccttcttcggcggcagcagcagcagccctgtgaacaccttccagacagtgctgatcacagatggcaagctgtccttcaccatcttcaactatgagagcatcgtgtggaccaccggcacccacgccagcagcggcggcaatgccaccggcctgggcggcattgctgcccaggccggcttcaatgctggagatggccagcgctacttcagcatccctggcagcaggacagctgacatggccgaggtggagaccaccaccaacgtgggcgtgcccggccgctgggccttcagaattgatgatgcccaggtgcgggtgggcggctgcggccacaccacctctgtgtgcctggccctgcggccctgcctgaatggaggaaaatgtattgatgactgtgtgacaggcaaccccagctacacctgcagctgcctgagcggcttcaccggccgccgctgccacctggatgtgaatgaatgtgccagccagccctgccagaatggaggcacctgcacccacggcatcaacagcttccgctgccagtgcccagctggctttggaggccccacctgtgaaacagcccagagcccctgtgacaccaaggagtgccagcacggcggccagtgccaggtggagaatggcagcgctgtgtgtgtgtgccaggccggctacaccggggccgcctgtgagatggatgtggatgactgcagcccagacccctgcctgaatggaggcagctgtgtggacctggtgggcaactacacctgcctgtgtgccgagcccttcaagggcctgcgctgtgagaccggggaccaccctgtgcctgatgcctgcctgagcgccccctgccacaacggcggcacctgtgtggatgctgaccagggctacgtgtgtgagtgcccagagggcttcatgggcctggactgccgggagcgggtgcctgatgactgtgaatgtagaaatggaggccgctgcctgggcgccaacaccaccctgtgccagtgccccctgggcttcttcggcctgctgtgtgaatttgagatcacagccatgccctgcaacatgaacacccagtgcccagatggcggctactgcatggagcacggcggcagctacctgtgtgtgtgccacacagaccacaatgccagccacagcctgcccagcccctgtgacagcgacccctgcttcaacggcggcagctgtgatgcccatgatgacagctacacctgtgagtgcccccggggcttccacggcaagcactgtgagaaggcccggccccacctgtgcagcagcggcccctgcagaaatggaggcacctgcaaggaggccggcggggagtaccactgcagctgcccctaccgcttcaccggccgccactgtgaaattggcaagccagacagctgtgccagcggcccctgccacaacggcggcacctgcttccactacatcggcaagtacaagtgtgactgccccccaggcttcagcggccgccactgtgagatcgcccccagcccctgcttccgcagcccctgtgtgaatggaggcacctgtgaagatcgggacacagacttcttctgccactgccaggccggctacatgggccgccgctgccaggccgaggtggactgtggccccccagaggaggtgaagcacgccaccctgcgcttcaacggcacccggctgggcgctgtggccctgtatgcctgtgaccggggctacagcctgagcgcccccagccgcatccgggtgtgccagccccacggcgtgtggagcgagcccccccagtgcctggagattgatgagtgccgcagccagccctgcctgcacggcggcagctgccaggacagagtggccggctacctgtgcctgtgcagcacaggctatgaaggagcccactgtgagctggagagagatgagtgccgggcccacccctgcagaaatggaggcagctgcaggaacctgcccggggcctacgtgtgccgctgcccagctggctttgtgggcgtgcactgtgaaacagaggtggatgcctgtgacagcagcccctgccagcacggcggccgctgtgagagcggcggcggggcctacctgtgtgtgtgcccagagagcttcttcggctaccactgtgagaccgtgtctgacccctgcttcagcagcccctgtggcggccggggctactgcctggccagcaatggcagccacagctgcacctgcaaggtgggctacaccggggaggactgtgccaaggagctgttccccccaacagccctgaagatggagcgggtggaggagagcggcgtgtccatctcctggaacccccccaacggccctgctgcccggcagatgctggatggctatgctgtgacctacgtgtccagtgatggcagctacagaagaacagactttgtggacaggaccaggagcagccaccagctgcaggccctggccgccggccgggcctacaacatctctgtgttttctgtgaagaggaacagcaacaacaagaatgacatcagcaggcctgctgtgctgctggcccggacccggcccaggcctgtggagggctttgaggtgaccaacgtgacagccagcaccatctctgtgcagtgggccctgcaccgcatcagacatgccaccgtgtctggagtgcgggtgtccatccgccaccctgaggccctgcgggaccaggccacagatgtggacagatctgtggaccgcttcaccttccgggccctgctgcccgggaagcgctacaccatccagctgaccaccctgagcggcctgcggggggaggagcaccccacagagagcctggccacagcccccacccacgtgtggacccggcccctgcccccagccaacctgacagctgcccgggtgacagccaccagcgcccacgtggtgtgggatgcccccaccccaggcagcctgctggaggcctacgtgatcaacgtgaccaccagccagagcaccaagagccgctacgtgcccaacgggaagctggccagctacacagtgcgggacctgctgcccggccgccgctaccagctgtctgtgattgctgtgcagagcacagagctgggcccccagcacagcgagcccgcccacctgtacatcatcaccagccccagagatggagctgaccggcgctggcaccagggcggccaccacccccgggtgctgaagaaccggcccccaccagcccggctgcctgagctgcggctgctgaatgaccacagcgcccctgagacccccacccagcccccacgcttcagcgagctggtggatggccggggccgggtgtctgccaggtttggaggcagccccagcaaggccgccaccgtgcgcagccacgtgcccggcaactgcagcgagaacccctgccagaatggaggcacctgtgtgcctggagcagatgcccacagctgtgactgtggccctggcttcaagggcagaagatgtgagctggcctgcatcaaggtgtcccggccctgcaccaggctcttcagcgagaccaaggccttccctgtgtgggagggcggcgtgtgccaccacgtgaagcagagcaagagccagaccctggagaagagctag

SEQ ID NO: 7788 - DNA, 957 bp, synthetic construct; identical to SEQ ID NO: 7094
  misc_feature 1..957: note = source = /note="Description of Artificial Sequence: Synthetic coding sequence"
  source 1..957: mol_type = other DNA

SEQ ID NO: 7789 - DNA, 816 bp, synthetic construct
  misc_feature 1..816: note = source = /note="Description of Artificial Sequence: Synthetic coding sequence"
  source 1..816: mol_type = other DNA
atgcaggccgcctgctggtacgtgctcttcctgctgcagcccaccgtgtacctggtgacctgtgccaacctgaccaacggcggcaagtctgagctgctgaagagcggcagcagcaagagcaccctgaagcacatctggacagagagcagcaaggacctgagcatcagccggctgctgagccagaccttccggggcaaggaaaatgacacagacctggacctgcgctatgacaccccagagccctacagcgagcaggacctgtgggactggctgaggaacagcacagacctgcaggagccccggccccgggccaagaggcggcccatcgtgaagacaggcaagttcaagaagatgtttggctggggagacttccacagcaacatcaagacagtgaagctgaacctgctgatcaccgggaagatcgtggaccacggcaatggcaccttctctgtgtacttccgccacaacagcacaggccagggcaatgtgtctgtgtccctggtgccccccaccaagatcgtggagtttgacctggcccagcagacagtgattgatgccaaggacagcaagagcttcaactgccgcatcgagtatgagaaggtggacaaggccaccaagaacaccctgtgcaactatgaccccagcaagacctgctaccaggagcagacccagagccacgtgtcctggctgtgcagcaagcccttcaaggtgatctgcatctacatctccttctacagcacagactacaagctggtgcagaaggtgtgcccagactacaactaccacagcgacaccccctacttccccagcggctag

SEQ ID NO: 7790 - DNA, 999 bp, synthetic construct
  misc_feature 1..999: note = source = /note="Description of Artificial Sequence: Synthetic coding sequence"
  source 1..999: mol_type = other DNA
atgctgctgctggccgccgccttcctggtggcctttgtgctgctgctgtacatggtgagccccctcatcagccccaagcccctggccctgcccggggcccacgtggtggtgactggaggcagcagcggcatcggcaagtgcatcgccatcgagtgctacaagcagggcgccttcatcaccctggtggccagaaatgaagacaagctgctgcaggccaagaaggagattgagatgcacagcatcaatgacaagcaggtggtgctgtgcatctctgtggatgtgtcccaggactacaaccaggtggagaatgtcatcaagcaggcccaggagaagctgggccctgtggacatgctggtgaactgtgccggcatggctgtgtctgggaagtttgaggacctggaggtgtccacctttgagcggctgatgagcatcaactacctgggctctgtgtaccccagcagagctgtgatcaccaccatgaaggagaggagagtgggccgcatcgtgtttgtgagcagccaggccggccagctgggcctgtttggcttcaccgcctacagcgccagcaagtttgccatccggggcctggccgaggccctgcagatggaggtgaagccctacaacgtgtacatcaccgtggcctaccccccagacacagacaccccaggctttgctgaagaaaatagaaccaagcccctggagaccaggctcatcagcgagaccacctctgtgtgcaagccagagcaggtggccaagcagatcgtgaaggatgccatccagggcaacttcaacagcagcctgggcagtgatggctacatgctgagcgccctgacctgtggcatggcccctgtgaccagcatcacagagggcctgcagcaggtggtgaccatgggcctcttccgcaccatcgccctcttctacctgggcagctttgacagcatcgtgcggcgctgcatgatgcagcgggagaagtcagaaaatgctgacaagacagcctag

SEQ ID NO: 7791 - DNA, 1497 bp, synthetic construct
  misc_feature 1..1497: note = source = /note="Description of Artificial Sequence: Synthetic coding sequence"
  source 1..1497: mol_type = other DNA
atgtccttcagcgccaccatcctcttcagccccccatctggcagcgaggcccgctgctgctgctgtgcctgcaagtctgagaccaatggaggcaacacaggcagccagggcggcaaccccccacccagcacccccatcaccgtgactggacatggcctggccgtgcagagcagcgagcagctgctgcacgtgatctaccagagggtggacaaggctgtgggcctggccgaggccgccctgggcctggcccgggccaacaatgagctgctgaagaggctgcaggaggaggtgggggacctgcggcagggcaaggtgtccatcccagatgaagatggagagagccgggcccacagcagccccccagaggagcccggccccctgaaggagagccctggagaggccttcaaggccctgtctgctgtggaggaggagtgtgacagcgtgggcagcggcgtgcaggtggtgattgaggagctgcggcagctgggcgccgcctctgtgggccctggccccctgggcttccctgccacccagagggacatgaggctgcccggctgcaccctggccgccagcgaggccgcccccctgctgaaccccctggtggatgattatgtggccagcgagggcgctgtgcagagggtgctggtgcctgcctatgccaagcagctgagccctgccacccagctggccatccagagggccaccccagagaccggcccagaaaatggcaccaagctgcccccacccaggcctgaggacatgctgaatgctgctgctgccctggacagcgccctggaggagagcggccctggcagcactggagagctgcggcacagcctgggcctgactgtgagcccctgcaggacccggggcagcggccagaagaacagcaggaggaagagggacctggtgctgagcaagctggtgcacaacgtgcacaaccacatcaccaatgacaagcgcttcaatggaagtgagagcatcaagagctcctggaacatctctgtggtgaagttcctgctggagaagctgaagcaggagctggtgaccagcccccacaactacacagacaaggagctgaagggggcctgtgtggcctacttcctgaccaagaggcgggagtacagaaacagcctgaaccccttcaagggcctgaaggagaaggaggagaagaagctgcggagccgccgctaccgcctgtttgccaacagaagcagcatcatgaggcactttggacctgaggaccagaggctgtggaatgatgtgacagaggagctgatgtctgatgaggaggacagcctgaatgaaccagaccggctgcccagcgctgaggcccagctgctgcccccagagctgtacaaccccaacttccaggaggaggaggatgagggcggagatgaaaatgcccctggcagccccagctttgaccagccccacaagacctgctgcccagacctgaacagcttcatcgagatcaaggtggagaaggatgaatag

SEQ ID NO: 7792 - DNA, 966 bp, synthetic construct
  misc_feature 1..966: note = source = /note="Description of Artificial Sequence: Synthetic coding sequence"
  source 1..966: mol_type = other DNA
atgaggctgcccaggagagctgccctgggcctgctgcccctgctgctgctgctgcccccagcccctgaggccgccaagaagcccaccccctgccaccgctgccggggcctggtggacaagttcaaccagggcatggtggacacagccaagaagaactttggaggcggcaacacagcctgggaggagaagaccctgagcaaatatgagagcagcgagatccggctgctggagatcctggagggcctgtgtgagagcagtgactttgagtgcaaccagatgctggaggcccaggaggagcacctggaggcctggtggctgcagctgaagtctgagtacccagacctgtttgagtggttctgtgtgaagaccctgaaggtgtgctgcagccctggcacctacggccctgactgcctggcctgccagggcggcagccagaggccctgcagcggaaatggccactgcagcggagatggcagccggcagggagatggcagctgccgctgccacatgggctaccagggccccctgtgcacagactgcatggatggctacttcagcagcctgagaaatgagacccacagcatctgcacagcctgtgatgagagctgcaagacctgcagcggcctgaccaacagagactgtggggagtgtgaggtgggctgggtgctggatgagggcgcctgtgtggatgtggatgaatgtgccgctgagcccccaccctgcagcgctgcccagttctgcaagaatgccaacggcagctacacctgtgaagatgtggatgaatgttccctggccgagaagacctgtgtgaggaagaatgaaaactgctacaacaccccaggcagctatgtgtgtgtgtgcccagatggctttgaggagacagaagatgcctgtgtgcccccagctgaggccgaggccacagaaggagagagccccacccagctgcccagccgggaggacctgtag

SEQ ID NO: 7793 - DNA, 711 bp, synthetic construct
  misc_feature 1..711: note = source = /note="Description of Artificial Sequence: Synthetic coding sequence"
  source 1..711: mol_type = other DNA
atgatgggcatcttcctggtgtatgtgggctttgtgttcttctctgtgctgtatgtgcagcagggcctgagcagccaggccaagttcacagagttccccagaaatgtgacagccacagagggccagaatgtggagatgagctgtgccttccagagcggcagcgcctctgtgtacctggagatccagtggtggttcctgcggggccctgaggacctggaccccggggctgagggcgctggggcccaggtggagctgctgcctgaccgggaccctgacagtgatggcaccaagatcagcacagtgaaggtgcagggcaatgacatcagccacaagctgcagatcagcaaggtgaggaagaaggatgagggcctgtatgagtgccgggtgacagatgccaactacggggagctgcaggagcacaaggcccaggcctacctgaaggtgaatgccaacagccacgcccggaggatgcaggcctttgaggccagccccatgtggctgcaggacatgaagcccaggaagaatgtgtctgctgccatccccagcagcatccacggcagcgccaaccagaggacccacagcaccagcagcccccaggtggtggccaagatccccaagcagagcccccagagcggggccagaattgccaccagccacggcctgtctgtgctgctgctggtgtgtggctttgtgaagggggccctgctgtag

SEQ ID NO: 7794 - DNA, 273 bp, synthetic construct
  misc_feature 1..273: note = source = /note="Description of Artificial Sequence: Synthetic coding sequence"
  source 1..273: mol_type = other DNA
atgaacatgaagccagccacagccagcgccctgctgctgctgctgctgggcctggcctggacccagggcagccacggctggggcgcagatgccagcagcctgcagaagagagctggaagagatgaccagaactacaactacaaccagcacgcctaccccacagcctacggcggcaagtacagcgtgaagaccccagccaagggcggcgtgagccccagcagcagcgccagccgggtgcagcccggcctgctgcagtgggtgaagttctggtag

SEQ ID NO: 7795 - DNA, 360 bp, synthetic construct
  misc_feature 1..360: note = source = /note="Description of Artificial Sequence: Synthetic coding sequence"
  source 1..360: mol_type = other DNA
atgcctgctgtgttcatgctggccagcagcagcgccctgcagtgtggccggggcgtgccccgcttccccaggacagaggtgggcgccggccacagcgtgaatgaggagaccaaggccgagaaggtgggcaaccagaccagcgtcatcccagccaccagccggcaggccgccctgggcacctcctggacccagaggaggacccagcccctgcaggagaggagccactggcacccccggggcaacaatgccagcggcatgggcggccacaggatgtttcctggccccctgcggggccctgctgcccaggtgctggagaatgaatgtggcagcctgggccgggctgctgagggccgctcctag

SEQ ID NO: 7796 - DNA, 639 bp, synthetic construct; identical to SEQ ID NO: 7183
  misc_feature 1..639: note = source = /note="Description of Artificial Sequence: Synthetic coding sequence"
  source 1..639: mol_type = other DNA

SEQ ID NO: 7797 - DNA, 387 bp, synthetic construct
  misc_feature 1..387: note = source = /note="Description of Artificial Sequence: Synthetic coding sequence"
  source 1..387: mol_type = other DNA
atgagggtggcccggaggaccagaaatgtgtgccgctgccccagggctgctggccctggggtgcctgagccccgggccgcccccctgcccctgctggccatggcccctcctccagcctgccgcagccccatgagccccccacctccacccctgctgctgctgctgctgagcctggccctgctgggcgcccgggcccgggcagagcccgccggcagcgctgtgcctgcccagagccggccctgtgtggactgccacgcctttgagttcatgcagagggccctgcaggacctgaggaagacagcctgcagcctggatgccaggacagagaccctgctgctgcaggccgagcggcgggccctgtgtgcctgctggccagctggccactag

SEQ ID NO: 7798 - DNA, 399 bp, synthetic construct
  misc_feature 1..399: note = source = /note="Description of Artificial Sequence: Synthetic coding sequence"
  source 1..399: mol_type = other DNA
atgggcccccgggtgctgcagccccccctgctgctgctgctgctggccctgctgctggccgccctgccctgtggggctgaggaggccagccccctgcggcctgcccaggtgaccctgagccccccacctgctgtgaccaacggcagccagcccggggccccccacaacagcacccacacccggcccccaggggccagcggcagcgccctgaccaggagcttctacgtgatcctgggcttctgtggcctgacagccctgtacttcctgatccgggccttccggctgaagaagccccagaggagaagatatggcctgctggccaacacagaggaccccacagagatggccagcctggacagtgatgaggagaccgtgtttgagagcaggaacctgaggtag

SEQ ID NO: 7799 - DNA, 585 bp, synthetic construct; identical to SEQ ID NO: 7079
  misc_feature 1..585: note = source = /note="Description of Artificial Sequence: Synthetic coding sequence"
  source 1..585: mol_type = other DNA

SEQ ID NO: 7800 - DNA, 441 bp, synthetic construct
  misc_feature 1..441: note = source = /note="Description of Artificial Sequence: Synthetic coding sequence"
  source 1..441: mol_type = other DNA
atggtgatcaccatctactatgatgtgaaggtgcgcttcatcgtgcggggctgcggccagtacatctcctaccgctgccaggagaagaggaacacctactttgctgagtactggtaccaggcccagtgctgccagtatgactactgcaacagctggagcagcccccagctgcagagcagcctgcctgagccccatgaccggcccctggccctgcccctgagtgacagccagatccagtggttctaccaggccctgaacctgagcctgcccctgcccaacttccacgccggcacagagccagatggcctggaccccatggtgaccctgagcctgaacctgggcctgagctttgctgagctgcggaggatgtacctgttcctgaacagcagcggcctgctggtgctgccccaggccggcctgctgaccccccaccccagctag

SEQ ID NO: 7801 - DNA, 234 bp, synthetic construct
  misc_feature 1..234: note = source = /note="Description of Artificial Sequence: Synthetic coding sequence"
  source 1..234: mol_type = other DNA
atgggcagcagcggcctgctgagcctgctggtgctgtttgtgctgctggccaacgtgcagggccctggcctgacagactggctgttcccccggcgctgccccaagatccgggaggagtgtgagttccaggagagagatgtgtgcaccaaggaccggcagtgccaggacaacaagaagtgctgcgtgttcagctgtgggaagaagtgcctggacctgaagcagggcaagcagtag

SEQ ID NO: 7802 - DNA, 444 bp, synthetic construct
  misc_feature 1..444: note = source = /note="Description of Artificial Sequence: Synthetic coding sequence"
  source 1..444: mol_type = other DNA
atgggccaggaggtgcacggcagctgctgggccctgggcgctgggggcggccagaggcagtgggtgggccgctccatgccacccctggccccccagctgtgcagagctgtgttcctggtgcccatcctgctgctgctgcaggtgaagcccctgaatggcagccctggccccaaggatggcagccagacagagaagacccccagcgctgaccagaaccaggagcagtttgaggagcactttgtggccagctctgtgggggagatgtggcaggtggtggacatggcccagcaggaggaggaccagagcagcaagacagctgctgtgcacaagcacagcttccacctgtccttctgcttcagcctggcctctgtgatggtgttcagcggcggccccctgcggaggaccttccccaacatccagctgtgcttcatgctgacccactag

SEQ ID NO: 7803 - DNA, 1695 bp, synthetic construct; identical to SEQ ID NO: 7305
  misc_feature 1..1695: note = source = /note="Description of Artificial Sequence: Synthetic coding sequence"
  source 1..1695: mol_type = other DNA

SEQ ID NO: 7804 - DNA, 423 bp, synthetic construct; identical to SEQ ID NO: 7077
  misc_feature 1..423: note = source = /note="Description of Artificial Sequence: Synthetic coding sequence"
  source 1..423: mol_type = other DNA

SEQ ID NO: 7805 - DNA, 528 bp, synthetic construct; identical to SEQ ID NO: 7066
  misc_feature 1..528: note = source = /note="Description of Artificial Sequence: Synthetic coding sequence"
  source 1..528: mol_type = other DNA

SEQ ID NO: 7806 - DNA, 381 bp, synthetic construct; identical to SEQ ID NO: 7018
  misc_feature 1..381: note = source = /note="Description of Artificial Sequence: Synthetic coding sequence"
  source 1..381: mol_type = other DNA

SEQ ID NO: 7807 - DNA, 288 bp, synthetic construct
  misc_feature 1..288: note = source = /note="Description of Artificial Sequence: Synthetic coding sequence"
  source 1..288: mol_type = other DNA
atggcccctcctccagcctgccgcagccccatgagccccccacctccacccctgctgctgctgctgctgagcctggccctgctgggcgcccgggcccgggcagagcctgctggcagcgctgtgcctgcccagagccggccctgtgtggactgccacgcctttgagttcatgcagagggccctgcaggacctgaggaagacagcctgcagcctggatgccaggacagagaccctgctgctgcaggccgagcggcgggccctgtgtgcctgctggccagctggccactag

SEQ ID NO: 7808 - DNA, 423 bp, synthetic construct; identical to SEQ ID NO: 7077
  misc_feature 1..423: note = source = /note="Description of Artificial Sequence: Synthetic coding sequence"
  source 1..423: mol_type = other DNA

SEQ ID NO: 7809 - DNA, 291 bp, synthetic construct; identical to SEQ ID NO: 7334
  misc_feature 1..291: note = source = /note="Description of Artificial Sequence: Synthetic coding sequence"
  source 1..291: mol_type = other DNA

SEQ ID NO: 7810 - DNA, 678 bp, synthetic construct
  misc_feature 1..678: note = source = /note="Description of Artificial Sequence: Synthetic coding sequence"
  source 1..678: mol_type = other DNA
tgagctgacctgcccagctgctggggcgccggcccctgctacacaggccacaaggtgggcgccctgcggcgggacaccgtcatctgctgctgcagacatggagactacagcaccccctgcctcttcacccctgggaagcccagcaggaaccccagcccctggaagaggaccctgtggaccctgagcgccccctgggccggccctgctggctggacaggagaggagcagaatgccaccaagacaggcctcatcacccggcggccccggcccctgcggcggcggccccacccagccccagccagccccctgcctgagatcatccggggcaacatccccaggatgctgggcaagtttgtgcctgtgaactgggagcccccccagcccctgcccttccccaagtacctgcgctgctaccgctgcctgctggagaccaaggagctgggctgcctgctgggcagtgacatctgcctgaccccagctggcagcagctgcatcaccctgcacaagaagaacagcagcggcagtgatgtgatggtgtctgactgccgcagcaaggagcagatgtctgactgcagcaacaccaggaccagccctgtgtctggcttctggatcttcagccagtactgcttcctggacttctgcaatgacccccagaacagaggcctgtacaccccctag

SEQ ID NO: 7811 - DNA, 684 bp, synthetic construct
  misc_feature 1..684: note = source = /note="Description of Artificial Sequence: Synthetic coding sequence"
  source 1..684: mol_type = other DNA
atgggcgctgtgatgggcaccttcagcagcctgcagaccaagcagaggcggcccagcaaggacatcgcctggtggtactaccagtaccagagggacaagattgaagatgagctggagatgaccatggtgtgccacaggcctgagggcctggagcagctggaggcccagaccaacttcaccaagcgggagctgcaggtgctgtaccggggcttcaagaatgaatgtccttctggagtggtgaatgaagacaccttcaagcagatctatgcccagttcttcccccatggagatgccagcacctacgcccactacctgttcaatgcctttgacaccacccagacaggctctgtgaagtttgaggactttgtgacagccctgagcatcctgctgcggggcaccgtgcatgagaagctgcgctggaccttcaacctgtatgacatcaacaaggatggctacatcaacaaggaggagatgatggacatcgtgaaggccatctatgacatgatgggcaagtacacctaccctgtgctgaaggaggacaccccccggcagcacgtggatgtgttcttccagaagatggacaagaacaaggatggcatcgtgaccctggatgagttcctggagagctgccaggaggatgacaacatcatgaggagcctgcagctgttccagaatgtgatgtag

SEQ ID NO: 7812 - DNA, 546 bp, synthetic construct
  misc_feature 1..546: note = source = /note="Description of Artificial Sequence: Synthetic coding sequence"
  source 1..546: mol_type = other DNA
atgcaggtgaactttgtgtcctatgtgcagctgaccagccgggccctgcccagcctgacagacagcaagggcagcctggtggtggtgagcagcctgctgggccgggtgcccaccagcttcagcaccccctacagcgctgccaagtttgccctggatggcttcttcggcagcctgcggcgggagctggatgtgcaggatgtgaatgtggccatcaccatgtgtgtgctgggcctgcgggaccgggccagcgctgctgaggccgtgcgcagcagcaccagccggccccggcagcctgagcaccggggcgtgcccctgcagagccagacagccatgttcctgccccccaccgtgcctggggcccggaccctgacagagacccccctgcggggctggccccagcccaagatgaagagcagccggcagaagagcaagacagagaagaatgatggccacctggagcctgtgacagcctgggaggtgcaggtgccccgggtgcggcggctgtgccggggcctggcccggccccacctgtttggacatgactag

SEQ ID NO: 7813 - DNA, 423 bp, synthetic construct
  misc_feature 1..423: note = source = /note="Description of Artificial Sequence: Synthetic coding sequence"
  source 1..423: mol_type = other DNA
atgtctgacctgctgctgctgggcctcatcggcggcctgaccctgctgctgctgctgaccctgctggcctttgctggctacagcggcctgctggccggcgtggaggtgtctgctggcagcccccccatcagaaatgtgacagtggcctacaagttccacatgggcctgtatggagagaccggccgcctcttcacagagagctgcagcatcagccccaagctgcggagcattgctgtgtactatgacaacccccacatggtgcccccagacaagtgccgctgtgctgtgggcagcatcctgtctgagggggaggagagccccagccctgagctgattgacctgtaccagaagtttggcttcaaggtgttctccttccctgcccccagccacgtggtgacagccaccttcccctacaccacctag

SEQ ID NO: 7814 - DNA, 177 bp, synthetic construct
  misc_feature 1..177: note = source = /note="Description of Artificial Sequence: Synthetic coding sequence"
  source 1..177: mol_type = other DNA
atgggccctgaggccctgagcagcctgctgctgctgctgctggtggccagcggagatgctgacatgaagggccactttgatcctgccaagtgccgctatgccctgggcatgcaggacaggaccatcccagacagcgacatcagcgccagcagctcctggagcgacagcacagcctag

SEQ ID NO: 7815 - DNA, 2742 bp, synthetic construct; identical to SEQ ID NO: 7141
  misc_feature 1..2742: note = source = /note="Description of Artificial Sequence: Synthetic coding sequence"
  source 1..2742: mol_type = other DNA

SEQ ID NO: 7816 - DNA, 1146 bp, synthetic construct
  misc_feature 1..1146: note = source = /note="Description of Artificial Sequence: Synthetic coding sequence"
  source 1..1146: mol_type = other DNA
atgaggctgctggcctggctgatcttcctggccaactggggcggggcccgggcagagcccgggaagttctggcacatcgctgacctgcacctggaccctgactacaaggtgtccaaggaccccttccaggtgtgccccagcgctggcagccagcctgtgcctgatgctggcccctggggagactacctgtgtgacagcccctgggccctgatcaacagcagcatctatgccatgaaggagattgagcctgagccagacttcatcctgtggacaggagatgacacccctcatgtgcctgatgagaagctgggggaggccgctgtgctggagatcgtggagcggctgaccaagctgatccgggaggtgtttcctggggccttctactgtgagaagctgcccggccccagcggggccggcagaattgtggtgctgaacaccaacctgtactacaccagcaatgccctgacagctgacatggctgaccccggccagcagttccagtggctggaggatgtgctgacagatgccagcaaggccggggacatggtgtacatcgtgggccacgtgcccccaggcttctttgagaagacccagaacaaggcctggttccgggagggcttcaatgagaagtacctgaaggtggtgaggaagcaccaccgggtgattgctggccagttcttcggccaccaccacacagacagcttcaggatgctgtatgatgatgctggggtgcccatcagcgccatgttcatcaccccaggagtgaccccctggaagaccaccctgcccggggtggtgaatggagccaacaacccagccatccgggtgtttgaatatgaccgggccaccctgagcctgaaggacatggtgacctacttcatgaacctgagccaggccaatgcccagggcaccccccgctgggagctggagtaccagagcaccctgcagcgctactacgtgtacaacagcgtgtcctacagcgctggggtgtgtgatgaggcctgcagcatgcagcacgtgtgtgccatgaggcaggtggacattgatgcctacaccacctgcctgtatgccagcggcaccacccctgtgccccagctgcccctgctgctgatggccctgctgggcctgtgcaccctggtgctgtag

SEQ ID NO: 7817 - DNA, 456 bp, synthetic construct
  misc_feature 1..456: note = source = /note="Description of Artificial Sequence: Synthetic coding sequence"
  source 1..456: mol_type = other DNA
atgagggtggccggggccgccaagctggtggtggccgtggccgtgttcctgctgaccttctacgtgatcagccaggtgtttgagatcaagatggatgccagcctgggcaacctgtttgcccggagcgccctggacacagctgcccggagcaccaagcccccacgctacaagtgtggcatcagcaaggcctgcccagagaagcactttgccttcaagatggccagcggggccgccaacgtggtgggccccaagatctgcctggaggacaacgtgctgatgtctggagtgaagaacaacgtgggccggggcatcaacgtggccctggccaacgggaagacaggagaggtgctggacaccaagtactttgacatgtggggcggagatgtggcccccttcatcgagttcctgaaggccatccaggacggcaccatcgtgctgatgggcacctatgactag

SEQ ID NO: 7818 - DNA, 936 bp, synthetic construct
  misc_feature 1..936: note = source = /note="Description of Artificial Sequence: Synthetic coding sequence"
  source 1..936: mol_type = other DNA
tgagcccccagcccctgcagccacttcaactgtggcagccaggtgacagatggcggcaccatcaagcagaagatcttcacctttgatgccatgttcagcaccaactacagccacatggagaactacaggaagcgggaggacctggtgtaccagagcacagtgcggctgcctgaggtgcgcatcagtgacaatggcccctatgagtgccacgtgggcatctatgaccgggccacccgggagaaggtggtgctggccagcggcaacatcttcctgaatgtgatggccccacccaccagcattgaggtggtggccgctgacaccccagcccccttcagccgctaccaggcccagaacttcaccctggtgtgcatcgtgtctgggggcaagccagcccccatggtgtacttcaagagagatggagagcccattgatgctgtgcccctgtctgagcccccagctgccagcagcggccccctgcaggacagccggcccttccgcagcctgctgcaccgggacctggatgacaccaagatgcagaagagcctgagcctgctggatgctgagaacagaggaggccggccctacacagagcggcccagccggggcctgaccccagaccccaacatcctgctgcagcccaccacagagaacatccctgagaccgtggtgtcccgggagttcccccgctgggtgcacagcgctgagcccacctacttcctgcggcacagcaggacccccagcagtgatggcaccgtggaggtgcgggccctgctgacctggaccctgaacccccagattgacaatgaggccctcttcagctgtgaggtgaagcacccagccctgtccatgcccatgcaggccgaggtgaccctggtggcccccaagggccccaagatcgtgatgacccccagccgggcccgggtgggggacacctag

SEQ ID NO: 7819 - DNA, 978 bp, synthetic construct; identical to SEQ ID NO: 6924
  misc_feature 1..978: note = source = /note="Description of Artificial Sequence: Synthetic coding sequence"
  source 1..978: mol_type = other DNA

SEQ ID NO: 7820 - DNA, 957 bp, synthetic construct
  misc_feature 1..957: note = source = /note="Description of Artificial Sequence: Synthetic coding sequence"
  source 1..957: mol_type = other DNA
atgggcctgcacctgcggccctacagagtgggcctgctgcctgatggcctgctcttcctgctgctgctgctgatgctgctggccgaccctgccctgcctgctggccgccacccccctgtggtgctgggctggttcaccaccaagcaccctggcccccccagcttcctgatggtgtggatgtatgtgtccctggccctgggccggcccagccactggagctcctggaccccagccaaggccgcctgggtgcccatcagcaccccctggtggagggccctgtgggccggggccacccatggagtgaggatgtctgagggcctgcccatgaccggggctgagccccagaggcagccccaggcctggaaggacaagtacatccgggcctttgtgtccctgggcgccccctggggcggcgtggccaagaccctgcgggtgctggccagcggggacaacaaccgcatccctgtgattggccccctgaagatccgggagcagcagaggtctgctgtgtccacctcctggctgctgccctacaactacacctggagccctgagaaggtgtttgtgcagacccccaccatcaactacaccctgcgggactacaggaagttcttccaggacatcggctttgaagatggctggctgatgaggcaggacacagagggcctggtggaggccaccatgcctcctggggtgcagctgcactgcctgtatggcaccggggtgcccaccccagacagcttctactatgagagcttcccagaccgggaccccaagatctgctttggagatggagatggcaccgtgaacctgaagagcgccctgcagtgccaggcctggcagagccggcaggagcaccaggtgctgctgcaggagctgcccggcagcgagcacatcgagatgctggccaatgccaccaccctggcctacctgaagagggtgctgctgggcccctag

SEQ ID NO: 7821 - DNA, 1575 bp, synthetic construct
  misc_feature 1..1575: note = source = /note="Description of Artificial Sequence: Synthetic coding sequence"
  source 1..1575: mol_type = other DNA
tatgccctgcgggaccggcagggcaatgccatcggcgtgacagcctgtgacattgatggagatggccgggaggagatctacttcctgaacaccaacaatgccttcagcggcgtggccacctacacagacaagctgttcaagttcaggaacaaccgctgggaggacatcctgagtgatgaggtgaatgtggcccggggcgtggccagcctgtttgctggccgctctgtggcctgtgtggacaggaagggcagcggccgctacagcatctacatcgccaactatgcctatggaaatgtgggcccagatgccctgattgagatggaccctgaggccagtgacctgagccggggcatcctggccctgagagatgtggccgctgaggccggcgtgtccaagtacacaggaggccggggcgtgtctgtgggccccatcctgagcagcagcgccagtgacatcttctgtgacaatgaaaatggccccaacttcctgttccacaacagaggagatggcacctttgtggatgctgctgccagcgctggggtggatgacccccaccagcacggccggggcgtggccctggccgacttcaacagagatggcaaggtggacatcgtgtatggcaactggaatggcccccaccggctgtacctgcagatgagcacccacggcaaggtgcgcttccgggacatcgccagccccaagttctccatgcccagccctgtgaggacagtcatcacagctgactttgacaatgaccaggagctggagatcttcttcaacaacatcgcctaccgcagcagcagcgccaacagactcttccgggtcatcagaagagagcacggggaccccctgattgaggagctgaaccctggagatgccctggagcctgagggccggggcactggaggagtggtgacagactttgatggagatggcatgctggacctgatcctgagccacggggagagcatggcccagcccctgtctgtgttccggggcaaccagggcttcaacaacaactggctgcgggtggtgcccaggaccaggtttggagcctttgcccggggggccaaggtggtgctgtacaccaagaagagcggggcccacctgcgcatcattgatggcggcagcggctacctgtgtgagatggagcctgtggcccacttcggcctgggcaaggatgaggccagctctgtggaggtgacctggccagatggcaagatggtgtccagaaatgtggccagcggggagatgaacagcgtgctggagatcctgtaccccagagatgaggacaccctgcaggaccctgcccccctggagacccccatgaatgccagcagcagccacagctgtgccctggagaccagcccctacgtgtccacccccatggaggccaccggggccggccccaccaggtctgctgtgggcgccaccagccccaccaggatggcccagcctgcctggggcctgagcgccagccaccgggccccagcccctcctcctccacccctgctgctgcccctgcccctgctgctgcccctgctggagctgcccctgctgcacaggagcagctag

SEQ ID NO: 7822 - DNA, 636 bp, synthetic construct
  misc_feature 1..636: note = source = /note="Description of Artificial Sequence: Synthetic coding sequence"
  source 1..636: mol_type = other DNA
atggtgtccaggatggtgtccaccatgctgagcggcctgctcttctggctggccagcggctggaccccagcctttgcctacagccccaggaccccagacagagtgtctgaggccgacatccagaggctgctgcatggagtgatggagcagctgggcatcgcccggccccgggtggagtacccagcccaccaggccatgaacctggtgggcccccagagcattgagggcggggcccacgagggcctgcagcacctgggccccttcggcaacatccccaacatcgtggccgagctgactggagacaacatccccaaggacttcagcgaggaccagggctacccagacccccccaacccctgccctgtgggcaagacagatgatggctgcctggagaacaccccagacacagctgagttcagccgggagttccagctgcaccagcacctgtttgatcctgagcatgactacccaggcctgggcaagtggaacaagaagctgctgtatgagaagatgaagggcggggagaggaggaagagaagatctgtgaacccctacctgcagggccagaggctggacaacgtggtggccaagaagtctgtgccccacttcagtgatgaggacaaggaccctgagtag

SEQ ID NO: 7823 - DNA, 465 bp, synthetic construct
  misc_feature 1..465: note = source = /note="Description of Artificial Sequence: Synthetic coding sequence"
  source 1..465: mol_type = other DNA
atggccctgggcgtgcccatctctgtgtacctgctcttcaatgccatgacagccctgacagaggaggccgctgtgacagtgaccccacccatcacagcccagcagggcaactggacagtgaacaagacagaagctgacaacatcgagggccccatcgccctgaagttcagccacctgtgcctggaggaccacaacagctactgcatcaacggggcctgtgccttccaccacgagctggagaaggccatctgccgctgcttcaccggctacacaggagagcgctgtgagcacctgaccctgaccagctatgctgtggacagctatgagaagtacatcgccatcggcatcggcgtgggcctgctgctgagcggcttcctggtgatcttctactgctacatcaggaagcgctgcctgaagctgaagagcccctacaacgtgtgcagcggggagcggcggcccctgtag

SEQ ID NO: 7824 - DNA, 1446 bp, synthetic construct
  misc_feature 1..1446: note = source = /note="Description of Artificial Sequence: Synthetic coding sequence"
  source 1..1446: mol_type = other DNA
atgggcaagctgcggcccggccgggtggagtggctggccagcggccacacagagcggccccacctgttccagaacctgctgctcttcctgtgggccctgctgaactgtggcctgggcgtgtctgcccagggccctggagagtggaccccctgggtgtcctggacccgctgcagcagcagctgtggccggggcgtgtctgtgcgcagccgccgctgcctgcggctgcccggggaggagccctgctggggagacagccatgagtaccgcctgtgccagctgcctgactgccccccaggagctgtgcccttccgggacctgcagtgtgccctgtacaacggccggcctgtgctgggcacccagaagacctaccagtgggtgcccttccatggagcccccaaccagtgtgacctgaactgcctggccgagggccacgccttctaccacagctttggccgggtgctggatggaacagcctgcagccctggggcccagggcgtgtgtgtggccggccgctgcctgtctgctggctgtgatggcctgctgggcagcggggccctggaggacagatgtggccgctgtggcggggccaatgacagctgcctgtttgtgcagagggtcttcagagatgctggggcctttgctggctactggaatgtgaccctcatccctgagggcgcccggcacatccgggtggagcacaggagcaggaaccacctggccctgatgggaggagatggccgctacgtgctgaatggccactgggtggtgagccccccaggcacctatgaggccgccggcacccacgtggtgtacacccgggacaccggcccccaggagaccctgcaggccgccggccccaccagccatgacctgctgctgcaggtgctgctgcaggagcccaaccctggcatcgagtttgagttctggctgccccgggagcgctacagccccttccaggcccgggtgcaggccctgggctggcccctgcggcagccccagccccggggcgtggagccccagcccccagctgccccagctgtgaccccagcccagacccccaccctggccccagacccctgccccccctgcccagacacccggggccgggcccaccggctgctgcactactgcggcagtgactttgtgttccaggcccgggtgctgggccaccaccaccaggcccaggagaccaggtatgaggtgcgcatccagctggtgtacaagaacagaagccccctgcgggcccgggagtatgtgtgggcccctggccactgcccctgccccatgctggccccccaccgggactacctgatggctgtgcagaggctggtgtccccagatggcacccaggaccagctgctgctgccccacgccggctacgcccggccctggagccctgctgaggacagccgcatccggctgacagcccggcgctgccccggctag

SEQ ID NO: 7825 - DNA, 627 bp, synthetic construct
  misc_feature 1..627: note = source = /note="Description of Artificial Sequence: Synthetic coding sequence"
  source 1..627: mol_type = other DNA
atggctgacatgcagaacctggtggagcggctggagagagctgtgggccgcctggaggccgtgagccacaccagtgacatgcaccggggctacgccgacagccccagcaaggccggggccgccccctacgtgcaggcctttgacagcctgctggccggccctgtggccgagtacctgaagatcagcaaggagattggaggagatgtgcagaagcatgctgagatggtgcacacaggcctgaagctggagcgggccctgctggtgacagccagccagtgccagcagcctgctgagaacaagctgagtgacctgctggcccccatcagcgagcagatcaaggaggtgatcaccttccgggagaagaacagaggcagcaagctgttcaaccacctgtctgctgtgtctgagagcatccaggccctgggctgggtggccatggcccccaagccaggcccctacgtgaaggagatgaatgatgctgccatgttctacaccaacagagtgctgaaggagtacaaggatgtggacaagaagcacgtggactgggtgaaggcctacctgagcatctggacagagctgcaggcctacatcaaggagttccacaccaccggcctggcctggagctag

SEQ ID NO: 7826 - DNA, 1482 bp, synthetic construct
  misc_feature 1..1482: note = source = /note="Description of Artificial Sequence: Synthetic coding sequence"
  source 1..1482: mol_type = other DNA
tctgaggccgtgtacctgaatgacagcacctatgatggccacacagtgggcggcctgcagtatggaggcctgggccagctggctgatggagtggtgggcctggatgacttcaggaagagccaggagctgcgggtgtggccaggctatgactatgtgggctggagcaaccacagcttcagcagcggctacgtggagatggagtttgaatttgaccggctgcgggccttccaggccatgcaggtgcactgcaacaacatgcacaccctgggcgcccggctgcccggcggcgtggagtgccgcttccggcggggccctgccatggcctgggagggggagcccatgaggcacaacctgggcggcaacctgggggacccccgggcccgggctgtgtctgtgcccctgggcggccgggtggcccgcttcctgcagtgccgcttcctgtttgctggcccctggctgctcttcagcgagatctccttcatcagtgatgtggtgaacaacagcagccctgccctgggcggcaccttccccccagccccctggtggcccccaggccccccacccaccaacttcagcagcctggagctggagccccggggccagcagcctgtggccaaggccgagggcagccccacagccatcctgattggctgcctggtggccatcatcctgctgctgctgctgatcatcgccctgatgctgtggaggctgcactggaggcggctgctgagcaaggtgctggagagccaccccaggaccaggagccctggcctggtgggcatccggcccacccccctgcctgtgagccccatggccctgcgctgctgcagccccatccagcccacagccagcttctggcccctgacccctgtgcccctggaggcccgggccccaccccaccccccaggccccaacccccccaccccccggggcgtgactggaggcaacacctatgctgtgcctgccctgcccccaggagctgtgggagatggccccccccgggtggacttccccaggagccggctgcgcttcaaggagaagctgggggagggccagtttggagaggtgcacctgtgtgaggtggacagcccccaggacctggtgtccctggacttccccctgaatgtgaggaagggccaccccctgctggtggccgtgaagatcctgcggccagatgccaccaagaatgccagaaatgacttcctgaaggaggtgaagatcatgagccggctgaaggaccccaacatcatccggctgctgggcgtgtgtgtgcaggatgaccccctgtgcatgatcacagactacatggagaatggagacctgaaccagttcctgagcgcccaccagctggaggacaaggctgctgagggcgcccctggagatggccaggccgcccagggccccaccatctcctaccccatgctgctgcacgtggccgcccagatcgccagcggcatgagatacctggccaccctgaactag

SEQ ID NO: 7827 - DNA, 2319 bp, synthetic construct
  misc_feature 1..2319: note = source = /note="Description of Artificial Sequence: Synthetic coding sequence"
  source 1..2319: mol_type = other DNA
atgcagttccagctgaccctcttcctgcacctgggctggctgagctacagcaaggcccaggatgactgcaacagaggagcctgccaccccaccaccggggacctgctggtgggcaggaacacccagctgatggccagcagcacctgtggcctgagccgggcccagaagtactgcatcctgagctacctggagggggagcagaagtgcttcatctgtgacagccgcttcccctatgacccctatgaccagcccaacagccacaccattgaaaatgtgattgtgtcctttgagccagaccgggagaagaagtggtggcagagtgaaaatggcctggaccacgtgtccatccggctggacctggaggccctcttccgcttcagccacctgatcctgaccttcaagaccttccggcctgctgccatgctggtggagaggagcacagattatggccacaactggaaggtgttcaagtactttgccaaggactgtgccaccagcttccccaacatcaccagcggccaggcccagggcgtgggggacatcgtgtgtgacagcaagtacagcgacatcgagcccagcactggaggagaggtggtgctgaaggtgctggaccccagctttgaaattgagaacccctacagcccctacatccaggacctggtgaccctgaccaacctgcgcatcaacttcaccaagctgcacaccctgggagatgccctgctgggccggcggcagaatgacagcctggacaagtactactatgccctgtatgagatgattgtgcggggcagctgcttctgcaatggccacgcctctgaatgtcggcccatgcagaagatgagaggagatgtgttcagccccccaggcatggtgcacggccagtgtgtgtgccagcacaacacagatggccccaactgtgagcgctgcaaggacttcttccaggatgccccctggaggcctgctgctgacctgcaggacaatgcctgccgcagctgcagctgcaacagccacagcagccgctgccactttgacatgaccacctacctggccagcggcggcctgtctggaggagtgtgtgaggactgccagcacaacacagagggccagcactgtgaccgctgccggcccctcttctacagagaccccctgaagaccatcagtgacccctatgcctgcatcccctgtgaatgtgaccctgatggcaccatcagcggcggcatctgtgtgagccacagcgaccctgccctgggctctgtggccggccagtgcctgtgcaaggaaaatgtggagggcgccaagtgtgaccagtgcaagcccaaccactacggcctgagcgccacagaccccctgggctgccagccctgtgactgcaaccccctgggcagcctgcccttcctgacctgtgatgtggacaccggccagtgcctgtgcctgtcctatgtgactggagcccactgtgaggagtgcaccgtgggctactggggcctgggcaaccacctgcacggctgcagcccctgtgactgtgacatcggcggggcctacagcaatgtgtgcagccccaagaatggccagtgtgagtgccggccccacgtgacaggccgcagctgcagcgagcccgcccctggctacttctttgcccccctgaacttctacctgtatgaagctgaggaggccaccaccctgcagggcctggcccccctgggcagcgagaccttcggccagagccctgctgtgcacgtggtgctgggggagcctgtgcccggcaaccctgtgacctggacaggccctggctttgcccgggtgctgcctggagctggcctgcgctttgctgtgaacaacatccccttccctgtggacttcaccatcgccatccactatgagacccagagcgctgctgactggacagtgcagatcgtggtgaaccccccaggcggcagcgagcactgcatccccaagaccctgcagagcaagccccagagctttgccctgcctgctgccacccgcatcatgctgctgcccacccccatctgcctggagccagatgtgcagtacagcattgatgtgtacttcagccagcccctgcagggcgagagccacgcccacagccacgtgctggtggacagcgctgctgtgcagtggcacaacctgggcagcctgcagcccccacctcctgagtgcaagcagttcagctgcttctccttccccagctcctgggactaccgccaccccccaccccacctggccaacttctgcatcttcagcagagatggagtgagcccccactggccaggctggagccagaccccagacctgaggtag

SEQ ID NO: 7828 - DNA, 1371 bp, synthetic construct
  misc_feature 1..1371: note = source = /note="Description of Artificial Sequence: Synthetic coding sequence"
  source 1..1371: mol_type = other DNA
atgggccgggccggggctgctgctgtgattcctggcctggccctgctgtgggccgtgggcctgggcagcgctgcccccagcccccacctgcggctgtccttccaggagctgcaggcctggcacggcctgcagaccttcagcctggagaggacctgctgctaccaggccctgctggtggatgaggagcggggccgcctgtttgtgggcgcagaaaatcatgtggccagcctgaacctggacaacatcagcaagagggccaagaagctggcctggccagcccctgtggagtggagggaggagtgcaactgggccggcaaggacatcggcacagagtgcatgaactttgtgaagctgctgcacgcctacaacagaacccacctgctggcctgtggcaccggggccttccaccccacctgtgcctttgtggaggtgggccacagagctgaggagcctgtgctgcggctggaccccggcagaattgaagatggcaagggcaagagcccctatgaccccaggcacagagctgcctctgtgctggtgggggaggagctgtacagcggcgtggccgctgacctgatgggccgggacttcaccatcttccgcagcctgggccagaggcccagcctgaggacagagccccatgacagccgctggctgaatgagcccaagtttgtgaaggtgttctggatccctgagagcgagaacccagatgatgacaagatctacttcttcttccgggagacagctgtggaggccgccccagccctgggccgcctgtctgtgtcccgggtgggccagatctgcagaaatgatgtgggcggccagaggagcctggtgaacaagtggaccaccttcctgaaggcccggctggtgtgcagcgtgcctggggtggagggggacacccactttgaccagctgcaggatgtgttcctgctgagcagccgggaccacaggacccccctgctgtatgctgtgttcagcaccagcagcagcatcttccagggcagcgctgtgtgtgtgtacagcatgaatgatgtgagaagagccttcctgggcccctttgcccacaaggagggccccatgcaccagtgggtgtcctaccagggccgggtgccctacccccggcaggcctgtgccccagcccggcccctggcccccagcgtgccccccaggaccagccagaccatgagcagcagcctgcggggcaccacccccagctgcaccaccctgagctgccccctgggcggggccctcttctcctacaagctggagcccatcacccccagcctgaagctgcccaggacaggcctgcagcccctgacagacaccatgaccagcagcagcctggcccagaccctggcccgctgctag

SEQ ID NO: 7829 - DNA, 333 bp, synthetic construct
  misc_feature 1..333: note = source = /note="Description of Artificial Sequence: Synthetic coding sequence"
  source 1..333: mol_type = other DNA
ctcttcatgctgcacaagatcgtgcaggtgtacaacagtgatgtgattgacaagcagagcgcctccatgaccagtgacaatgctgatgacaaggccgtcatcatcctggtgcctgtgcggctgggcggggagaggaccaacacagactacctggagtttgtgaagggcatcctgagcctggagtactgtgtgggcatcattggaggcaagcccaagcagagctactactttgctggcttccaggatgacagcctcatctacatggacccccactactgccagagctttgtggatgtgtccatcaaggacttccccctggaggtgatcctgtag

SEQ ID NO: 7830 - DNA, 420 bp, synthetic construct
  misc_feature 1..420: note = source = /note="Description of Artificial Sequence: Synthetic coding sequence"
  source 1..420: mol_type = other DNA
atgggccctgaggccctgagcagcctgctgctgctgctgctggtggccagcggagatgctgacatgaagggccactttgatcctgccaagtgccgctatgccctgggcatgcaggacaggaccatcccagacagcgacatcagcgccagcagctcctggagcgacagcacagctgcccggcacagccggctggagagcagtgatggagatggagcctggtgcccagctggcagcgtcttccccaaggaggaggagtacctgcaggtggacctgcagaggctgcacctggtggccctggtgggcacccagggcagacatgctgggggcctgggcaaggagttcagccgcagctaccgcctgcgctacagcagagatggaagacgctggatgggctggaaggaccgctggggccaggagtag

SEQ ID NO: 7831 - DNA, 570 bp, synthetic construct
  misc_feature 1..570: note = source = /note="Description of Artificial Sequence: Synthetic coding sequence"
  source 1..570: mol_type = other DNA
atgctgggcatcaccagctgcagcgaccagcaggccaaggagggggagggcctggagggcagcagcacaggcagcagcagcggcaaccacggcggcagcggcggcggcaatggccacaagccaggctgtgagaagccaggaaatgaggcccggggcagcggggagagcggcatccagaacagcgagaccagccctggcatgttcaactttgacaccttctggaagaacttcaagagcaagctgggcttcatcaactgggatgccatcaacaagaaccaggtgcccccacccagcacccgggccctgctgtacttcagccggctgtgggaggacttcaagcagaacacccccttcctgaactggaaggccatcattgaaggagcagatgccagcagcctgcagaagagagctggaagagatgaccagaactacaactacaaccagcacgcctaccccacagcctatggaggcaagtacagcgtgaagaccccagccaagggcggcgtgagccccagcagcagcgccagccgggtgcagcccggcctgctgcagtgggtgaagttctggtag

SEQ ID NO: 7832 - DNA, 438 bp, synthetic construct; identical to SEQ ID NO: 7449
  misc_feature 1..438: note = source = /note="Description of Artificial Sequence: Synthetic coding sequence"
  source 1..438: mol_type = other DNA

SEQ ID NO: 7833 - DNA, 264 bp, synthetic construct
  misc_feature 1..264: note = source = /note="Description of Artificial Sequence: Synthetic coding sequence"
  source 1..264: mol_type = other DNA
tgcaagaggaagccctacctgctgcccagcatccgggagggcgcccggctgggcatccaggagtgtggcagccagttcagacatgagcgctggaactgcatgatcacagctgctgccaccacagcccccatgggcgccagccccctgtttggctatgagctgagcagcggctgccggcaggtggatgtgtcccggctgcccctgcccaggagcttccggctgctgtgctgtgagaacatgctggagaaccacgtgttcttctag

SEQ ID NO: 7834 - DNA, 2535 bp, synthetic construct; identical to SEQ ID NO: 7302
  misc_feature 1..2535: note = source = /note="Description of Artificial Sequence: Synthetic coding sequence"
  source 1..2535: mol_type = other DNA

SEQ ID NO: 7835 - DNA, 2631 bp, synthetic construct; identical to SEQ ID NO: 6925
  misc_feature 1..2631: note = source = /note="Description of Artificial Sequence: Synthetic coding sequence"
  source 1..2631: mol_type = other DNA

SEQ ID NO: 7836 - DNA, 942 bp, synthetic construct; identical to SEQ ID NO: 7248
  misc_feature 1..942: note = source = /note="Description of Artificial Sequence: Synthetic coding sequence"
  source 1..942: mol_type = other DNA

SEQ ID NO: 7837 - DNA, 843 bp, synthetic construct
  misc_feature 1..843: note = source = /note="Description of Artificial Sequence: Synthetic coding sequence"
  source 1..843: mol_type = other DNA
atgaagaccttcacctggaccctgggcgtgctcttcttcctgctggtggacaccggccactgccggggcggccagttcaagatcaagaagatcaaccagaggcgctaccccaggaccatcaaggacatgatcaccaggatggacctggagaacctgaaggatgtgctgagccggcagaagcgggagattgatgtgctgcagctggtggtggatgtggatggcaacatcgtgaatgaggtgaagctgctgaggaaggagagcaggaacatgaacagccgggtgacccagctgtacatgcagctgctgcacgagatcatcaggaagagggacaacagcctggagctgagccagctggagaacaagatcctgaatgtgaccacagagatgctgaagatggccacccgctaccgggagctggaggtgaagtatgccagcctgacagacctggtgaacaaccagagcgtgatgatcaccctgctggaggagcagtgcctgcgcatcttcagccggcaggacacccacgtgtccccacccctggtgcaggtggtgccccagcacatccccaacagccagcagtacaccccaggcctgctgggcggcaatgagatccagagggaccccggctacccccgggacctgatgcctcctccagacctggccaccagccccaccaagagccccttcaagatcccccctgtgaccttcatcaatgaaggccccttcaaggactgccagcaggccaaggaggccggccacagcgtgaatggcatcttctgggccgagtaccggggcggcagctacagcctgcgggctgtgcagatgatgatcaagcccattgattag

SEQ ID NO: 7838 - DNA, 522 bp, synthetic construct; identical to SEQ ID NO: 7221
  misc_feature 1..522: note = source = /note="Description of Artificial Sequence: Synthetic coding sequence"
  source 1..522: mol_type = other DNA

SEQ ID NO: 7839 - DNA, 309 bp, synthetic construct
  misc_feature 1..309: note = source = /note="Description of Artificial Sequence: Synthetic coding sequence"
  source 1..309: mol_type = other DNA
atggagagaggagctggggccaagctgctgcccctgctgctgctgctgcgggccaccggcttcacctgtgcccagacagatggaagaaatggctacacagctgtgattgaggtgaccagcggcggcccctggggagactgggcctggccagagatgtgcccagatggcttctttgccagcggcttcagcctgaaggtggagcccccccagggcatccctggagatgacacagccctgaatggcatccggctgcactgtgcccggggaaatgtgctgggcaacacccacgtgctgggccgcatggagtag

SEQ ID NO: 7840 - DNA, 351 bp, synthetic construct; identical to SEQ ID NO: 7504
  misc_feature 1..351: note = source = /note="Description of Artificial Sequence: Synthetic coding sequence"
  source 1..351: mol_type = other DNA

SEQ ID NO: 7841 - DNA, 1137 bp, synthetic construct
  misc_feature 1..1137: note = source = /note="Description of Artificial Sequence: Synthetic coding sequence"
  source 1..1137: mol_type = other DNA
tgatattctggggactacatggagcctgagaagccaggggcccccctgctgcccccaccaccccagaacagcgtgccccactatgcagaggccgacatcgtgaccctgcagggcgtgactggaggcaacacctatgctgtgcctgccctgcccccaggagctgtgggagatggccccccccgggtggacttccccaggagccggctgcgcttcaaggagaagctgggggagggccagtttggagaggtgcacctgtgtgaggtggacagcccccaggacctggtgtccctggacttccccctgaatgtgaggaagggccaccccctgctggtggccgtgaagatcctgcggccagatgccaccaagaatgccagcttcagcctcttcagcagaaatgacttcctgaaggaggtgaagatcatgagccggctgaaggaccccaacatcatccggctgctgggcgtgtgtgtgcaggatgaccccctgtgcatgatcacagactacatggagaatggagacctgaaccagttcctgagcgcccaccagctggaggacaaggctgctgagggcgcccctggagatggccaggccgcccagggccccaccatctcctaccccatgctgctgcacgtggccgcccagatcgccagcggcatgagatacctggccaccctgaactttgtgcaccgggacctggccaccaggaactgcctggtgggggagaacttcaccatcaagattgctgactttggcatgagcaggaacctgtatgctggggactactacagagtgcagggccgggctgtgctgcccatccgctggatggcctgggagtgcatcctgatgggcaagttcaccacagccagtgatgtgtgggccttcggcgtgaccctgtgggaggtgctgatgctgtgccgggcccagcccttcggccagctgacagatgagcaggtgattgaaaatgctggggagttcttccgggaccagggccggcaggtgtacctgagccggcccccagcctgcccccagggcctgtatgagctgatgctgcgctgctggagccgggagagcgagcagaggcctcccttcagccagctgcaccgcttcctggccgaggatgccctgaacacagtgtag

SEQ ID NO: 7842 - DNA, 942 bp, synthetic construct; identical to SEQ ID NO: 7248
  misc_feature 1..942: note = source = /note="Description of Artificial Sequence: Synthetic coding sequence"
  source 1..942: mol_type = other DNA

SEQ ID NO: 7843 - DNA, 420 bp, synthetic construct; identical to SEQ ID NO: 7830
  misc_feature 1..420: note = source = /note="Description of Artificial Sequence: Synthetic coding sequence"
  source 1..420: mol_type = other DNA

SEQ ID NO: 7844 - DNA, 342 bp, synthetic construct
  misc_feature 1..342: note = source = /note="Description of Artificial Sequence: Synthetic coding sequence"
  source 1..342: mol_type = other DNA
atggacaacgtgcagcccaagatcaagcaccggcccttctgcttctctgtgaagggccacgtgaagatgctgcggctggccctgactgtgacctccatgaccttcttcatcatcgcccaggcccctgagccctacatcgtcatcactggatttgaggtgaccgtcatcctcttcttcatcctgctgtatgtgctgcggctggaccggctgatgaagtggctgttctggcccctgctggacatcatcaacagcctggtgaccaccgtcttcatgctgattgtgtctgtgctggccctgatccctgagaccaccaccctgactgtgggcggcggcctcttctag

SEQ ID NO: 7845 - DNA, 465 bp, synthetic construct
  misc_feature 1..465: note = source = /note="Description of Artificial Sequence: Synthetic coding sequence"
  source 1..465: mol_type = other DNA
atgtttggctggggagacttccacagcaacatcaagacagtgaagctgaacctgctgatcaccgggaagatcgtggaccatggaaatggcaccttctctgtgtacttccgccacaacagcacaggccagggcaatgtgtctgtgtccctggtgccccccaccaagatcgtggagtttgacctggcccagcagacagtgattgatgccaaggacagcaagagcttcaactgcagaattgaatatgagaaggtggacaaggccaccaagaacaccctgtgcaactatgaccccagcaagacctgctaccaggagcagacccagagccacgtgtcctggctgtgcagcaagcccttcaaggtgatctgcatctacatctccttctacagcacagactacaagctggtgcagaaggtgtgcccagactacaactaccacagcgacaccccctacttccccagcggctag

SEQ ID NO: 7846 - DNA, 531 bp, synthetic construct
  misc_feature 1..531: note = source = /note="Description of Artificial Sequence: Synthetic coding sequence"
  source 1..531: mol_type = other DNA
atggctgacatgcagaacctggtggagcggctggagagagctgtgggccgcctggaggccgtgagccacaccagtgacatgcaccggggctacgccgacagccccagcaaggccggggccgccccctacgtgcaggcctttgacagcctgctggccggccctgtggccgagtacctgaagatcagcaaggagattggaggagatgtgcagaagcatgctgagatggtgcacacaggcctgaagctggagcgggccctgctggtgacagccagccagtgccagcagcctgctgagaacaagctgagtgacctgctggcccccatcagcgagcagatcaaggaggtgatcaccttccgggagaagaacagaggcagcaagctgttcaaccacctgtctgctgtgtctgagagcatccaggccctgggctgggtggccatggcccccaagccaggcccctacgtgaaggagatgaatgatgctgccatgttctacaccaacagagtgctgaaggagtacaaggatgtggactag

SEQ ID NO: 7847 - DNA, 2535 bp, synthetic construct; identical to SEQ ID NO: 7302
  misc_feature 1..2535: note = source = /note="Description of Artificial Sequence: Synthetic coding sequence"
  source 1..2535: mol_type = other DNA

SEQ ID NO: 7848 - DNA, 2055 bp, synthetic construct
  misc_feature 1..2055: note = source = /note="Description of Artificial Sequence: Synthetic coding sequence"
  source 1..2055: mol_type = other DNA
tgacccaggagcagcacccacgtgcccctggtgctgcccctgctggtgctgctgctgctggccccagcccggcaggccgccgcccagcgctgcccccaggcctgcatctgtgacaacagcagaagacatgtggcctgccgctaccagaacctgacagaggtgcctgatgccatccctgagctgacccagaggctggacctgcagggcaacctgctgaaggtgatcccagctgctgccttccagggcgtgccccacctgacccacctggacctgcggcactgtgaggtggagctggtggccgagggcgccttccggggcctgggccgcctgctgctgctgaacctggccagcaaccacctgcgggagctgccccaggaggccctggatggcctgggcagcctgcggcggctggagctggagggcaatgccctggaggagctgcggcccggcaccttcggggccctgggcgccctggccaccctgaacctggcccacaatgccctggtgtacctgcctgccatggccttccagggcctgctgcgggtgcgctggctgcggctgagccacaatgccctgtctgtgctggcccctgaggccctggccggcctgcctgccctgcggcggctgagcctgcaccacaatgagctgcaggccctgcccggccctgtgctgagccaggcccggggcctggcccggctggagctgggccacaaccccctgacctacgccggggaggaggatggcctggccctgcccggcctgcgggagctgctgctggatggaggagccctgcaggccctgggcccccgggcctttgcccactgcccccggctgcacaccctggacctgcggggcaaccagctggacaccctgccccccctgcagggccctggccagctgcggcggctgcggctgcagggcaaccccctgtggtgtggctgccaggcccggcccctgctggagtggctggcccgggcccgggtgcggagtgatggagcctgccagggcccccggcggctgcggggggaggccctggatgccctgcggccctgggacctgcgctgccctggagatgctgcccaggaggaggaggagctggaggagagagctgtggccggcccccgggccccaccccggggccccccccggggccctggagaggagagagctgtggccccctgcccccgggcctgtgtgtgtgtgcctgagagccgccacagcagctgtgagggctgcggcctgcaggccgtgccccggggcttccccagcgacacccagctgctggacctgcggaggaaccacttccccagcgtgcccagggctgccttccctggcctgggccacctggtgtccctgcacctgcagcactgcggcattgctgagctggaggccggggccctggccggcctgggccgcctcatctacctgtacctgagtgacaaccagctggccggcctgtctgctgctgccctggagggcgccccccggctgggctacctgtacctggagaggaaccgcttcctgcaggtgcctggagctgccctgcgggccctgcccagcctcttcagcctgcacctgcaggacaatgctgtggaccggctggcccctggggacctgggccgcacccgggccctgcgctgggtgtacctgagcggcaaccgcatcacagaggtgtccctgggcgccctgggccctgcccgggagctggagaagctgcacctggacaggaaccagctgcgggaggtgcccaccggggccctggagggcctgcctgccctgctggagctgcagctgagcggcaaccccctgcgggccctgagagatggagccttccagcctgtgggccgcagcctgcagcacctgttcctgaacagcagcggcctggagcagatctgccctggggccttcagcggcctgggccctggcctgcagagcctgcacctgcagaagaaccagctgcgggccctgcctgccctgcccagcgcccggaggacccccatcaagggccggcagtgtggggctgacaaggtgggcaaggagaagggccgcctgtag

SEQ ID NO: 7849 - DNA, 2259 bp, synthetic construct
  misc_feature 1..2259: note = source = /note="Description of Artificial Sequence: Synthetic coding sequence"
  source 1..2259: mol_type = other DNA
atggcccggcacctgctgctgcccctggtgatgctggtgatcagccccatccctggggccttccaggacagcgccctgagccccacccaggaggagcctgaggacctggactgtggccggcctgagcccagcgccagaattgtgggcggcagcaatgcccagcccggcacctggccctggcaggtgtccctgcaccacggcggcggccacatctgtggcggcagcctgattgcccccagctgggtgctgtctgctgcccactgcttcatgaccaacggcaccctggagcctgctgctgagtggagcgtgctgctgggcgtgcacagccaggacggccccctggatggagcccacaccagggctgtggccgccatcgtggtgcctgccaactacagccaggtggagctgggcgctgacctggccctgctgcggctggccagccctgccagcctgggccctgctgtgtggcctgtgtgcctgccccgggccagccacagatttgtgcatggaacagcctgctgggccaccggctggggagatgtgcaggaggccgaccccctgcccctgccctgggtgctgcaggaggtggagctgcggctgctgggggaggccacctgccagtgcctgtacagccagcccggccccttcaacctgaccctgcagatcctgcccggcatgctgtgtgccggctacccagagggcagaagagacacctgccagggcgacagcggcggccccctggtgtgtgaggagggcggccgctggttccaggccggcatcaccagctttggatttggctgcggcagaagaaacagacctggggtcttcaccgctgtggccacctatgaggcctggatccgggagcaggtgatgggcagcgagcccggccctgccttccccacccagccccagaagacccagagcgacccccaggagccccgggaggagaactgcaccatcgccctgcctgaatgtgggaaggcccccaggcctggggcctggccctgggaggcccaggtgatggtgcccggcagccggccctgccacggggccctggtgtctgagagctgggtgctggccccagccagctgcttcctggaccccaacagcagtgacagccccccccgggacctggatgcctggagggtgctgctgcccagccggcccagggctgagcgggtggcccggctggtgcagcatgaaaatgcctcctgggacaatgccagtgacctggccctgctgcagctgcggacccctgtgaacctgtctgctgccagcaggcctgtgtgcctgccccaccctgagcactacttcctgcccggcagccgctgccgcctggcccgctggggccgcggggagcccgccctgggccctggggccctgctggaggccgagctgctgggcggctggtggtgccactgcctgtatggccggcagggcgctgctgtgcccctgcccggggacccccctcatgccctgtgcccagcctaccaggagaaggaggaggtgggcagctgctggaatgacagccgctggagcctgctgtgccaggaggagggcacctggttcctggccggcatccgggacttccccagcggctgcctgcggccccgggccttcttccccctgcagacccacggcccctggatcagccacgtgaccaggggggcctacctggaggaccagctggcctgggactggggcccagatggagaggagacagagacccagacctgccccccccacacagaacatggagcctgtggcctgcggctggaggccgcccctgtgggcgtgctgtggccctggctggccgaggtgcacgtggccggggacagagtgtgcaccggcatcctgctggcccctggctgggtgctggccgccacccactgtgtgctgcggcccggcagcaccaccgtgccctacatcgaggtgtacctgggccgggccggggccagcagcctgccccagggccaccagatgaccagcgccccacccctgctgtgccagatgacagagggctcctggatcctggtgggcatggctgtgcagggcagccgggagctgtttgctgccatcggccctgaggaggcctggatcagccagacagtgggggaggccaacttcctgcccccatctggcagcccccactggcccaccggcggcagcaacctgtgccccccagagctggccaaggccagcggcagcccccatgctgtgtacttcctgctgctgctgaccctgctgatccagagctag

SEQ ID NO: 7850 - DNA, 453 bp, synthetic construct; identical to SEQ ID NO: 7139
  misc_feature 1..453: note = source = /note="Description of Artificial Sequence: Synthetic coding sequence"
  source 1..453: mol_type = other DNA

SEQ ID NO: 7851 - DNA, 1161 bp, synthetic construct
  misc_feature 1..1161: note = source = /note="Description of Artificial Sequence: Synthetic coding sequence"
  source 1..1161: mol_type = other DNA
atgaagttccagggccccctggcctgcctgctgctggccctgtgcctgggcagcggggaggccggccccctgcagagcggggaggagagcacaggcaccaacattggagaggccctgggccacggcctgggagatgccctgtctgagggcgtgggcaaggccatcggcaaggaggccggcggcgctgctggcagcaaggtgtctgaggccctgggccagggcacccgggaggccgtgggcactggagtgcggcaggtgcccggctttggagtggctgatgccctgggcaacagagtgggggaggccgcccacgccctgggcaacacaggccatgaaattggccggcaggccgaggatgtgatcagacatggagcagatgctgtgcggggctcctggcagggcgtgcccggccacaatggagcctgggagaccagcggcggccacggcatcttcggcagccagggcggcctgggcggccagggccagggcaaccctgggggcctgggcaccccctgggtgcacggctacccaggcaacagcgctggcagctttggcatgaacccccagggcgccccctggggccagggcggcaatggaggcccccccaactttggcaccaacacccagggcgctgtggcccagcccggctacggctctgtgcgggccagcaaccagaatgaaggctgcaccaaccccccaccttctggcagcggcggcggcagcagcaacagcggcggcggcagcggcagccagagcggcagcagcggcagcggcagcaatggagacaacaacaacggcagcagcagcggcggcagcagcagcggcagcagcagcggcggcagcagcggcggcagcagcggcggcagcagcggcaacagcggcggcagcagaggagacagcggcagcgagagctcctggggcagcagcacaggcagcagcagcggcaaccacggcggcagcggcggcggcaatggccacaagccaggctgtgagaagccaggaaatgaggcccggggcagcggggagagcggcatccagaacagcgagaccagccctggcatgttcaactttgacaccttctggaagaacttcaagagcaagctgggcttcatcaactgggatgccatcaacaaggaccagaggagcagccgcatcccctag

SEQ ID NO: 7852 - DNA, 1995 bp, synthetic construct; identical to SEQ ID NO: 6985
  misc_feature 1..1995: note = source = /note="Description of Artificial Sequence: Synthetic coding sequence"
  source 1..1995: mol_type = other DNA

SEQ ID NO: 7853 - DNA, 420 bp, synthetic construct; identical to SEQ ID NO: 7830
  misc_feature 1..420: note = source = /note="Description of Artificial Sequence: Synthetic coding sequence"
  source 1..420: mol_type = other DNA

SEQ ID NO: 7854 - DNA, 285 bp, synthetic construct; identical to SEQ ID NO: 7145
  misc_feature 1..285: note = source = /note="Description of Artificial Sequence: Synthetic coding sequence"
  source 1..285: mol_type = other DNA

SEQ ID NO: 7855 - DNA, 699 bp, synthetic construct
  misc_feature 1..699: note = source = /note="Description of Artificial Sequence: Synthetic coding sequence"
  source 1..699: mol_type = other DNA
atgctgcccaagagccggcgggccctgaccatccaggagattgctgccctggcccggagcagcctgcacggcatcagccaggtggtgaaggaccacgtgaccaagcccacagccatggcccagggccgggtggcccacctgattgagtggaagggctggagcaagcccagcgacagccctgctgccctggagagcgccttcagcagctacagcgacctgtctgagggggagcaggaggccaggtttgctgctggggtggccgagcagtttgccatcgccgaggccaagctgcgggcctggagctctgtggatggagaggacagcacagatgacagctatgatgaagattttgctgggggcatggacacagacatggccggccagctgcccctgggcccccacctgcaggacctcttcaccggccaccgcttcagcaggcctgtgcggcagggctctgtggagcctgagagtgactgcagccagacagtgtccccagacaccctgtgcagcagcctgtgcagcctggaggatggcctgctgggcagccctgcccggctggccagccagctgctgggagatgagctgctgctggccaagctgccccccagccgggagagcgccttccgcagcctgggccccctggaggcccaggacagcctgtacaacagccccctgacagagagctgcctgagcccctag

SEQ ID NO: 7856 - DNA, 2631 bp, synthetic construct; identical to SEQ ID NO: 6925
  misc_feature 1..2631: note = source = /note="Description of Artificial Sequence: Synthetic coding sequence"
  source 1..2631: mol_type = other DNA

SEQ ID NO: 7857 - DNA, 165 bp, synthetic construct
  misc_feature 1..165: note = source = /note="Description of Artificial Sequence: Synthetic coding sequence"
  source 1..165: mol_type = other DNA
atgtgccgggagacagctggctacggctggctgctggccagcacagagctgctgagcctgctggagcccctgagcccccagctgctgaaggagcacatcagctgcaccagccaggtggccgccggggccaaggtgaccccagattctgctgtgtgggccccctag

SEQ ID NO: 7858 - DNA, 2256 bp, synthetic construct; identical to SEQ ID NO: 6948
  misc_feature 1..2256: note = source = /note="Description of Artificial Sequence: Synthetic coding sequence"
  source 1..2256: mol_type = other DNA

SEQ ID NO: 7859 - DNA, 630 bp, synthetic construct
  misc_feature 1..630: note = source = /note="Description of Artificial Sequence: Synthetic coding sequence"
  source 1..630: mol_type = other DNA
atgggccctgaggccctgagcagcctgctgctgctgctgctggtggccagcggagatgctgacatgaagggccactttgatcctgccaagtgccgctatgccctgggcatgcaggacaggaccatcccagacagcgacatcagcgccagcagctcctggagcgacagcacagctgcccggcacagccggctggagagcagtgatggagatggagcctggtgcccagctggcagcgtcttccccaaggaggaggagtacctgcaggtggacctgcagaggctgcacctggtggccctggtgggcacccagggcagacatgctgggggcctgggcaaggagttcagccgcagctaccgcctgcgctacagcagagatggaagacgctggatgggctggaaggaccgctggggccaggaggtgatctctggaaatgaagatcctgagggcgtggtgctgaaggacctgggcccccccatggtggcccggctggtgcgcttctaccccagggctgacagagtgatgtctgtgtgcctgcgggtggagctgtatggctgcctgtggagagatggcctgctgagctacacagcccctgtgggccagaccatgtacctgtctgaggccgtgtactag

SEQ ID NO: 7860 - DNA, 315 bp, synthetic construct
  misc_feature 1..315: note = source = /note="Description of Artificial Sequence: Synthetic coding sequence"
  source 1..315: mol_type = other DNA
atgtctgacctgctgctgctgggcctcatcggcggcctgaccctgctgctgctgctgaccctgctggcctttgctggctacagcggcctgctggccggcgtggaggtgtctgctggcagcccccccatcagaaatgtgacagtggcctacaagttccacatgggcctgtatggagagaccggccgcctcttcacagagagctgcagcatcagccccaagctgcggagcattgctgtgtactatgacaacccccacatggtgcccccagacaagtgccgctgtgctgtgggcagcatcctgtctgagggggagtag

SEQ ID NO: 7861 - DNA, 2631 bp, synthetic construct; identical to SEQ ID NO: 6925
  misc_feature 1..2631: note = source = /note="Description of Artificial Sequence: Synthetic coding sequence"
  source 1..2631: mol_type = other DNA

SEQ ID NO: 7862 - DNA, 1053 bp, synthetic construct
  misc_feature 1..1053: note = source = /note="Description of Artificial Sequence: Synthetic coding sequence"
  source 1..1053: mol_type = other DNA
atggaggcctttgccctgggccctgcccggcggggcagaagaaggaccagggctgctggcagcctgctgagccgggccgccatcctgctcttcatcagcgccttcctggtgcgggtgcccagctctgtgggccacctggtgcggctgccccgggccttccggctgaccaaggacagcgtgaagatcgtgggcagcaccagcttccctgtgaaggcctacgtgatgctgcaccagaagagcccccacgtgctgtgtgtgacccagcagctgagaaatgctgagctgattgaccccagcttccagtggtacggccccaagggcaaggtggtgtctgagaacagaacagcccagatcaccagcacaggcagcctggtgttccagaactttgaggagagcatgagcggcatctacacctgcttcctggagtacaagcccaccgtggaggagatcgtgaagaggctgcagctgaagtatgccatctatgcctaccgggagccccactactactaccagttcaccgcccgctaccacgccgccccctgcaacagcatctacaacatcagctttgagaagaagctgctgcagatcctgagcaagctgctgctggacctgagctgtgagatcagcctgctgaagtctgagtgccaccgggtgaagatgcagagagctggcctgcagaatgaactcttctttgccttctctgtgagcagcctggacacagagaagggccccaagcgctgcacagaccacaactgtgagccctacaagaggctcttcaaggccaagaacctgattgagcgcttcttcaaccagcaggtggagatcctgggccggcgggcagagcagctgccccagatctactacatcgagggcaccctgcagatggtgtggatcaaccgctgcttccctggctacggcatgaatgtgcagcagcaccccaagtgcccagagtgctgcgtcatctgcagccctggcagctacaaccccagagatggcatccactgcctgcagtgcaacagcagcctggtgtatggagccaagacctgcctgtag

SEQ ID NO: 7863 - DNA, 1392 bp, synthetic construct
  misc_feature 1..1392: note = source = /note="Description of Artificial Sequence: Synthetic coding sequence"
  source 1..1392: mol_type = other DNA
tgactggccctggtgctgtgcaccgtggacagccggcccccagcccagctggccctgagccacgccggccgcctgctggccagcagcacagctgcctctgtgcccaacaccctgcggctggagctgcggggcccccagcccagagatgagggcttctacagctgcagcgcccggagccccctgggccaggccaacaccagcctggagctgcggctggagggcgtgcgggtcatcctggcccctgaggccgctgtgcctgagggcgcccccatcaccgtgacctgtgccgaccctgctgcccacgcccccaccctgtacacctggtaccacaacggccgctggctgcaggagggccctgctgccagcctgtccttcctggtggccacccgggcccatgctggggcctacagctgccaggcccaggatgcccagggcaccaggagcagcaggcctgctgccctgcaggtgctgtatgccccccaggatgctgtgctgagcagcttccgggacagccgggcccgctccatggctgtgatccagtgcaccgtggacagcgagcccccagctgagctggccctgagccatgatggcaaggtgctggccaccagcagcggcgtgcacagcctggccagcggcactggacatgtgcaggtggccagaaatgccctgcggctgcaggtgcaggatgtgcctgctggagatgacacctacgtgtgcacagcccagaacctgctgggcagcatcagcaccatcggccgcctgcaggtggagggcgcccgggtggtggccgagcccggcctggatgtgcctgagggcgccgccctgaacctgagctgccgcctgctgggcggccctggccctgtgggcaacagcacctttgcctggttctggaatgaccggcggctgcacgccgagcctgtgcccaccctggccttcacccacgtggcccgggcccaggccggcatgtaccactgcctggccgagctgcccactggagctgctgccagcgcccctgtgatgctgcgggtgctgtacccacccaagacccccaccatgatggtgtttgtggagcctgagggcggcctgcggggcatcctggactgccgggtggacagcgagcccctggccagcctgaccctgcacctgggcagccggctggtggccagcagccagccccagggcgccccagctgagccccacatccacgtgctggccagccccaatgccctgcgggtggacatcgaggccctgcggcccagcgaccagggcgagtacatctgcagcgccagcaatgtgctgggcagcgccagcaccagcacctactttggagtgcggggggagggccggggcctgcacctgcccggccacagcgcccagaagcccagcagctag

SEQ ID NO: 7864 - DNA, 1398 bp, synthetic construct
  misc_feature 1..1398: note = source = /note="Description of Artificial Sequence: Synthetic coding sequence"
  source 1..1398: mol_type = other DNA
atgaagttccagggccccctggcctgcctgctgctggccctgtgcctgggcagcggggaggccggccccctgcagagcggggaggagagcacaggcaccaacattggagaggccctgggccacggcctgggagatgccctgtctgagggcgtgggcaaggccatcggcaaggaggccggcggcgctgctggcagcaaggtgtctgaggccctgggccagggcacccgggaggccgtgggcactggagtgcggcaggtgcccggctttggagtggctgatgccctgggcaacagagtgggggaggccgcccacgccctgggcaacacaggccatgaaattggccggcaggccgaggatgtgatcagacatggagcagatgctgtgcggggctcctggcagggcgtgcccggccacaatggagcctgggagaccagcggcggccacggcatcttcggcagccagggcggcctgggcggccagggccagggcaaccctgggggcctgggcaccccctgggtgcacggctacccaggcaacagcgctggcagctttggcatgaacccccagggcgccccctggggccagggcggcaatggaggcccccccaactttggcaccaacacccagggcgctgtggcccagcccggctacggctctgtgcgggccagcaaccagaatgaaggctgcaccaaccccccaccttctggcagcggcggcggcagcagcaacagcggcggcagcagcacaggcagcagcagcggcaaccacggcggcagcggcggcggcaatggccacaagccaggctgtgagaagccaggaaatgaggcccggggcagcggggagagcggcatccagggcttccggggccagggcgtgagcagcaacatgagggagatcagcaaggagggcaaccggctgctgggcggcagcggggacaactaccggggccagggcagctcctggggcagcggcggcggagatgctgtgggcggcgtgaacacagtgaacagcgagaccagccctggcatgttcaactttgacaccttctggaagaacttcaagagcaagctgggcttcatcaactgggatgccatcaacaagaaccaggtgcccccacccagcacccgggccctgctgtacttcagccggctgtgggaggacttcaagcagaacacccccttcctgaactggaaggccatcattgaaggagcagatgccagcagcctgcagaagagagctggaagagatgaccagaactacaactacaaccagcacgcctaccccacagcctatggaggcaagtacagcgtgaagaccccagccaagggcggcgtgagccccagcagcagcgccagccgggtgcagcccggcctgctgcagtgggtgaagttctggtag

SEQ ID NO: 7865 - DNA, 2700 bp, synthetic construct; identical to SEQ ID NO: 7525
  misc_feature 1..2700: note = source = /note="Description of Artificial Sequence: Synthetic coding sequence"
  source 1..2700: mol_type = other DNA

SEQ ID NO: 7866 - DNA, 381 bp, synthetic construct
  misc_feature 1..381: note = source = /note="Description of Artificial Sequence: Synthetic coding sequence"
  source 1..381: mol_type = other DNA
atgtggtacgtgtccacccggggcgtggccccccgggtgaactttgaaggagccctcttcagcggctacgccccagatggcggcctcttcatgcctgaggagctgccccagctggaccggggcaccctgtgccagtggagcaccctgagctacccaggcctggtgaaggagctgtgtgccctcttcatcggcagcgagctgctgcccaaggatgagctgaatgacctgattgaccgggccttcagccgcttccgccaccgggaggtggtgcacctgagccggctgagaaatggcctgaatgtgctggagctgtggcacggcgtgacctacgccttcaaggacctgagcctgagctgcaccacccagttcctgcagtactag

SEQ ID NO: 7867 - DNA, 147 bp, synthetic construct
  misc_feature 1..147: note = source = /note="Description of Artificial Sequence: Synthetic coding sequence"
  source 1..147: mol_type = other DNA
atgccacccttcctgatcaccctcttcctgttccacagctgctgcctgcgggccaacggccacctgcgggagggcatgaccctgctgaagacagaatttgccctgcacctgtaccagagcgtggccgcctgcagaaatgagacctag

SEQ ID NO: 7868 - DNA, 390 bp, synthetic construct; identical to SEQ ID NO: 7503
  misc_feature 1..390: note = source = /note="Description of Artificial Sequence: Synthetic coding sequence"
  source 1..390: mol_type = other DNA

SEQ ID NO: 7869 - DNA, 462 bp, synthetic construct
  misc_feature 1..462: note = source = /note="Description of Artificial Sequence: Synthetic coding sequence"
  source 1..462: mol_type = other DNA
atgaccatccacatcctgatcctgctgctgctgctggccttcagcgcccagggcgacctggacacagctgcccggcggggccagcaccaggtgccccagcaccggggccacgtgtgctacctgggcgtgtgcaggacccaccggctggccgagatcatctactggatccgctgcctgcaccagggcgccctgggggagggccagccccgggcccctggccccctgcagctgtgggcccctcctgtggcccggggcggcagccctgcccgcttccctggcttccggcctgctgcccggggcctggcccagtgcccagcccgctgggtgaccagcggcacagcccggcccctgctgggcttcagcctgcccatctgcatgctggagctgctgctgcacatcagcagccccctgaccccagcccctgagaccgtcttccccagccccagccctggctgtgactag

SEQ ID NO: 7870 - DNA, 450 bp, synthetic construct
  misc_feature 1..450: note = source = /note="Description of Artificial Sequence: Synthetic coding sequence"
  source 1..450: mol_type = other DNA
atgggctggctgaccagaattgtgtgcctcttctggggcgtgctgctgacagcccgggccaactaccagaatggcaagaacaacgtgccccggctgaagctgagctacaaggagatgctggagagcaacaacgtcatcaccttcaacggcctggccaacagcagcagctaccacaccttcctgctggatgaggagaggagccggctgtatgtgggcgccaaggaccacatcttctcctttgacctggtgaacatcaaggacttccagaagatcgtgtggcctgtgtcctacaccaggagagatgagtgcaagtgggccggcaaggacatcctgaaggaatgtgccaacttcatcaaggtgctgaaggcctacaaccagacccacctgtatgcctgtggcaccggggccttccaccccatctgcacctacatcgagatcggccaccactag

SEQ ID NO: 7871 - DNA, 543 bp, synthetic construct
  misc_feature 1..543: note = source = /note="Description of Artificial Sequence: Synthetic coding sequence"
  source 1..543: mol_type = other DNA
atggctgacatgcagaacctggtggagcggctggagagagctgtgggccgcctggaggccgtgagccacaccagtgacatgcaccggggctacgccgacagccccagcaaggccggggccgccccctacgtgcaggcctttgacagcctgctggccggccctgtggccgagtacctgaagatcagcaaggagattggaggagatgtgcagaagcatgctgagatggtgcacacaggcctgaagctggagcgggccctgctggtgacagccagccagtgccagcagcctgctgagaacaagctgagtgacctgctggcccccatcagcgagcagatcaaggaggtgatcaccttccgggagaagaacagaggcagcaagctgttcaaccacctgtctgctgtgtctgagagcatccaggccctgggctgggtggccatggcccccaagccaggcccctacgtgaaggagatgaatgatgctgccatgttctacaccaacagagtgctgaaggagtacaaggatgtggacaagaagcacgtgtag

SEQ ID NO: 7872 - DNA, 630 bp, synthetic construct; identical to SEQ ID NO: 7859
  misc_feature 1..630: note = source = /note="Description of Artificial Sequence: Synthetic coding sequence"
  source 1..630: mol_type = other DNA

SEQ ID NO: 7873 - DNA, 630 bp, synthetic construct; identical to SEQ ID NO: 7859
  misc_feature 1..630: note = source = /note="Description of Artificial Sequence: Synthetic coding sequence"
  source 1..630: mol_type = other DNA

SEQ ID NO: 7874 - DNA, 2631 bp, synthetic construct; identical to SEQ ID NO: 6925
  misc_feature 1..2631: note = source = /note="Description of Artificial Sequence: Synthetic coding sequence"
  source 1..2631: mol_type = other DNA

SEQ ID NO: 7875 - DNA, 2103 bp, synthetic construct
  misc_feature 1..2103: note = source = /note="Description of Artificial Sequence: Synthetic coding sequence"
  source 1..2103: mol_type = other DNA
atgctggcccccttcctgctgctgctgacccacagccgcagccccctgtccttccggccctgcagccacgtgcctggggccctgattgcccagaagcccatgggcagcagccggctggccgccctgctgctgcccctgctgctgattgtgattgacctgagtgacagcgctggcatcggcttccgccacctgccccactggaacacccgctgccccctggccagccacacagatgacagcttcaccggcagcagcgcctacatcccctgcaggacctggtgggccctcttcagcaccaagccctggtgtgtgcgggtgtggcactgcagccgctgcctgtgccagcacctgctgagcggcggcagcggcctgcagaggggcctcttccacctgctggtgcagaagagcaagaagagcagcaccttcaagttctaccgccgccacaagatgcctgccccagcccagaggaagctgctgcccaggaggcacctgtctgagaagagccaccacatcagcatccccagcccagacatcagccacaagggcctgcggagcaagaggacccagcccagcgaccctgagacctgggagagcctgccccggctggacagccagagacatggaggccctgagttctcctttgacctgctgcctgaggcccgggccatccgggtgaccatcagcagcggccctgaggtgtctgtgcggctgtgccaccagtgggccctggagtgtgaggagctgagcagcccctatgatgtgcagaagatcgtgtctgggggccacacagtggagctgccctatgagttcctgctgccctgcctgtgcatcgaggccagctacctgcaggaggacacagtgcggaggaagaagtgccccttccagagctggccagaggcctacggcagtgacttctggaagtctgtgcacttcacagactacagccagcacacccagatggtgatggccctgaccctgcgctgccccctgaagctggaggccgccctgtgccagagacatgactggcacaccctgtgcaaggacctgcccaatgccacagcccgggagagtgatggctggtacgtgctggagaaggtggacctgcacccccagctgtgcttcaagttctcctttggaaacagcagccacgtggagtgcccccaccagacaggcagcctgacctcctggaatgtgtccatggacacccaggcccagcagctgatcctgcacttcagcagcaggatgcacgccaccttctctgctgcctggagcctgcccggcctgggccaggacaccctggtgccccctgtgtacacagtgtcccaggcccggggcagcagccctgtgtccctggacctgatcatccccttcctgcggcccggctgctgcgtgctggtgtggaggagtgatgtgcagtttgcctggaagcacctgctgtgcccagatgtgtcctaccgccacctgggcctgctgatcctggccctgctggccctgctgaccctgctgggcgtggtgctggccctgacctgcagaagaccccagagcggccctggccctgcccggcctgtgctgctgctgcacgccgctgacagcgaggcccagaggcggctggtgggcgccctggccgagctgctgcgggccgccctgggcggcggcagagatgtgattgtggacctgtgggagggccgccacgtggcccgggtgggccccctgccctggctgtgggccgcccggaccagggtggcccgggagcagggcaccgtgctgctgctgtggagcggggctgacctgcggcctgtgtctggccctgaccccagggctgcccccctgctggccctgctgcacgccgccccccggcccctgctgctgctggcctacttcagccggctgtgtgccaagggggacatccccccacccctgcgggccctgccccgctaccgcctgctgcgggacctgccccggctgctgcgggccctggatgcccggccctttgctgaggccacctcctggggccgcctgggcgcccggcagaggcggcagagccggctggagctgtgcagccggctggagcgggaggccgcccggctggccgacctgggctag

SEQ ID NO: 7876 - DNA, 1194 bp, synthetic construct
  misc_feature 1..1194: note = source = /note="Description of Artificial Sequence: Synthetic coding sequence"
  source 1..1194: mol_type = other DNA
atgaggagcctgctgctgctgagcgccttctgcctgctggaggccgccctggccgctgaggtgaagaagccagctgctgctgctgcccctggaacagctgagaagctgagccccaaggccgccaccctggccgagaggtctgctggcctggccttcagcctgtaccaggccatggccaaggaccaggccgtggagaacatcctggtgtcccctgtggtggtggccagcagcctgggcctggtgtccctgggcggcaaggccaccacagccagccaggccaaggctgtgctgtctgctgagcagctgagaaatgtgacctggaagctgggcagccggctgtatggccccagctctgtgtcctttgctgatgactttgtgcgcagcagcaagcagcactacaactgtgagcacagcaagatcaacttccgggacaagaggtctgccctgcagagcatcaatgagtgggccgcccagaccacagatggcaagctgcctgaggtgaccaaggatgtggagaggacagatggagccctgctggtgaatgccatgttcttcaagccccactgggatgagaagttccaccacaagatggtggacaacagaggcttcatggtgaccaggagctacacagtgggcgtgatgatgatgcacaggacaggcctgtacaactactatgatgatgagaaggagaagctgcagatcgtggagatgcccctggcccacaagctgagcagcctcatcatcctgatgccccaccacgtggagcccctggagcggctggagaagctgctgaccaaggagcagctgaagatctggatgggcaagatgcagaagaaggctgtggccatcagcctgcccaagggcgtggtggaggtgacccatgacctgcagaagcacctggccggcctgggcctgacagaggccatcgacaagaacaaggctgacctgagcaggatgtctgggaagaaggacctgtacctggcctctgtgttccacgccacagcctttgagctggacacagatggcaacccctttgaccaggacatctacggccgggaggagctgcggagccccaagctgttctatgctgaccaccccttcatcttcctggtgcgggacacccagagcggcagcctgctcttcatcggccgcctggtgcggcccaagggggacaagatgagagatgagctgtag

SEQ ID NO: 7877 - DNA, 612 bp, synthetic construct
  misc_feature 1..612: note = source = /note="Description of Artificial Sequence: Synthetic coding sequence"
  source 1..612: mol_type = other DNA
atggctgacatgcagaacctggtggagcggctggagagagctgtgggccgcctggaggccgtgagccacaccagtgacatgcaccggggctacgccgacagccccagcaaggccggggccgccccctacgtgcaggcctttgacagcctgctggccggccctgtggccgagtacctgaagatcagcaaggagattggaggagatgtgcagaagcatgctgagatggtgcacacaggcctgaagctggagcgggccctgctggtgacagccagccagtgccagcagcctgctgagaacaagctgagtgacctgctggcccccatcagcgagcagatcaaggaggtgatcaccttccgggagaagaacagaggcagcaagctgttcaaccacctgtctgctgtgtctgagagcatccaggccctgggctgggtggccatggcccccaagccaggcccctacgtgaaggagatgaatgatgctgccatgttctacaccaacagagtgctgaaggagtacaaggatgtggacaagaagcacgtggactgggtgaaggcctacctgagcatctggacagagctgcaggcctacatcaaggagttccacaccacctag

SEQ ID NO: 7878 - DNA, 1293 bp, synthetic construct
  misc_feature 1..1293: note = source = /note="Description of Artificial Sequence: Synthetic coding sequence"
  source 1..1293: mol_type = other DNA
atgaggaagctgatgaagcaggtgcaggagcagtgccccaacatcacccgcatctacagcatcggcaagagctaccagggcctgaagctgtatgtgatggagatgtctgacaagccaggagagcacgagctgggggagcctgaggtgcgctacgtggccggcatgcacggcaatgaggccctgggccgggagctgctgctgctgctgatgcagttcctgtgccacgagttcctgcggggcaacccccgggtgacccggctgctgtctgagatgaggatccacctgctgcccagcatgaacccagatggctatgagatcgcctaccaccggggcagcgagctggtgggctgggccgagggccgctggaacaaccagagcattgacctgaaccacaactttgctgacctgaacacccccctgtgggaggcccaggatgatggcaaggtgccccacatcgtgcccaaccaccacctgcccctgcccacctactacaccctgcccaatgccaccgtggcccctgagaccagggctgtgatcaagtggatgaagaggatcccctttgtgctgagcgccaacctgcacggcggggagctggtggtgtcctacccctttgacatgaccaggaccccctgggccgcccgggagctgacccccaccccagatgatgctgtgttccgctggctgagcacagtgtatgccggcagcaacctggccatgcaggacaccagccggcggccctgccacagccaggacttctctgtgcacggcaacatcatcaacggggctgactggcacacagtgcccggctccatgaatgacttctcctacctgcacaccaactgctttgaggtgacagtggagctgagctgtgacaagttcccccatgaaaatgagctgccccaggagtgggagaacaacaaggatgccctgctgacctacctggagcaggtgaggatgggcattgctggggtggtgcgggacaaggacacagagctgggcattgctgatgctgtgattgctgtggatggcatcaaccatgatgtgaccacagcctggggcggggactactggaggctgctgacccctggggactacatggtgacagccagcgctgagggctaccacagcgtgaccaggaactgccgggtgacctttgaggagggccccttcccctgcaactttgtgctgaccaagacccccaagcagaggctgcgggagctgctggccgccggggccaaggtgcccccagacctgcggcggcggctggagcggctgcggggccagaaggactag

SEQ ID NO: 7879 - DNA, 1680 bp, synthetic construct; identical to SEQ ID NO: 6964
  misc_feature 1..1680: note = source = /note="Description of Artificial Sequence: Synthetic coding sequence"
  source 1..1680: mol_type = other DNA

SEQ ID NO: 7880 - DNA, 8199 bp, synthetic construct
  misc_feature 1..8199: note = source = /note="Description of Artificial Sequence: Synthetic coding sequence"
  source 1..8199: mol_type = other DNA
atggagcagacagactgcaagccctaccagcccctgcccaaggtgaagcatgagatggacctggcctacaccagcagcagtgatgaaagtgaagatggcaggaagccccggcagagctacaacagccgggagaccctgcacgagtacaaccaggagctgaggatgaactacaacagccagagcaggaagaggaaggaggtggagaagagcacccaggagatggagttctgtgagaccagccacaccctgtgcagcggctaccagacagacatgcacagcgtgtccagacatggctaccagctggagatgggcagtgatgtggacacagaaacagaaggagctgccagcccagaccacgccctgaggatgtggatccggggcatgaagtctgagcacagcagctgcctgagcagccgggccaacagcgccctgagcctgacagacacagaccacgagaggaagagtgatggagaaaatggcttcaagttcagccctgtgtgctgtgacatggaggcccaggccggcagcacccaggatgtgcagagcagcccccacaaccagttcaccttccggcccctgcccccacctcctcctcctcctcatgcctgcacctgtgccaggaagcccccacctgctgctgacagcctgcagaggaggtccatgaccaccaggagccagcccagccctgctgccccagccccacccaccagcacccaggacagcgtgcacctgcacaacagctgggtgctgaacagcaacatccccctggagaccaggcacttcctgttcaagcacggcagcggcagcagcgccatcttctctgctgccagccagaactaccccctgaccagcaacacagtgtacagccccccaccccggcccctgcccaggagcaccttcagcaggcctgccttcaccttcaacaagccctaccgctgctgcaactggaagtgcacagccctgagcgccacagccatcaccgtgaccctggccctgctgctggcctacgtgattgctgtgcacctgtttggcctgacctggcagctgcagcctgtggagggggagctgtatgccaatggagtgtccaaaggaaacagaggaacagagagcatggacaccacctacagccccatcggcggcaaggtgtctgacaagtctgagaagaaggtgttccagaagggccgggccatcgacacaggagaggtggacatcggggcccaggtgatgcagaccatccccccaggcctcttctggaggttccagatcaccatccaccaccccatctacctgaagttcaacatcagcctggccaaggacagcctgctgggcatctatggaagaagaaacatcccccccacccacacccagtttgattttgtgaagctgatggatggcaagcagctggtgaagcaggacagcaagggcagtgatgacacccagcacagccccaggaacctgatcctgaccagcctgcaggagaccggcttcatcgagtacatggaccagggcccctggtacctggccttctacaatgatggcaagaagatggagcaggtgtttgtgctgaccacagccatcgagatcatggatgactgcagcaccaactgcaatggaaatggagagtgcatcagcggccactgccactgcttccctggcttcctgggccctgactgtgcccgggacagctgccctgtgctgtgtggcggcaatggagaatatgagaagggccactgtgtgtgccgccacggctggaagggcccagaatgtgatgtgcctgaggagcagtgcatcgaccccacctgcttcggccacggcacctgcatcatgggcgtgtgcatctgtgtgcccggctacaagggggagatctgtgaggaggaggactgcctggaccccatgtgcagcaaccacggcatctgtgtgaagggggagtgccactgcagcacaggctggggcggcgtgaactgtgagacccccctgcctgtgtgccaggagcagtgcagcggccacggcaccttcctgctggatgctggggtgtgcagctgtgaccccaagtggacaggcagtgactgcagcacagagctgtgcaccatggagtgtggcagccacggcgtgtgcagccggggcatctgccagtgtgaggagggctgggtgggccccacctgtgaggagaggagctgccacagccactgcacagaacatggccagtgcaaggatggaaaatgtgagtgcagccctggctgggagggggaccactgcaccatcgcccactacctggatgctgtgagagatggctgccccggcctgtgctttggaaatggccgctgcaccctggaccagaatggctggcactgtgtgtgccaggtgggctggagcggcaccggctgcaatgtggtgatggagatgctgtgtggggacaacctggacaatgatggagatggcctgacagactgtgtggaccctgactgctgccagcagagcaactgctacatcagccccctgtgccagggcagcccagaccccctggacctgatccagcagagccagaccctcttcagccagcacaccagccgcctcttctatgaccgcatcaagttcctgattggcaaggacagcacccacgtgatccccccagaggtgtcctttgacagccggcgggcctgtgtgatccggggccaggtggtggccattgatggcacccccctggtgggcgtgaatgtgtccttcctgcaccacagcgactatggcttcaccatcagccggcaggacggcagctttgacctggtggccatcggcggcatcagcgtcatcctgatctttgacaggagccccttcctgcctgagaagaggaccctgtggctgccctggaaccagttcatcgtggtggagaaggtgaccatgcagagggtggtgtctgacccccccagctgtgacatcagcaacttcatcagccccaaccccatcgtgctgcccagccccctgaccagctttggaggcagctgcccagagcggggcaccatcgtgcctgagctgcaggtggtgcaggaggagatccccatccccagcagctttgtgcggctgagctacctgagcagcaggaccccaggctacaagaccctgctgcgcatcctgctgacccacagcaccatccctgtgggcatgatcaaggtgcacctgactgtggccgtggagggccgcctgacccagaagtggttccctgctgccatcaacctggtgtacacctttgcctggaacaagacagacatctacggccagaaggtgtggggcctggccgaggccctggtgtctgtgggctatgaatatgagacctgcccagacttcatcctgtgggagcagaggacagtggtgctgcagggctttgagatggatgccagcaacctgggcggctggagcctgaacaagcaccacatcctgaacccccagagcggcatcatccacaagggaaatggagagaacatgttcatcagccagcagccccctgtgatcagcaccatcatgggaaatggccaccagaggtctgtggcctgcaccaactgcaatggacctgcccacaacaacaagctgtttgcccctgtggccctggccagcggcccagatggctctgtgtatgtgggggacttcaactttgtgcggcgcatcttccccagcggcaacagcgtgtccatcctggagctgaggaacagagacaccaggcacagcaccagccctgcccacaagtactacctggccatggaccctgtgtctgagagcctgtacctgagtgacaccaacaccaggaaggtgtacaagctgaagagcctggtggagaccaaggacctgagcaagaactttgaggtggtggccggcactggagaccagtgcctgccctttgaccagagccactgtggagatggcggccgggccagcgaggccagcctgaacagcccccggggcatcaccgtggacagacatggcttcatctactttgtggatggcaccatgatcaggaagattgatgaaaatgctgtgatcaccaccgtgattggcagcaatggcctgaccagcacccagcccctgagctgtgacagcggcatggacatcacccaggtgcggctggagtggcccacagacctggccgtgaaccccatggacaacagcctgtatgtgctggacaacaacatcgtgctgcagatcagtgaaaatagaagagtgcgcatcatcgccggccggcccatccactgccaggtgcccggcatcgaccacttcctggtgtccaaggtggccatccacagcaccctggagagcgcccgggccatctctgtgagccacagcggcctgctcttcatcgccgagacagatgagaggaaggtgaaccgcatccagcaggtgaccaccaatggagagatctacatcatcgccggggcccccacagactgtgactgcaagattgaccccaactgtgactgcttctctggagatggcggctacgccaaggatgccaagatgaaggcccccagcagcctggccgtgtccccagatggcaccctgtatgtggccgacctgggcaatgtgcgcatccgcaccatcagcaggaaccaggcccacctgaatgacatgaacatctatgaaattgccagccctgctgaccaggagctgtaccagttcaccgtgaatggcacccacctgcacaccctgaacctgatcacccgggactatgtgtacaacttcacctacaacagcgagggggacctgggcgccatcaccagcagcaatggaaattctgtgcacatcagaagagatgctgggggcatgcccctgtggctggtggtgcctgggggccaggtgtactggctgaccatcagcagcaatggagtgctgaagagggtgtctgcccagggctacaacctggccctgatgacctacccaggcaacacaggcctgctggccaccaagagcaatgaaaatggctggaccaccgtgtatgaatatgaccctgagggccacctgaccaatgccaccttccccactggagaggtgagcagcttccacagcgacctggagaagctgaccaaggtggagctggacaccagcaacagagaaaatgtgctgatgagcaccaacctgacagccaccagcaccatctacatcctgaagcaggagaacacccagagcacctacagagtgaacccagatggcagcctgcgggtgacctttgccagcggcatggagatcggcctgagcagcgagccccacatcctggccggggctgtgaaccccaccctgggcaagtgcaacatcagcctgcccggggagcacaatgccaacctgattgagtggaggcagaggaaggagcagaacaagggaaatgtgtctgcctttgagcggcggctgcgggcccacaacagaaacctgctgagcattgactttgaccacatcaccaggacaggcaagatctatgatgaccacaggaagttcaccctgcgcatcctgtatgaccagacaggccggcccatcctgtggagccctgtgagccgctacaatgaggtgaacatcacctacagccccagcggcctggtgaccttcatccagaggggcacctggaatgagaagatggagtatgaccagagcggcaagatcatcagcaggacctgggcagatggcaagatctggagctacacctacctggagaagtctgtgatgctgctgctgcacagccagaggcgctacatctttgaatatgaccagcctgactgcctgctgtctgtgaccatgcccagcatggtgcgccacagcctgcagaccatgctgtctgtgggctactacagaaacatctacaccccaccagacagcagcaccagcttcatccaggactacagcagagatggccgcctgctgcagaccctgcacctgggcactggaagaagagtgctgtacaagtacaccaagcaggcccggctgtctgaggtgctgtatgacaccacccaggtgaccctgacctatgaggagagcagtggagtcatcaagaccatccacctgatgcatgatggcttcatctgcaccatccgctaccggcagacaggccccctgattggccggcagatcttccgcttcagcgaggagggcctggtgaatgccaggtttgactacagctacaacaacttccgggtgacctccatgcaggccgtcatcaatgagacccccctgcccatcgacctgtaccgctacgtggatgtgtctggccgcacagagcagtttgggaagttcagcgtcatcaactatgacctgaaccaggtgatcaccaccaccgtgatgaagcacaccaagatcttcagcgccaacggccaggtgattgaggtgcagtatgagatcctgaaggccatcgcctactggatgaccatccagtatgacaacgtgggccgcatggtgatctgtgacatccgggtgggcgtggatgccaacatcacccgctacttctatgaatatgatgctgatggccagctgcagacagtgtctgtgaatgacaagacccagtggagatacagctatgacctgaatggaaacatcaacctgctgagccacggcaagagcgcccggctgacccccctgcgctatgacctgcgggaccgcatcacccggctgggggagatccagtacaagatggatgaagatggcttcctgcggcagagaggaaatgacatctttgagtacaacagcaatggcctgctgcagaaggcctacaacaaggccagcggctggacagtgcagtactactatgatggcctgggccggcgggtggccagcaagagcagcctgggccagcacctgcagttcttctatgctgacctgaccaaccccatccgggtgacccacctgtacaaccacaccagcagcgagatcaccagcctgtactatgacctgcagggccacctgattgccatggagctgagcagcggggaggagtactacgtggcctgtgacaacacaggcacccccctggccgtgttcagcagccggggccaggtgatcaaggagatcctgtacaccccctatggagacatctaccatgacacctacccagacttccaggtgatcatcggcttccatggaggcctgtatgacttcctgaccaagctggtgcacctgggccagagggactatgatgtggtggccggccgctggaccacccccaaccaccacatctggaagcagctgaacctgctgcccaagcccttcaacctgtacagctttgagaacaactaccctgtgggcaagatccaggatgtggccaagtacaccacagacatccgctcctggctggagctgtttggcttccagctgcacaacgtgctgcccggcttccccaagccagagctggagaacctggagctgacctatgagctgctgcggctgcagaccaagacccaggagtgggaccccgggaagaccatcctgggcatccagtgtgagctgcagaagcagctgaggaacttcatcagcctggaccagctgcccatgaccccccgctacaatgatggccgctgcctggagggcggcaagcagcccaggtttgctgctgtgcccagcgtgtttgggaagggcatcaagtttgccatcaaggatggcatcgtgacagctgacatcattggagtggccaatgaagacagccggcggctggccgccatcctgaacaatgcccactacctggagaacctgcacttcaccatcgagggccgggacacccactacttcatcaagctgggcagcctggaggaggacctggtgctgattggcaacacaggaggaagacgcatcctggagaatggagtgaatgtgacagtgtcccagatgacctctgtgctgaatggccgcaccaggagatttgctgacatccagctgcagcacggggccctgtgcttcaacatccgctatggcaccaccgtggaggaggagaagaaccacgtgctggagatcgcccggcagagagctgtggcccaggcctggaccaaggagcagaggcggctgcaggagggggaggagggcatccgggcctggacagaaggagagaagcagcagctgctgagcacaggccgggtgcagggctatgatggctactttgtgctgtctgtggagcagtacctggagctgagtgacagcgccaacaacatccacttcatgaggcagagcgagattggaagaagatag

SEQ ID NO: 7881 - DNA, 264 bp, synthetic construct
  misc_feature 1..264: note = source = /note="Description of Artificial Sequence: Synthetic coding sequence"
  source 1..264: mol_type = other DNA
atgaaggtgctgctgctgaccggcctgggcgccctcttctttgcctactactgggatgacaactttgatcctgccagcctgcagggcgcccgggtgctgctgactggagccaatgccggcgtgggggaggagctggcctaccactacgcccggctgggcagccacctggtgctgacagcccacacagaggccctgctgcagaaggcccgctggctgaccctggtggtgtccaccctgggcggccggggcaagtggatcacctag

SEQ ID NO: 7882 - DNA, 1233 bp, synthetic construct
  misc_feature 1..1233: note = source = /note="Description of Artificial Sequence: Synthetic coding sequence"
  source 1..1233: mol_type = other DNA
atgagggcctgcatcagcctggtgctggccgtgctgtgtggcctggcctgggccggcaagattgagagctgtgccagccgctgcaatgagaagttcaacagagatgctgcctgccagtgtgaccggcgctgcctgtggcacggcaactgctgtgaggactatgagcacctgtgcacagaggaccacaaggagagcgagcccctgccccagctggaggaggagacagaggaggccctggccagcaacctgtacagcgcccccaccagctgccagggccgctgctatgaggcctttgacaagcaccaccagtgccactgcaatgcccgctgccaggagtttggaaactgctgcaaggactttgagagcctgtgcagcgaccacgaggtgagccacagcagtgatgccatcaccaaggaggagatccagagcatcagcgagaagatctacagagctgacaccaacaaggcccagaaggaggacatcgtgctgaacagccagaactgcatcagccccagcgagaccaggaaccaggtggaccgctgccccaagcccctcttcacctacgtgaatgagaagctgttcagcaagcccacctacgccgccttcatcaacctgctgaacaactaccagagggccactggacatggagagcacttcagcgcccaggagctggccgagcaggatgccttcctgcgggagatcatgaagacagctgtgatgaaggagctgtacagcttcctgcaccaccagaacagatatggcagcgagcaggagtttgtggatgacctgaagaacatgtggtttggcctgtacagcagaggaaatgaggagggggacagcagcggctttgaacatgtgttcagcggggaggtgaagaagggcaaggtgacaggcttccacaactggatccgcttctacctggaggagaaggagggcctggtggactactacagccacatctatgatggcccctgggacagctacccagatgtgctggccatgcagttcaactgggatggctactacaaggaggtgggcagcgccttcatcggcagcagccctgagtttgaatttgccctgtacagcctgtgcttcatcgcccggcctgggaaggtgtgccagctgagcctgggcggctaccccctggccgtgaggacctacacctgggacaagagcacctatggaaatggcaagaagtacatcgccacagcctacatcgtgagcagcacctag

SEQ ID NO: 7883 - DNA, 351 bp, synthetic construct; identical to SEQ ID NO: 7504
  misc_feature 1..351: note = source = /note="Description of Artificial Sequence: Synthetic coding sequence"
  source 1..351: mol_type = other DNA

SEQ ID NO: 7884 - DNA, 1200 bp, synthetic construct
  misc_feature 1..1200: note = source = /note="Description of Artificial Sequence: Synthetic coding sequence"
  source 1..1200: mol_type = other DNA
atgtctgcccggggccgctgggagggcggcggccggcgggcctgccggggcagcctgggcctggcccgggcccagggcgctgagcgggtgaccagcagcgagcagaggcctgccatggccagcctgggcctgctgctgctgctgctgctgacagccctgccccccctgtggagcagcagcctgcccggcctggacacagctgagagcaaggccaccatcgctgacctgatcctgagcgccctggagcgggccaccgtcttcctggagcagaggctgcctgagatcaacctggatggcatggtgggcgtgcgggtgctggaggagcagctgaagtctgtgcgggagaagtgggcccaggagcccctgctgcagcccctgagcctgcgggtgggcatgctgggggagaagctggaggccgccatccagaggagcctgcactacctgaagctgagtgaccccaagtacctgcgggagttccagctgaccctgcagcccggcttctggaagctgccccacgcctggatccacacagatgccagcctggtgtaccccaccttcggcccccaggacagcttcagcgaggagaggagtgatgtgtgcctggtgcagctgctgggcactggaacagacagcagcgagccctgtggcctgagtgacctgtgccgcagcctgatgaccaagccaggctgcagcggctactgcctgagccaccagctgctcttcttcctgtgggccaggatgaggggctgcacccagggccccctgcagcagagccaggactacatcaacctcttctgtgccaacatgatggacctgaacagaagagctgaggccatcggctacgcctaccccacccgggacatcttcatggagaacatcatgttctgtggcatgggcggcttcagtgacttctacaagctgcgctggctggaggccatcctgtcctggcagaagcagcaggagggctgcttcggggagccagatgctgaagatgaggagctgagcaaggccatccagtaccagcagcacttcagccggcgggtgaagaggcgggagaagcagttcccagatggctgcagcagccacaacacagccacagctgtggccgccctgggcggcttcctgtacatcctggccgagtaccccccagccaaccgggagccccaccccagcaccccacctccacccagcagcaggtag

SEQ ID NO: 7885 - DNA, 510 bp, synthetic construct
  misc_feature 1..510: note = source = /note="Description of Artificial Sequence: Synthetic coding sequence"
  source 1..510: mol_type = other DNA
atgctgagctctgtggtgttctggggcctgattgccctgattggcaccagccggggcagctaccccttcagccacagcatgaagccccacctgcacccccggctgtaccacggctgctacggggacatcatgaccatgaagaccagcggggccacctgtgatgccaacagcgtgatgaactgtggcatccggggcagcgagatgtttgctgagatggacctgcgggccatcaagccctaccagaccctcatcaaggaggtgggccagaggcactgtgtggaccctgctgtgattgctgccatcatcagccgggagagccatggaggctctgtgctgcaggacggctgggaccaccggggcctgaagtttggcctgatgcagctggacaagcagacctaccaccctgtgggcgcctgggacagcaaggagcacctgagccaggccaccggcatcctgacagagcgcatcaaggccatccagaagaagttccccacctggagcgtggcctag

SEQ ID NO: 7886 - DNA, 300 bp, synthetic construct
  misc_feature 1..300: note = source = /note="Description of Artificial Sequence: Synthetic coding sequence"
  source 1..300: mol_type = other DNA
atggagcgcatcagcgccttcttcagcagcatctgggacaccatcctgaccaagcaccaggagggcatctacaacaccatctgcctgggcgtgctgctgggcctgcccctgctggtgatcatcaccctgctcttcatctgctgccactgctgctggagccccccaggcaagaggggccagcagcctgagaagaacaagaagaagaagaagaagaagaagaagaaggatgaggaggacctgtggatcagcgcccagcccaagctgctgcagatggagaagaggcccagcctgcctgtgtag

SEQ ID NO: 7887 - DNA, 468 bp, synthetic construct
  misc_feature 1..468: note = source = /note="Description of Artificial Sequence: Synthetic coding sequence"
  source 1..468: mol_type = other DNA
atgaccagcctgaagtgtggggagaacctgtacatgagcagcgccagcagctcctggagccaggccatccagagctggtttgatgagtacaatgactttgattttggagtgggccccaagaccccaaatgctgtggtgggccactacacccaggtggtgtggtacagcagctacctggtgggctgtggaaatgcctactgccccaaccagaaggtgctgaagtactactacgtgtgccagtactgcccagctggcaactgggccaaccggctgtatgtgccctatgagcagggcgccccctgtgccagctgcccagacaactgtgatgatggcctgtgcaccaacggctgcaagtatgaggacctgtacagcaactgcaagagcctgaagctgaccctgacctgcaagcaccagctggtgcgggacagctgcaaggccagctgcaactgcagcaacagcatctactag

SEQ ID NO: 7888 - DNA, 2886 bp, synthetic construct; identical to SEQ ID NO: 7526
  misc_feature 1..2886: note = source = /note="Description of Artificial Sequence: Synthetic coding sequence"
  source 1..2886: mol_type = other DNA

SEQ ID NO: 7889 - DNA, 444 bp, synthetic construct
  misc_feature 1..444: note = source = /note="Description of Artificial Sequence: Synthetic coding sequence"
  source 1..444: mol_type = other DNA
atggccggcccctggaccttcaccctgctgtgtggcctgctggccgccaccctcatccaggccaccctgagccccacagctgtgctgatcctgggccccaaggtgatcaaggagaagctgacccaggagctgaaggaccacaatgccaccagcatcctgcagcagctgcccctgctgagcgccatgagggagaagccagctgggggcatccctgtgctgggcagcctggtgaacacagtgctgaagcacatcatctggctgaaggtgatcacagccaacatcctgcagctgcaggtgaagcccagcgccaatgaccaggagctgctggtgaagatccccctggacatggtggccggcttcaacacccccctggtgaagaccatcgtggagttccacatgaccacagaggcccaggccaccatccgcatggacaccagcgcctag

SEQ ID NO: 7890 - DNA, 948 bp, synthetic construct
  misc_feature 1..948: note = source = /note="Description of Artificial Sequence: Synthetic coding sequence"
  source 1..948: mol_type = other DNA
atgaaggtgctgctgctgaccggcctgggcgccctcttctttgcctactactgggatgacaactttgatcctgccagcctgcagggcgcccgggtgctgctgactggagccaatgccggcgtgggggaggagctggcctaccactacgcccggctgggcagccacctggtgctgacagcccacacagaggccctgctgcagaaggtggtgggcaactgcaggaagctgggcgcccccaaggtgttctacatcgctgctgacatggccagccctgaggcccctgagagcgtggtgcagtttgccctggacaagctgggcggcctggactacctggtgctgaaccacatcggcggggccccagctggcacccgggcccggagcccccaggccacccgctggctgatgcaggtgaactttgtgtcctatgtgcagctgaccagccgggccctgcccagcctgacagacagcaagggcagcctggtggtggtgagcagcctgctgggccgggtgcccaccagcttcagcaccccctacagcgctgccaagtttgccctggatggcttcttcggcagcctgcggcgggagctggatgtgcaggatgtgaatgtggccatcaccatgtgtgtgctgggcctgcgggaccgggccagcgctgctgaggccgtgcgcagcagcaccagccggccccggcagcctgagcaccggggcgtgcccctgcagagccagacagccatgttcctgccccccaccgtgcctggggcccggaccctgacagagacccccctgcggggctggccccagcccaagatgaagagcagccggcagaagagcaagacagagaagaatgatggccacctggagcctgtgacagcctgggaggtgcaggtgccccgggtgcggcggctgtgccggggcctggcccggccccacctgtttggacatgactag

SEQ ID NO: 7891 - DNA, 285 bp, synthetic construct; identical to SEQ ID NO: 7145
  misc_feature 1..285: note = source = /note="Description of Artificial Sequence: Synthetic coding sequence"
  source 1..285: mol_type = other DNA

SEQ ID NO: 7892 - DNA, 783 bp, synthetic construct
  misc_feature 1..783: note = source = /note="Description of Artificial Sequence: Synthetic coding sequence"
  source 1..783: mol_type = other DNA
atggagaagttcaacaccatctctgtgtccaagtgcaacaaggagaccgtggccatgaaggagaagtgcaagtttggcatgaccagcaccatccccagcggccacgtgtggaggaacacctggaaccctgtgtcctgcagcctggccaccgtgaagatgaaggaatgtctgcggggcaagctgatctacctgatgggagacagcaccatccggcagtggatggagtacttcaaggccagcatcaacaccctgaagtctgtggacctgcacgagagcggcaagctgcagcaccagctggccgtggacctggacaggaacatcaacatccagtggcagaagtactgctaccccctgattggctccatgacctacagcgtgaaggagatggagtacctgacccgggccatcgacagaactggaggagagaagaacacagtgattgtcatcagcctgggccagcacttccggcccttccccattgatgtgttcatcagaagagccctgaatgtgcacaaggccatccagcacctgctgctgcggagcccagacaccatggtgatcatcaagacagagaacatccgggagatgtacaatgatgctgagcgcttcagtgacttccacggctacatccagtacctgatcatcaaggacatcttccaggacctgtctgtgtccatcattgatgcctgggacatcaccatcgcctacggcaccaacaacgtgcaccccccccagcacgtggtgggcaaccagatcaacatcctgctgaactacatctgctag

SEQ ID NO: 7893 - DNA, 1644 bp, synthetic construct
  misc_feature 1..1644: note = source = /note="Description of Artificial Sequence: Synthetic coding sequence"
  source 1..1644: mol_type = other DNA
atgagcagcaacaccatgctgcagaagaccctgctgatcctgatctccttctctgtggtgacctggatgatcttcatcatcagccagaacttcaccaagctgtggagcgccctgaacctgagcatctctgtgcactactggaacaacagcgccaagagcctcttccccaagaccagcctcatccccctgaagcccctgacagaaacagagctgcgcatcaaggagatcatcgagaagctggaccagcagatccccccccggcccttcacccacgtgaacaccaccaccagcgccacccacagcacagccaccatcctgaacccccgggacacctactgccgcggggaccagctggacatcctgctggaggtgcgggaccacctgggccagaggaagcagtatggaggagacttcctgcgggccaggatgagcagccctgccctgacagctggggccagcggcaaggtgatggacttcaacaacggcacctacctggtgtccttcaccctcttctgggagggccaggtgtccctgagcctgctgctgatccaccccagcgagggcgccagcgccctgtggagggccaggaaccagggctatgacaagatcatcttcaagggcaagtttgtgaatggcaccagccacgtgttcacagaatgtggcctgaccctgaacagcaatgctgagctgtgtgagtacctggatgaccgggaccaggaggccttctactgcatgaagccccagcacatgccctgtgaggccctgacctacatgaccaccaggaaccgggaggtgtcctacctgacagacaaggagaacagcctcttccacaggagcaaggtgggcgtggagatgatgaaggacaggaagcacattgatgtgaccaactgcaacaagcgggagaagattgaggagacctgccaggtgggcatgaagccccctgtgcctgggggctacaccctgcagggcaagtggatcaccaccttctgcaaccaggtgcagctggacaccatcaagatcaatggctgcctgaagggcaagctgatctacctgctgggggacagcaccctgcggcagtggatctactacttccccaaggtggtgaagaccctgaagttctttgacctgcatgaaacaggcatcttcaagaagcacctgctgctggatgctgagcggcacacccagatccagtggaagaagcacagctacccctttgtgaccttccagctgtacagcctgattgaccatgactacatcccccgggagattgaccggctgagcggggacaagaacacagccatcgtcatcaccttcggccagcacttccggcccttccccatcgacatcttcatccggcgggccatcggcgtgcagaaggccatcgagcggctcttcctgcggagccctgccaccaaggtgatcatcaagacagagaacatccgggagatgcacattgaaacagaaagatttggagacttccacggctacatccactacctgatcatgaaggacatcttcaaggacctgaatgtgggcatcattgatgcctgggacatgaccatcgcctatggaacagacaccatccaccccccagaccacgtgattggcaaccagatcaacatgttcctgaactacatctgctag

SEQ ID NO: 7894 - DNA, 399 bp, synthetic construct
  misc_feature 1..399: note = source = /note="Description of Artificial Sequence: Synthetic coding sequence"
  source 1..399: mol_type = other DNA
atgctgatgctgtttgtgtttggagtgctgctgcacgaggtgtccctgagcggccagaatgaggccccacccaacacccacagcatccctggagagcccctgtacaactatgccagcatccggctgcctgaggagcacatccccttcttcctgcacaacaacagacacatcgccaccgtgtgcaggaaggacagcctgtgcccctacaagaagcacctggagaagctgaagtactgctggggctatgagaagagctgcaagccagagttccgcttcggctaccctgtgtgcagctatgtggacatgggctggacagacaccctggagagcgctgaggacatcttctggaagcaggccgactttggctacgcccgggagcggctggaggagatgcactag

SEQ ID NO: 7895 - DNA, 861 bp, synthetic construct
  misc_feature 1..861: note = source = /note="Description of Artificial Sequence: Synthetic coding sequence"
  source 1..861: mol_type = other DNA
atgggcagcgccctgtttgtgaagaaggagctgcagctgcaggccaacttcctgggcaatgtgaagaggctgtatgaagctgaggtgttcagcacagacttcagcaaccccagcatcgcccaggcccgcatcaacagccacgtgaagaagaagacccagggcaaggtggtggacatcatccagggcctggacctgctgacagccatggtgctggtgaaccacatcttcttcaaggccaagtgggagaagcccttccaccctgagtacaccaggaagaacttccccttcctggtgggggagcaggtgacagtgcacgtgcccatgatgcaccagaaggagcagtttgcctttggagtggacacagagctgaactgctttgtgctgcagatggactacaagggagatgctgtggccttctttgtgctgcccagcaagggcaagatgaggcagctggagcaggccctgagcgcccggaccctgaggaagtggagccacagcctgcagaagcgctggattgaggtgttcatcccccgcttcagcatcagcgccagctacaacctggagaccatcctgcccaagatgggcatccagaatgtgtttgacaagaatgctgacttctctggaattgccaagagggacagcctgcaggtgtccaaggccacccacaaggctgtgctggatgtgtctgaggagggcacagaggccacagctgccaccaccaccaagttcatcgtgcgcagcaaggatggccccagctacttcaccgtgtccttcaacagaaccttcctgatgatgatcaccaacaaggccacagatggcatcctcttcctgggcaaggtggagaaccccaccaagagctag

SEQ ID NO: 7896 - DNA, 60 bp, synthetic construct
  misc_feature 1..60: note = source = /note="Description of Artificial Sequence: Synthetic coding sequence"
  source 1..60: mol_type = other DNA
atgggctggctgaccagaattgtgtgcctcttctggggcgtgctgctgacagccaggtag

SEQ ID NO: 7897 - DNA, 1197 bp, synthetic construct
  misc_feature 1..1197: note = source = /note="Description of Artificial Sequence: Synthetic coding sequence"
  source 1..1197: mol_type = other DNA
atgaagttccagggccccctggcctgcctgctgctggccctgtgcctgggcagcggggaggccggccccctgcagagcggggaggagagcacaggcaccaacattggagaggccctgggccacggcctgggagatgccctgtctgagggcgtgggcaaggccatcggcaaggaggccggcggcgctgctggcagcaaggtgtctgaggccctgggccagggcacccgggaggccgtgggcactggagtgcggcaggtgcccggctttggagtggctgatgccctgggcaacagagtgggggaggccgcccacgccctgggcaacacaggccatgaaattggccggcaggccgaggatgtgatcagacatggagcagatgctgtgcggggctcctggcagggcgtgcccggccacaatggagcctgggagaccagcggcggccacggcatcttcggcagccagggcggcctgggcggccagggccagggcaaccctgggggcctgggcaccccctgggtgcacggctacccaggcaacagcgctggcagctttggcatgaacccccagggcgccccctggggccagggcggcaatggaggcccccccaactttggcaccaacacccagggcgctgtggcccagcccggctacggctctgtgcgggccagcaaccagaatgaaggctgcaccaaccccccaccttctggcagcggcggcggcagcagcaacagcggcggcggcagcggcagccagagcggcagcagcggcagcggcagcaatggagacaacaacaacggcagcagcagcggcggcagcagcagcggcagcagcagcggcggcagcagcggcggcagcagcggcggcagcagcggcaacagcggcggcagcagaggagacagcggcagcgagagctcctggggcagcagcacaggcagcagcagcggcaaccacggcggcagcggcggcggcaatggccacaagccaggctgtgagaagccaggaaatgaggcccggggcagcggggagagcggcatccagggcttccggggccagggcgtgagcagcaacatgaggaacagcgagaccagccctggcatgttcaactttgacaccttctggaagaacttcaagagcaagctgggcttcatcaactgggatgccatcaacaaggaccagaggagcagccgcatcccctag

SEQ ID NO: 7898 - DNA, 81 bp, synthetic construct
  misc_feature 1..81: note = source = /note="Description of Artificial Sequence: Synthetic coding sequence"
  source 1..81: mol_type = other DNA
atggcccccaagaagctgagctgcctgcggagcctgctgctgcccctgagcctgaccctgctgctgccccaggccgactag

SEQ ID NO: 7899 - DNA, 696 bp, synthetic construct
  misc_feature 1..696: note = source = /note="Description of Artificial Sequence: Synthetic coding sequence"
  source 1..696: mol_type = other DNA
atggcccagctgttcctgcccctgctggccgccctggtgctggcccaggccccagctgccctggctgatgtgctggagggggacagcagcggcatctaccgctgtgaggtgcagcacggcattgatgacagcagtgatgctgtggaggtgaaggtgaagggcgtggtgttcctgtaccgggagggcagcgcccgctatgccttctccttcagcggggcccaggaggcctgtgcccgcatcggggcccacatcgccaccccagagcagctgtatgctgcctacctgggcggctatgagcagtgtgatgctggctggctgagtgaccagacagtgcgctaccccatccagaccccccgggaggcctgctatggagacatggatggcttccctggggtgagaaattatggagtggtggaccctgatgacctgtatgatgtgtactgctacgccgaggacctgaatggagagctgttcctgggggaccccccagagaagctgaccctggaggaggcccgggcctactgccaggagagaggagctgagatcgccaccaccggccagctgtatgctgcctgggatggcggcctggaccactgcagccctggctggctggctgatggctctgtgcgctaccccatcgtgacccccagccagagatgtggcggcggcctgcccggggtgaagaccctcttctag

SEQ ID NO: 7900 - DNA, 600 bp, synthetic construct
  misc_feature 1..600: note = source = /note="Description of Artificial Sequence: Synthetic coding sequence"
  source 1..600: mol_type = other DNA
atggatgagctgctgcccctcatccctgtgctggagcagtacaagacagatgccaagctgatcacccagttcaaggaggagatccggaacctgtctgctgtgctgaccggcatccaggaggagatcggggcctatgactatgaggagctgcaccagagggtgctgagcctggagacccggctgcgggactgcatgaagaagctgacctgtgggaagctgatgaagatcactggacctgtgacagtgaagaccagcggcaccaggtttggagcctggatgacagaccccctggccagcgagaagaacaacagagtgtggtacatggacagctacaccaacaacaagatcgtgcgggagtacaagagcattgctgactttgtgtctggagctgagagcaggacctacaacctgcccttcaagtgggccggcaccaaccacgtggtgtacaacggcagcctgtacttcaacaagtaccagagcaacatcatcatcaagtacagctttgacatgggccgggtgctggcccagaggagcctggagtatgccggcttccacaacgtgacccccacccatggagtggacagcctgaccagcacctag

SEQ ID NO: 7901 - DNA, 609 bp, synthetic construct
  misc_feature 1..609: note = source = /note="Description of Artificial Sequence: Synthetic coding sequence"
  source 1..609: mol_type = other DNA
atggctgacatgcagaacctggtggagcggctggagagagctgtgggccgcctggaggccgtgagccacaccagtgacatgcaccggggctacgccgacagccccagcaaggccggggccgccccctacgtgcaggcctttgacagcctgctggccggccctgtggccgagtacctgaagatcagcaaggagattggaggagatgtgcagaagcatgctgagatggtgcacacaggcctgaagctggagcgggccctgctggtgacagccagccagtgccagcagcctgctgagaacaagctgagtgacctgctggcccccatcagcgagcagatcaaggaggtgatcaccttccgggagaagaacagaggcagcaagctgttcaaccacctgtctgctgtgtctgagagcatccaggccctgggctgggtggccatggcccccaagccaggcccctacgtgaaggagatgaatgatgctgccatgttctacaccaacagagtgctgaaggagtacaaggatgtggacaagaagcacgtggactgggtgaaggcctacctgagcatctggacagagctgcaggcctacatcaaggagttccacacctag

SEQ ID NO: 7902 - DNA, 2886 bp, synthetic construct; identical to SEQ ID NO: 7526
  misc_feature 1..2886: note = source = /note="Description of Artificial Sequence: Synthetic coding sequence"
  source 1..2886: mol_type = other DNA

SEQ ID NO: 7903 - DNA, 351 bp, synthetic construct; identical to SEQ ID NO: 7504
  misc_feature 1..351: note = source = /note="Description of Artificial Sequence: Synthetic coding sequence"
  source 1..351: mol_type = other DNA

SEQ ID NO: 7904 - DNA, 2334 bp, synthetic construct
  misc_feature 1..2334: note = source = /note="Description of Artificial Sequence: Synthetic coding sequence"
  source 1..2334: mol_type = other DNA
atggctgctgctggcctggtggccgtggccgctgctgctgagtacagcggcaccgtggccagcggcggcaacctgcccggggtgcactgcggccccagcagcggggccggccctggcttcggccctggctcctggagccgcagcctggaccgggccctggaggaggccgctgtgactggagtgctgagcctgagcggcaggaagctgcgggagttccccaggggggccgccaaccacgacctgacagacaccaccagggctgacctgagcaggaaccggctgtctgagatccccatcgaggcctgccactttgtgtccctggagaacctgaacctgtaccagaactgcatccgctacatccctgaggccatcctgaacctgcaggccctgaccttcctgaacatcagcaggaaccagctgagcaccctgcctgtgcacctgtgcaacctgcccctgaaggtgctgattgccagcaacaacaagctggtgtccctgcctgaggagatcggccacctgcggcacctgatggagctggatgtgtcctgcaatgagatccagaccatccccagccagatcggcaacctggaggccctgcgggacctgaatgtgagaagaaaccacctggtgcacctgcctgaggagctggccgagctgcccctcatccggctggacttcagctgcaacaagatcaccaccatccctgtgtgctacagaaacctgcggcacctgcagaccatcaccctggacaacaaccccctgcagagccccccagcccagatctgcatcaagggcaaggtgcacatcttcaagtacctgaacatccaggcctgcaagatcgccccagacctgcctgactatgaccggcggcccctgggcttcggcagctgccacgaggagctgtacagcagccggccctacggggccctggacagcggcttcaacagcgtggacagcggggacaagcgctggagcggaaatgagcccacagatgagttcagtgacctgcccctgcgggtggccgagatcaccaaggagcagaggctgcggcgggagagccagtaccaggagaacagaggcagcctggtggtgaccaatggaggagtggagcatgacctggaccagattgactacatcgacagctgcacagctgaggaggaggaggccgaggtgcggcagcccaagggccctgaccctgacagcctgagcagccagttcatggcctacatcgagcagaggcgcatcagccatgagggcagccctgtgaagcctgtggccatccgggagttccagaagacagaggacatgaggcgctacctgcaccagaacagagtgcctgctgagcccagcagcctgctgagcctgagcgccagccacaaccagctgagccacacagacctggagctgcaccagaggcgggagcagctggtggagaggacccggcgggaggcccagctggccgccctgcagtatgaggaggagaagatccgcaccaagcagatccagagagatgctgtgctggactttgtgaagcagaaggccagccagagcccccagaagcagcaccccctgctggatggagtggatggagagtgccccttccccagccgccgcagccagcacacagatgacagcgccctgtgcatgagcctgagcggcctgaaccaggtgggctgtgccgccaccctgccccacagcagcgccttcacccccctgaagagtgatgaccggcccaatgccctgctgagcagccctgccacagagaccgtgcaccacagccctgcctacagcttccctgctgccatccagaggaaccagccccagaggcctgagagcttcctgttccgggccggcgtgcgggcagagaccaacaagggccacgccagccccctgcccccatctgctgcccccaccacagacagcacagacagcatcaccggccagaacagccggcagcgggaggaggagctggagctgattgaccagctgaggaagcacatcgagtaccgcctgaaggtgtccctgccctgtgacctgggcgccgccctgacagatggagtggtgctgtgccacctggccaaccacgtgcggcccaggtctgtgcccagcatccacgtgcccagccctgctgtgcccaagctgaccatggccaagtgcagaagaaatgtggagaacttcctggaggcctgcaggaagattggagtgccccaggagcagctgtgcctgcccctgcacatcctggaggagaagggcctgagccaggtggccgtgacagtgcaggccctgctggagctggccccacccaagcagcagcagcaccagctgtctgctgtgtag

SEQ ID NO: 7905 - DNA, 834 bp, synthetic construct
  misc_feature 1..834: note = source = /note="Description of Artificial Sequence: Synthetic coding sequence"
  source 1..834: mol_type = other DNA
atgctgcaccctgagaccagccctggccggggccacctgctggccgtgctgctggccctgctgggcaccacctgggccgaggtgtggccaccccagctgcaggagcaggcccccatggccggggccctgaacaggaaggagagcttcctgctgctgagcctgcacaaccggctgcgctcctgggtgcagcccccagctgctgacatgaggcggctgctggtgtgggccaccagcagccagctgggctgcggccgccacctgtgcagcgctggccagacagccatcgaggcctttgtgtgtgcctacagccctgggggcaactgggaggtgaatggcaagaccatcatcccctacaagaagggggcctggtgcagcctgtgcacagcctctgtgtctggctgcttcaaggcctgggaccatgctgggggcctgtgtgaggtgcccaggaacccctgcaggatgagctgccagaaccacggccgcctgaacatcagcacctgccactgccactgccccccaggctacacaggccgctactgccagggccacctgcccaacagcaacatgccccacagcgccatgggcaccaagcccaagaccccaggagtgcctgccatcggcagcctggtgcgctgcagcctgcagtgtgtgcacggccgcttccgggaggaggagtgcagctgtgtgtgtgacatcggctacggcggggcccagtgtgccagcgagagctgcccccgggcccccaaggagcccgcccccctgaagacccccctgcagtggggcatcagcagccaggagcctgctgtgtgcctgtccttccagctgatccagtag

SEQ ID NO: 7906 - DNA, 456 bp, synthetic construct
  misc_feature 1..456: note = source = /note="Description of Artificial Sequence: Synthetic coding sequence"
  source 1..456: mol_type = other DNA
atgtctgacctgctgctgctgggcctcatcggcggcctgaccctgctgctgctgctgaccctgctggcctttgctggctacagcggcctgctggccggcgtggaggtgtctgctggcagcccccccatcagaaatgtgacagtggcctacaagttccacatgggcctgtatggagagaccggccgcctcttcacagagagctgcagcatcagccccaagctgcggagcattgctgtgtactatgacaacccccacatggtgcccccagacaagtgccgctgtgctgtgggcagcatcctgtctgagggggaggagagccccagccctgagctgattgacctgtaccagaagtttggcttcaaggtgttctccttccctgcccccagccacgtggtgacagccaccttcccctacaccaccatcctgagcatctggctggccaccaggagagtgtag

SEQ ID NO: 7907 - DNA, 390 bp, synthetic construct; identical to SEQ ID NO: 7503
  misc_feature 1..390: note = source = /note="Description of Artificial Sequence: Synthetic coding sequence"
  source 1..390: mol_type = other DNA

SEQ ID NO: 7908 - DNA, 390 bp, synthetic construct; identical to SEQ ID NO: 7503
  misc_feature 1..390: note = source = /note="Description of Artificial Sequence: Synthetic coding sequence"
  source 1..390: mol_type = other DNA

SEQ ID NO: 7909 - DNA, 891 bp, synthetic construct
  misc_feature 1..891: note = source = /note="Description of Artificial Sequence: Synthetic coding sequence"
  source 1..891: mol_type = other DNA
atggaggccctgctgctgggcgccggcctgctgctgggcgcctacgtgctggtgtactacaacctggtgaaggccccaccctgtggcggcatgggcaacctgcggggccgcacagctgtggtgacaggcatcagcagctgtggccgcacccgggaggccttcaacctgctgctgcgggtgaaccacatcggccccttcctgctgacccacctgctgctgccctgcctgaaggcctgtgcccccagccgggtggtggtggtggccagcgctgcccactgccggggccgcctggacttcaagaggctggacaggcctgtggtgggctggaggcaggagctgcgggcctatgctgacaccaagctggccaacgtgctgtttgcccgggagctggccaaccagctggaggccactggagtgacctgctatgctgcccaccctggccctgtgaacagcgagctgttcctgcggcacgtgcccggctggctgcggcccctgctgcggcccctggcctggctggtgctgcgggccccccggggcggggcccagacccccctgtactgtgccctgcaggagggcatcgagcccctgagcggccgctactttgccaactgccacgtggaggaggtgcccccagctgccagagatgaccgggccgcccaccggctgtgggaggccagcaagaggctggccggcctgggccctggagaagatgctgagccagatgaggacccccagagtgaagattctgaggcccccagcagcctgagcaccccccaccctgaggagcccaccgtgtcccagccctaccccagcccccagagcagcccagacctgagcaagatgacccaccgcatccaggccaaggtggagcctgagatccagctgtcctag

SEQ ID NO: 7910 - DNA, 567 bp, synthetic construct; identical to SEQ ID NO: 7502
  misc_feature 1..567: note = source = /note="Description of Artificial Sequence: Synthetic coding sequence"
  source 1..567: mol_type = other DNA

SEQ ID NO: 7911 - DNA, 978 bp, synthetic construct; identical to SEQ ID NO: 6924
  misc_feature 1..978: note = source = /note="Description of Artificial Sequence: Synthetic coding sequence"
  source 1..978: mol_type = other DNA

SEQ ID NO: 7912 - DNA, 2631 bp, synthetic construct; identical to SEQ ID NO: 6925
  misc_feature 1..2631: note = source = /note="Description of Artificial Sequence: Synthetic coding sequence"
  source 1..2631: mol_type = other DNA

SEQ ID NO: 7913 - DNA, 1482 bp, synthetic construct
  misc_feature 1..1482: note = source = /note="Description of Artificial Sequence: Synthetic coding sequence"
  source 1..1482: mol_type = other DNA
atggccctgctggccggcggcctgagccggggcctgggcagccaccctgctgctgctggaagagatgctgtggtgtttgtgtggctgctgctgagcacctggtgcacagccccagcccgggccatccaggtgacagtgagcaacccctaccacgtggtgatcctcttccagcctgtgaccctgccctgcacctaccagatgaccagcacccccacccagcccatcgtcatctggaagtacaagagcttctgccgggacagaattgctgatgccttcagccctgcctctgtggacaaccagctgaatgcccagctggccgccggcaaccctggctacaacccctacgtggagtgccaggacagcgtgaggacagtgcgggtggtggccaccaagcagggcaatgctgtgaccctgggggactactaccagggccgccgcatcaccatcaccggcatgtatgctgctgggaaggccgccaccagcggcgtgcccagcatctatgcccccagcacctacgcccacctgagccctgccaagaccccacctcctccagccatgatccccatgggccctgcctacaacggctacccaggcggctacccaggagatgtggacaggagcagcagcgctgggggccagggcagctatgtgcccctgctgcgggacacagacagctctgtggccagcgaggtgcgcagcggctaccgcatccaggccagccagcaggatgacagcatgagggtgctgtactacatggagaaggagctggccaactttgaccccagccggcccggcccccccagcggccgggtggagcgggccatgtctgaggtgaccagcctgcatgaagatgactggaggagccggcccagccggggccctgccctgacccccatcagagatgaggagtggggcggccacagccccaggagcccccggggctgggaccaggagcccgcccgggagcaggccggcggcggctggagggcccggcggccccgggcccggtctgtggatgccctggatgacctgaccccacccagcacagctgagagcggcagccgcagccccaccagcaatggaggccgcagccgggcctacatgccacccaggagccgcagcagagatgacctgtatgaccaggatgacagccgggacttccccaggagccgggacccccactatgatgacttccgcagccgggagcggcccccagctgaccccaggagccaccaccacaggacccgggacccccgggacaatggcagccgcagcggggacctgccctatgatggccgcctgctggaggaggccgtgaggaagaagggcagcgaggagcggcggcggccccacaaggaggaggaggaggaggcctactaccccccagcccccccaccctacagcgagacagacagccaggccagccgggagcggcggctgaagaagaacctggccctgagccgggagagcctggtggtgtag

SEQ ID NO: 7914 - DNA, 1788 bp, synthetic construct
  misc_feature 1..1788: note = source = /note="Description of Artificial Sequence: Synthetic coding sequence"
  source 1..1788: mol_type = other DNA
atggacttcctgctggccctggtgctggtgagcagcctgtacctgcaggccgctgctgagtttgatggccgctggccccggcagatcgtgagcagcatcggcctgtgccgctatggaggaagaattgactgctgctggggctgggcccggcagagctggggccagtgccagcctgtgtgccagccccgctgcaagcacggggagtgcatcggccccaacaagtgcaagtgccaccctggctacgccggcaagacctgcaaccaggatgagcacatcccagcccccctggaccagggcagcgagcagcccctcttccagcccctggaccaccaggccaccagcctgcccagccgggacctgaatgaatgtggcctgaagccccggccctgcaagcaccgctgcatgaacacctacggcagctacaagtgctactgcctgaatggctacatgctgatgccagatggcagctgcagcagcgccctgacctgcagcatggccaactgccagtatggctgtgatgtggtgaagggccagatccgctgccagtgccccagccctggcctgcagctggccccagatggccgcacctgtgtggatgtggatgaatgtgccaccggccgggccagctgcccccgcttccggcagtgtgtgaacaccttcggcagctacatctgcaagtgccacaagggctttgacctgatgtacatcggcggcaagtaccagtgccacgacattgatgaatgttccctgggccagtaccagtgcagcagctttgcccgctgctacaacatccggggcagctacaagtgcaagtgcaaggagggctaccagggagatggcctgacctgtgtgtacatccccaaggtgatgattgagcccagcggccccatccacgtgcccaagggaaatggcaccatcctgaagggggacaccggcaacaacaactggatcccagatgtgggcagcacctggtggccacccaagaccccctacatcccccccatcatcaccaaccggcccaccagcaagcccaccacccggcccacccccaagcccacccccatccccaccccacctcctcctccacccctgcccacagagctgcggacccccctgccccccaccaccccagagcggcccaccaccggcctgaccaccatcgccccagctgccagcaccccacctgggggcatcaccgtggacaacagagtgcagacagacccccagaagcccagaggagatgtgttcatcccccggcagcccagcaatgacctgtttgagatctttgaaattgagcggggcgtgtctgcagatgatgaggccaaggatgatcctggggtgctggtgcacagctgcaactttgaccacggcctgtgtggctggatccgggagaaggacaatgacctgcactgggagcccatccgggaccctgctgggggccagtacctgactgtgtctgctgccaaggcccctgggggcaaggccgcccggctggtgctgcccctgggccgcctgatgcacagcggggacctgtgcctgtccttccgccacaaggtgacaggcctgcacagcggcaccctgcaggtgtttgtgaggaagcacggggcccatggagctgccctgtggggcagaaatggaggccacggctggaggcagacccagatcaccctgcggggagctgacatcaagtctgtggtgttcaagggggagaagaggcggggccacactggagaaattggcctggatgatgtgtccctgaagaagggccactgcagcgaggagaggtag

SEQ ID NO: 7915 - DNA, 210 bp, synthetic construct
  misc_feature 1..210: note = source = /note="Description of Artificial Sequence: Synthetic coding sequence"
  source 1..210: mol_type = other DNA
atgaagaaccaggacaagaagaatggagctgccaagcagagcaaccccaagagcagccctggccagcctgaggccggcagctttgacagcctggacctggagaaggtgtccctgggccgggccctggccggccgctctgagctgggcatcagctgcctggagcagggcacctggaggatgttcctgcggggcatgatgtgctggagctag

SEQ ID NO: 7916 - DNA, 483 bp, synthetic construct
  misc_feature 1..483: note = source = /note="Description of Artificial Sequence: Synthetic coding sequence"
  source 1..483: mol_type = other DNA
atggcccgggactatgaccacctgttcaagctgctgatcatcggggacagcggcgtgggcaagagcagcctgctgctgcgctttgctgacaacaccttcagcggcagctacatcaccaccatcggcgtggacttcaagatcagaacagtggagatcaatggagagaaggtgaagctgcagatctgggacacagctggccaggagcgcttccgcaccatcaccagcacagctgagacagccctgcggagcctgccccagcctgaggcccacggcggcagcagcggggacagcctgagctttgtgcccctcttcaaggagttcagcccctgcttctgcatcggccgctgccaccgccacttcctgccccggcccccccgggtgccccggcgctgctggaccagcccccccttccccactggagcccccagcagccctgccaaggcccctggccctggagaagatgctgccaggagagctgactag

SEQ ID NO: 7917 - DNA, 360 bp, synthetic construct; identical to SEQ ID NO: 7241
  misc_feature 1..360: note = source = /note="Description of Artificial Sequence: Synthetic coding sequence"
  source 1..360: mol_type = other DNA

SEQ ID NO: 7918 - DNA, 2514 bp, synthetic construct
  misc_feature 1..2514: note = source = /note="Description of Artificial Sequence: Synthetic coding sequence"
  source 1..2514: mol_type = other DNA
atgttcaagtgctggagcgtggtgctggtgctgggcttcatcttcctggagagcgagggccggcccaccaaggagggcggctacggcctgaagagctaccagcccctgatgaggctgcggcacaaggagaagaaccaggagagcagccgggtgaagggcttcatgatccaggacggccccttcggcagctgtgagaacaagtactgcggcctgggccgccactgtgtgaccagccgggagaccggccaggctgaatgtgcctgcatggacctgtgcaagaggcactacaagcctgtgtgtggcagtgatggagagttctatgagaaccactgtgaggtgcaccgggccgcctgcctgaagaagcagaagatcaccatcgtgcacaatgaagactgcttcttcaagggggacaagtgcaagaccacagagtacagcaagatgaagaacatgctgctggacctgcagaaccagaagtacatcatgcaggagaatgaaaaccccaatggagatgacatcagcaggaagaagctgctggtggaccagatgttcaagtactttgatgctgacagcaatggcctggtggacatcaatgagctgacccaggtgatcaagcaggaggagctgggcaaggacctgtttgactgcaccctgtatgtgctgctgaagtatgatgacttcaatgctgacaagcacctggccctggaggagttctaccgggccttccaggtgatccagctgagcctgcctgaggaccagaagctgagcatcacagctgccaccgtgggccagagcgctgtgctgagctgtgccatccagggcaccctgcggccccccatcatctggaagaggaacaacatcatcctgaacaacctggacctggaggacatcaatgactttggagatgatggcagcctgtacatcaccaaggtgaccaccacccacgtgggcaactacacctgctacgcagatggctatgagcaggtgtaccagacccacatcttccaggtgaatgtgccccctgtgatccgggtgtacccagagagccaggcccgggagcccggggtgacagccagcctgcgctgccacgccgagggcatccccaagccccagctgggctggctgaagaatggcatcgacatcacccccaagctgagcaagcagctgaccctgcaggccaatggaagtgaggtgcacatcagcaatgtgcgctatgaagatactggagcctacacctgcatcgccaagaatgaggccggcgtggatgaggacatcagcagcctgtttgtggaggacagcgccaggaagacccggctgggcatcggcaacatgttttatgtgttctatgaagatggcatcaaggtgatccagcccattgaatgtgagttccagaggcacatcaagcccagcgagaagctgctgggcttccaggatgaggtgtgccccaaggccgagggagatgaggtgcagagatgtgtgtgggccagcgctgtgaatgtgaaggacaagttcatctacgtggcccagcccaccctggacagagtgctgattgtggatgtgcagagccagaaggtggtgcaggccgtgtccacagatcctgtgcctgtgaagctgcactatgacaagagccatgaccaggtgtgggtgctgtcctggggcaccctggagaagaccagccccaccctgcaggtgatcaccctggccagcggaaatgtgccccaccacaccatccacacccagcctgtgggcaagcagtttgacagagtggatgacttcttcatccccaccaccaccctcatcatcacccacatgagatttggcttcatcctgcacaaggatgaggccgccctgcagaagattgacctggagaccatgagctacatcaagaccatcaacctgaaggactacaagtgtgtgccccagagcctggcctacacccacctgggcggctactacttcatcggctgcaagccagacagcactggagctgtgagcccccaggtgatggtggatggagtgacagattctgtgattggcttcaacagtgatgtgacaggcaccccctacgtgtccccagatggccactacctggtgtccatcaatgatgtgaagggcctggtgcgggtgcagtacatcaccatccggggggagatccaggaggcctttgacatctacaccaacctgcacatcagtgacctggccttccagcccagcttcacagaggcccaccagtacaacatctacggcagcagcagcacccagacagatgtgctgtttgtggagctgagcagcggcaaggtgaagatgatcaagagcctgaaggagcccctgaaggccgaggagtggccctggaacaggaagaaccggcagatccaggacagcggcctgtttggccagtacctgatgacccccagcaaggacagcctcttcatcctggatggccgcctgaacaagctgaactgtgagatcacagaggtggagaagggcaacacagtcatctgggtgggagatgcctag

SEQ ID NO: 7919 - DNA, 648 bp, synthetic construct
  misc_feature 1..648: note = source = /note="Description of Artificial Sequence: Synthetic coding sequence"
  source 1..648: mol_type = other DNA
atggctgacatgcagaacctggtggagcggctggagagagctgtgggccgcctggaggccgtgagccacaccagtgacatgcaccggggctacgccgacagccccagcaaggccggggccgccccctacgtgcaggcctttgacagcctgctggccggccctgtggccgagtacctgaagatcagcaaggagattggaggagatgtgcagaagcatgctgagatggtgcacacaggcctgaagctggagcgggccctgctggtgacagccagccagtgccagcagcctgctgagaacaagctgagtgacctgctggcccccatcagcgagcagatcaaggaggtgatcaccttccgggagaagaacagaggcagcaagctgttcaaccacctgtctgctgtgtctgagagcatccaggccctgggctgggtggccatggcccccaagccaggcccctacgtgaaggagatgaatgatgctgccatgttctacaccaacagagtgctgaaggagtacaaggatgtggacaagaagcacgtggactgggtgaaggcctacctgagcatctggacagagctgcaggcctacatcaaggagttccacaccaccggcctggcctggagcaagacaggccctgtggccaagtag

SEQ ID NO: 7920 - DNA, 3837 bp, synthetic construct
  misc_feature 1..3837: note = source = /note="Description of Artificial Sequence: Synthetic coding sequence"
  source 1..3837: mol_type = other DNA
atgaggctgctgctgctggtgcccctgctgctggccccagcccctggcagcagcgcccccaaggtgcggcggcagagcgacacctggggcccctggagccagtggagcccctgcagcaggacctgtggcggcggcgtgtccttccgggagcggccctgctacagccagaggagagatggcggcagcagctgtgtgggccctgcccggagccacaggagctgcaggacagagagctgcccagatggagcccgggacttccgggcagagcagtgtgccgagtttgatggagctgagttccagggccgccgctaccgctggctgccctactacagcgcccccaacaagtgtgagctgaactgcatccccaagggggagaacttctactacaagcaccgggaggccgtggtggatggcaccccctgtgagcccgggaagagagatgtgtgtgtggatggcagctgccgggtggtgggctgtgaccacgagctggacagcagcaagcaggaggacaagtgcctgcgctgtggaggagatggcaccacctgctaccctgtggccggcacctttgatgccaatgacctgagccggggctacaaccagatcctgattgtgcccatgggcgccaccagcatcctgattgatgaggccgccgccagcaggaacttcctggccgtgaagaatgtgcggggggagtactacctgaatggccactggaccatcgaggccgcccgggccctgcctgctgccagcaccatcctgcactatgaaagaggagctgagggggacctggcccctgagcggctgcacgcccggggccccaccagcgagcccctggtgattgagctgatcagccaggagcccaaccctggggtgcactatgagtaccacctgcccctgcggcggcccagccctggcttctcctggagccacggctcctggagcgactgcagcgcagaatgtggcggcggccaccagagccggctggtgttctgcaccatcgaccacgaggcctacccagaccacatgtgccagaggcagcccaggcctgctgaccggcgcagctgcaacctgcacccctgcccagagaccaagcgctggaaggccggcccctgggccccctgcagcgccagctgtggcggcggcagccagagccgctctgtgtactgcatcagcagtgatggagctggcatccaggaggccgtggaggaggctgaatgtgccggcctgcccgggaagcccccagccatccaggcctgcaacctgcagagatgtgccgcctggagccctgagccctggggcgagtgcagcgtgtcctgtggggtgggcgtgaggaagaggtctgtgacctgccgcggggagcggggcagcctgctgcacacagctgcctgcagcctggaggacaggcctcccctgacagagccctgtgtgcatgaggactgccccctgctgagtgaccaggcctggcacgtgggcacctggggcctgtgcagcaagagctgcagcagcggcacccggcggcggcaggtgatctgtgccatcggcccccccagccactgcggcagcctgcagcacagcaagcctgtggatgtggagccctgcaacacccagccctgccacctgccccaggaggtgcccagcatgcaggatgtgcacaccccagccagcaacccctggatgcccctgggcccccaggagagccctgccagtgacagccggggccagtggtgggccgcccaggagcaccccagcgcccggggggaccacagaggagagcggggggaccccaggggggaccagggcacccacctgagcgccctgggccctgcccccagcctgcagcagcccccctaccagcagcccctgcggagcggcagcggcccccatgactgccgccacagcccccacggctgctgcccagatggccacacagccagcctgggcccccagtggcagggctgccctggggccccctgccagcagagccgctatggctgctgcccagacagagtgtctgtggccgagggcccccaccacgccggctgcaccaagagctatggaggagacagcactggaggcatgcccaggagcagagctgtggccagcacagtgcacaacacccaccagccccaggcccagcagaatgagcccagcgagtgccggggcagccagtttggctgctgctatgacaacgtggccacagctgctggccccctgggggagggctgtgtgggccagcccagccacgcctaccctgtgcgctgcctgctgcccagcgcccacggcagctgtgccgactgggccgcccgctggtactttgtggcctctgtgggccagtgcaaccgcttctggtacggcggctgccacggcaatgccaacaactttgccagcgagcaggagtgcatgagcagctgccagggcagcctgcacggcccccggcggccccagcccggggccagcggccgcagcacccacacagatggcggcggcagcagccctgctggggagcaggagcccagccagcacaggactggagctgctgtgcagaggaagccctggcccagcggcggcctgtggaggcaggaccagcagcccggccctggagaggccccccacacccaggcctttggagagtggccctggggccaggagctgggcagccgggcccctggcctgggcggagatgctggcagccctgccccacccttccacagcagcagctaccgcatcagcctggccggcgtggagcccagcctggtgcaggccgccctgggccagctggtgcggctgagctgcagtgatgacacagcccctgagagccaggccgcctggcagaaggatggccagcccatcagcagtgacagacaccggctgcagtttgatggcagcctcatcatccaccccctgcaggctgaagatgctggcacctacagctgtggcagcaccaggcctggccgggacagccagaagatccagctgcgcatcattggaggagacatggctgtgctgtctgaggccgagctgagccgcttcccccagccccgggaccctgcccaggactttggccaggccggggccgccggccccctgggcgccatccccagcagccacccccagcctgccaaccggctgcggctggaccagaaccagccccgggtggtggatgccagccctggccagaggatccgcatgacctgcagagctgagggcttccccccaccagccatcgagtggcagagagatggccagcctgtgagcagccccaggcaccagctgcagccagatggcagcctggtgatcagccgggtggccgtggaggatggcggcttctacacctgtgtggccttcaacggccaggaccgggaccagcgctgggtgcagctgcgggtgctgggggagctgaccatcagcggcctgcccccaacagtgacagtgcctgagggggacacagcccggctgctgtgtgtggtggccggggagagcgtgaacatccgctggagcagaaatggcctgcctgtgcaggctgatggccaccgggtgcaccagagcccagatggcaccctgctgatctacaacctgcgggccagagatgagggcagctacacctgcagcgcctaccagggcagccaggccgtgagccgcagcacagaggtgaaggtggtgtccccagcccccacagcccagccccgggaccccggccgggactgtgtggaccagcctgagctggccaactgtgacctgatcctgcaggcccagctgtgtggaaatgagtactacagcagcttctgctgtgccagctgcagccgcttccagccccacgcccagcccatctggcagtag

SEQ ID NO: 7921 - DNA, 546 bp, synthetic construct
  misc_feature 1..546: note = source = /note="Description of Artificial Sequence: Synthetic coding sequence"
  source 1..546: mol_type = other DNA
tgaaaaggccacgccagccccctgcccccatctgctgcccccaccacagacagcacagacagcatcaccggccagaacagccggcagcgggaggaggagctggagctgattgaccagctgaggaagcacatcgagtaccgcctgaaggtgtccctgccctgtgacctgggcgccgccctgacagatggagtggtgctgtgccacctggccaaccacgtgcggcccaggtctgtgcccagcatccacgtgcccagccctgctgtgcccaagctgaccatggccaagtgcagaagaaatgtggagaacttcctggaggcctgcaggaagattggagtgccccaggacaacctgtgcagccccagcgacatcctgcagctgaacctgtctgtgaagaggacagtggagaccctgctgagcctgggcgcccacagcgaggagagcagctttgtgtgcctgagcctgcagctgctgggctttgtggccttctactgcaccgtgatgctgaccctgtgtgtgctgtactactggctgtttcctgccaggtag

SEQ ID NO: 7922 - DNA, 804 bp, synthetic construct
  misc_feature 1..804: note = source = /note="Description of Artificial Sequence: Synthetic coding sequence"
  source 1..804: mol_type = other DNA
atgggccctgaggccctgagcagcctgctgctgctgctgctggtggccagcggagatgctgacatgaagggccactttgatcctgccaagtgccgctatgccctgggcatgcaggacaggaccatcccagacagcgacatcagcgccagcagctcctggagcgacagcacagctgcccggcacagccggctggagagcagtgatggagatggagcctggtgcccagctggcagcgtcttccccaaggaggaggagtacctgcaggtggacctgcagaggctgcacctggtggccctggtgggcacccagggcagacatgctgggggcctgggcaaggagttcagccgcagctaccgcctgcgctacagcagagatggaagacgctggatgggctggaaggaccgctggggccaggaggtgatctctggaaatgaagatcctgagggcgtggtgctgaaggacctgggcccccccatggtggcccggctggtgcgcttctaccccagggctgacagagtgatgtctgtgtgcctgcgggtggagctgtatggctgcctgtggagagatggcctgctgagctacacagcccctgtgggccagaccatgtacctgtctgaggccgtgtacctgaatgacagcacctatgatggccacacagtgggcggcctgcagtatggaggcctgggccagctggctgatggagtggtgggcctggatgacttcaggaagagccaggagctgcgggtgtggccaggctatgactatgtgggctggagcaaccacagcttcagcagcggctactag

SEQ ID NO: 7923 - DNA, 345 bp, synthetic construct
  misc_feature 1..345: note = source = /note="Description of Artificial Sequence: Synthetic coding sequence"
  source 1..345: mol_type = other DNA
atggcccccaagaagctgagctgcctgcggagcctgctgctgcccctgagcctgaccctgctgctgccccaggccgacaccaggagctttgtggtggaccggggccatgaccgcttcctgctggatggagcccccttccgctacgtgtctggcagcctgcactacttccgggtgccccgggtgctgtgggccgaccggctgctgaagatgcgctggagcggcctgaatgccatccagttctacgtgccctggaactaccacgagccccagcccggggtgtacaacttcaacggcagccgggacctgattgccttcctgaatgaagctgccctggccaacctgtag

SEQ ID NO: 7924 - DNA, 507 bp, synthetic construct
  misc_feature 1..507: note = source = /note="Description of Artificial Sequence: Synthetic coding sequence"
  source 1..507: mol_type = other DNA
gcccccaggatggagatgttccagggcctgctgctgctgctgctgctgtccatgggcggcacctgggccagcaaggagcccctgcggccccgctgccggcccatcaatgccaccctggccgtggagaaggagggctgccctgtgtgcatcaccgtgaacaccaccatctgtgccggctactgccccaccatgaccagggtgctgcagggcgtgctgcctgccctgccccaggtggtgtgcaactacagagatgtgcgctttgagagcatccggctgcccggctgcccccggggcgtgaaccctgtggtgtcctatgctgtggccctgagctgccagtgtgccctgtgcagaagaagcaccacagactgtggcggccccaaggaccaccccctgacctgtgatgacccccgcttccaggacagcagcagcagcaaggcccccccacccagcctgcccagccccagccggctgcccggccccagcgacacccccatcctgccccagtag

SEQ ID NO: 7925 - DNA, 1203 bp, synthetic construct
  misc_feature 1..1203: note = source = /note="Description of Artificial Sequence: Synthetic coding sequence"
  source 1..1203: mol_type = other DNA
atggagacccaggagctgcggggggccctggccctgctgctgctgtgcttcttcaccagcgccagccaggacctgcaggtgattgacctgctgactgtgggggagagccggcagatggtggccgtggccgagaagatcagaacagccctgctgacagctggggacatctacctgctgagcaccttccggctgccccccaagcagggcggcgtgctgtttggcctgtacagccggcaggacaacacccgctggctggaggcctctgtggtgggcaagatcaacaaggtgaccaatgccctgcacagcatcctgggggagggcaatgtgcctgaccccaagcaccactacggcgtgtctggcttccacgagcagaggagccactgcagccccaacccctgcttccggggcgtggactgcatggaggtgtatgagtacccaggctaccgctgtggcccctgccccccaggcctgcagggcaatggcacccactgcagcgacatcaatgaatgtgcccatgctgacccctgcttccctggcagcagctgcatcaacaccatgcctggcttccactgtgaggcctgcccccggggctacaagggcacccaggtgtctggagtgggcatcgactatgcccgggccagcaagcaggtgtgcaatgacattgatgaatgtaatgatggcaacaatggaggctgtgaccccaacagcatctgcaccaacacagtgggcagcttcaagtgtggcccctgccgcctgggcttcctgggcaaccagagccagggctgcctgcctgcccggacctgccacagccctgcccacagcccctgccacatccacgcccactgcctgtttgaaagaaatggagctgtgtcctgccagtgcaatgtgggctgggccggaaatggaaatgtgtgtggcacagacacagacattgatggctacccagaccaggccctgccctgcatggacaacaacaagcactgcaagcaggacaactgcctgctgacccccaacagcggccaggaggatgctgacaatgatggagtgggggaccagtgtgatgatgatgctgatggagatggcatcaagaatgtggaggccagccccatggactggaccatcgccctgaagagccccacccactaccggcagacaggcatgaggacaggctgggagatgctggccacagctgccctgaagtag

SEQ ID NO: 7926 - DNA, 618 bp, synthetic construct; identical to SEQ ID NO: 7228
  misc_feature 1..618: note = source = /note="Description of Artificial Sequence: Synthetic coding sequence"
  source 1..618: mol_type = other DNA

SEQ ID NO: 7927 - DNA, 177 bp, synthetic construct
  misc_feature 1..177: note = source = /note="Description of Artificial Sequence: Synthetic coding sequence"
  source 1..177: mol_type = other DNA
atggacctgctgcagttcctggccttcctgtttgtgctgctgctgagcggcatgggcgccaccggcaccctgcggaccagcctggaccccagcctggagatctacaagaagatgtttgaggtgaagagaagagagcagctgctggccctgaagaacctggcccagctgaatgactag

SEQ ID NO: 7928 - DNA, 450 bp, synthetic construct
  misc_feature 1..450: note = source = /note="Description of Artificial Sequence: Synthetic coding sequence"
  source 1..450: mol_type = other DNA
atgaaggtgattgccatcctgaccctgctgctcttctgcagccccacccacagcagcttctggcagttccagaggagagtgaagcacatcaccggccgcagcgccttcttctcctactacggctacggctgctactgcggcctgggggacaagggcatccctgtggatgacacagacagacacagccccagcagccccagcccctatgagaagctgaaggagttcagctgccagcctgtgctgaacagctaccagttccacatcgtgaatggagctgtggtgtgtggctgcaccctgggccctggggccagctgccactgccgcctgaaggcctgtgaatgtgacaagcagagcgtgcactgcttcaaggagagcctgcccacctatgagaagaacttcaagcagttcagcagccagccccgctgtggccgccacaagccctggtgctag

SEQ ID NO: 7929 - DNA, 237 bp, synthetic construct; identical to SEQ ID NO: 7333
  misc_feature 1..237: note = source = /note="Description of Artificial Sequence: Synthetic coding sequence"
  source 1..237: mol_type = other DNA

SEQ ID NO: 7930 - DNA, 1461 bp, synthetic construct
  misc_feature 1..1461: note = source = /note="Description of Artificial Sequence: Synthetic coding sequence"
  source 1..1461: mol_type = other DNA
atgatcagccccagccccagccaggaggagctgcagaccaccctggaggagacagaccagagcacccaggagcccttcaccaccaagatccccaggaccacagagctggccaagaccacccaggccccccaccgcttctacaccaccgtgcggcccaggaccagtgacaagccccacatccggcctgtgctgaacagaaccaccacccggcccacccggcccaagcccagcggcatgcccagcggaaatggagtgggcactggagtgaagcaggccccccggcccagcggggctgacagaaatgtgtctgtggacagcacccaccccaccaagaagccaggcacccggcggccccccctgcccccccggcccacccaccccaggaggaagcccctgccccccaacaacgtgacaggcaagccaggcagcgctggcatcatcagcagcggccccatcaccaccccacccctgcggagcaccccccggcccaccggcacccccctggagagaattgaaacagacatcaagcagcccaccgtgcctgccagcggggaggagctggagaacatcacagacttcagcagcagccccacccgggagacagaccccctgggcaagccccgcttcaagggcccccacgtgcgctacatccagaagccagacaacagcccctgcagcatcacagacagcgtgaagcgcttccccaaggaggaggccacagagggcaatgccaccagccccccccagaacccccccaccaacctgactgtggtgacagtggagggctgccccagctttgtgatcctggactgggagaagcccctgaatgacacagtgacagaatatgaggtgatcagccgggagaatggcagcttcagcggcaagaacaagagcatccagatgaccaaccagaccttcagcacagtggagaacctgaagcccaacaccagctatgagttccaggtgaagcccaagaaccccctgggggagggccctgtgagcaacacagtggccttcagcacagaatctgctgacccccgggtgtctgagcctgtgtctgctggaagagatgccatctggacagagcggcccttcaacagcgacagctacagcgagtgcaagggcaagcagtatgtgaagaggacctggtacaagaagtttgtgggcgtgcagctgtgcaacagcctgcgctacaagatctacctgagtgacagcctgaccgggaagttctacaacattggagaccagaggggccatggagaggaccactgccagtttgtggacagcttcctggatggccgcacaggccagcagctgaccagtgaccagctgcccatcaaggagggctacttccgggctgtgcggcaggagcctgtgcagtttggagagatcggcggccacacccagatcaactacgtgcagtggtatgaatgtggcaccaccatccctgggaagtggtag

SEQ ID NO: 7931 - DNA, 243 bp, synthetic construct
  misc_feature 1..243: note = source = /note="Description of Artificial Sequence: Synthetic coding sequence"
  source 1..243: mol_type = other DNA
tgaaatggacctgtgctgtggttcaagggcaccggccccaacaggaagctgatctacaacttcaagcaggagcagaaccccaggcctcccaagaacagacctgctggccgggccggcagccgggcccaccatgatgcccacacctgcctgagcgccctgcctgagaggaacagcaccaactactttgtgcagccctgctgctgcctgcggctgctgggcctgaccggcctgctgagcaagtag

SEQ ID NO: 7932 - DNA, 1341 bp, synthetic construct
  misc_feature 1..1341: note = source = /note="Description of Artificial Sequence: Synthetic coding sequence"
  source 1..1341: mol_type = other DNA
atgctgcaccctgagaccagccctggccggggccacctgctggccgtgctgctggccctgctgggcaccacctgggccgaggtgtggccaccccagctgcaggagcaggcccccatggccggggccctgaacaggaaggagagcttcctgctgctgagcctgcacaaccggctgcgctcctgggtgcagcccccagctgctgacatgaggcggctggactggagcgacagcctggcccagctggcccaggcccgggccgccctgtgtggcatccccacccccagcctggccagcggcctgtggaggaccctgcaggtgggctggaacatgcagctgctgcctgctggcctggccagctttgtggaggtggtgtccctgtggtttgctgagggccagcgctacagccatgctgctggggagtgtgccagaaatgccacctgcacccactacacccagctggtgtgggccaccagcagccagctgggctgcggccgccacctgtgcagcgctggccagacagccatcgaggcctttgtgtgtgcctacagcccccggggcaactgggaggtgaatggcaagaccatcatcccctacaagaagggggcctggtgcagcctgtgcacagcctctgtgtctggctgcttcaaggcctgggaccatgctgggggcctgtgtgaggtgcccaggaacccctgcaggatgagctgccagaaccacggccgcctgaacatcagcacctgccactgccactgccccccaggctacacaggccgctactgccaggtgcgctgcagcctgcagtgtgtgcacggccgcttccgggaggaggagtgcagctgtgtgtgtgacatcggctacggcggggcccagtgtgccaccaaggtgcacttccccttccacacctgtgacctgagaattgatggagactgcttcatggtgtcctctgaggccgacacctactaccgggccaggatgaagtgccagaggaagggcggcgtgctggcccagatcaagagccagaaggtgcaggacatcctggccttctacctgggccgcctggagaccaccaatgaagtcatcgacagcgactttgagaccaggaacttctggattggcctgacctacaagacagccaaggacagcttccgctgggccaccggggagcaccaggccttcaccagctttgccttcggccagcctgacaaccacggctttggaaactgtgtggagctgcaggccagcgctgccttcaactggaatgaccagcgctgcaagaccaggaaccgctacatctgccagtttgcccaggagcacatcagccgctggggccctggcagctag

SEQ ID NO: 7933 - DNA, 432 bp, synthetic construct
  misc_feature 1..432: note = source = /note="Description of Artificial Sequence: Synthetic coding sequence"
  source 1..432: mol_type = other DNA
atgcaggccgcctgctggtacgtgctcttcctgctgcagcccaccgtgtacctggtgacctgtgccaacctgaccaacggcggcaagtctgagctgctgaagagcggcagcagcaagagcaccctgaagcacatctggacagagagcagcaaggacctgagcatcagccggctgctgagccagaccttccggggcaaggaaaatgacacagacctggacctgcgctatgacaccccagagccctacagcgagcaggacctgtgggactggctgaggaacagcacagacctgcaggagccccggccccgggccaagaggcggcccatcgtgaagacaggcaagttcaagaagatgtttggctggggagacttccacagcaacatcaagacagtgaagctgaacctgctgatcaccgggaagatcgtggactag

SEQ ID NO: 7934 - DNA, 783 bp, synthetic construct
  misc_feature 1..783: note = source = /note="Description of Artificial Sequence: Synthetic coding sequence"
  source 1..783: mol_type = other DNA
atgcagggcgagccctttgcctgcctgacccaccaggagcccctgcccaagatgttcaagctgctgagccgggcctatgcagatgtgcaccccatgatgatggacagaagtgagaacagatgtggcggcaacttcctgaagaggggcagcatcatcaatggagctgactggtacagcttcaccggcggcatgtctgacttcaactacctgcacaccaactgctttgagatcaccgtggagctgggctgtgtgaagtttcctcctgaggaggccctgtacatcctgtggcagcacaacaaggagagcctgctgaactttgtggagaccgtgcaccggggcatcaagggcgtggtgacagacaagtttgggaagcctgtgaagaatgcccgcatctctgtgaagggcatcagacatgacatcaccacagccccagatggagactactggaggctgctgcccccaggcatccacatcgtcatcgcccaggcccctggctacgccaaggtgatcaagaaggtgatcatcccagccaggatgaagagagctggccgggtggacttcatcctgcagcccctgggcatgggccccaagaacttcatccacggcctgcggaggacaggcccccatgaccccctgggcggggccagcagcctgggggaggccacagagccagaccccctgcgggcccggcggcagcccagcgcagatggcagcaagccctggtggtggagctacttcaccagcctgagcacccaccggccccgctggctgctgaagtactag

SEQ ID NO: 7935 - DNA, 882 bp, synthetic construct
  misc_feature 1..882: note = source = /note="Description of Artificial Sequence: Synthetic coding sequence"
  source 1..882: mol_type = other DNA
atgagcagcggcggcggcagccggggcctgctggcctggctgctgctgctgcagccctggccaggccagaactgggccggcatggccgccccccggctgcccagccccctgctgtctgaggagggcggggagaaccctgaggccagccctgcccctggccctgaggccggcccccccctgaacctcttcaccagcttccctggggacagcctgctgtgtggccgcacccccctgcgcatcgtgggcggcgtggatgctgaggagggccgctggccctggcaggtgtctgtgaggaccaagggccgccacatctgtggcggcaccctggtgacagccacctgggtgctgacagctggccactgcatcagcagccgcttccactacagcgtgaagatgggagacagatctgtgtacaatgaaaacacctctgtggtggtgtctgtgcagagggcctttgtgcaccccaagttcagcacagtgaccaccatcagaaatgacctggccctgctgcagctgcagcaccctgtgaacttcaccagcaacatccagcccatctgcatcccccaggagaacttccaggtggagggccgcacccgctgctgggtgacaggctggggcaagaccccagagcgggagaagctggccagcgagatcctgcaggatgtggaccagtacatcatgtgctatgaggagtgcaacaagatcatccagaaggccctgagcagcaccaaggatgtgatcatcaagggcatggtgtgtggctacaaggagcagggcaaggacagctgccagggcgacagcggcggccgcctggcctgtgagtacaatgacacctgggtgcaggtgggcatcgtgtcctggggcatcggctgcggccgctag

SEQ ID NO: 7936 - DNA, 870 bp, synthetic construct
  misc_feature 1..870: note = source = /note="Description of Artificial Sequence: Synthetic coding sequence"
  source 1..870: mol_type = other DNA
atgtttgtgctgctgtatgtgaccagctttgccatctgtgccagcggccagccccggggcaaccagctgaagggggagaactacagcccccgctacatctgcagcatccctggcctgcccggccccccaggccccccaggggccaacggcagccctggcccccacggccgcatcggcctgcccggcagagatggaagagatggcaggaagggggagaagggggagaagggcacagctggcctgcggggcaagacaggccccctgggcctggccggggagaagggggaccagggcgagaccgggaagaagggccccatcggccctgagggggagaagggggaggtgggccccatcggccccccaggccccaagggggacagaggagagcagggcgaccccggcctgcccggggtgtgccgctgtggcagcatcgtgctgaagagcgccttctctgtgggcatcaccaccagctacccagaggagcggctgcccatcatcttcaacaaggtgctcttcaatgaaggagagcactacaacccagccaccgggaagttcatctgtgccttccctggcatctactacttctcctatgacatcaccctggccaacaagcacctggccatcggcctggtgcacaacggccagtaccgcatcaagacctttgatgccaacacaggcaaccatgatgtggccagcggcagcaccgtcatctacctgcagccagaagatgaggtgtggctggagatcttcttcacagaccagaatggcctcttcagtgaccccggctgggccgacagcctcttcagcggcttcctgctgtatgtggacacagactacctggacagcatcagtgaagatgatgagctgtag

SEQ ID NO: 7937 - DNA, 2742 bp, synthetic construct; identical to SEQ ID NO: 7141
  misc_feature 1..2742: note = source = /note="Description of Artificial Sequence: Synthetic coding sequence"
  source 1..2742: mol_type = other DNA

SEQ ID NO: 7938 - DNA, 1089 bp, synthetic construct
  misc_feature 1..1089: note = source = /note="Description of Artificial Sequence: Synthetic coding sequence"
  source 1..1089: mol_type = other DNA
atgaggaccctcttcaacctgctgtggctggccctggcctgcagccctgtgcacaccaccctgagcaagagtgatgccaagaaggccgccagcaagaccctgctggagaagagccagttcagtgacaagcctgtgcaggaccggggcctggtggtgacagacctgaaggccgagagcgtggtgctggagcacaggagctactgcagcgccaaggcccgggacagacactttgctggagatgtgctgggctacgtgaccccctggaacagccacggctatgatgtgaccaaggtgtttggcagcaagttcacccagatcagccctgtgtggctgcagctgaagagaagaggccgggagatgtttgaggtgacaggcctgcatgatgtggaccagggctggatgagagctgtgaggaagcacgccaagggcctgcacatcgtgccccggctgctgtttgaggactggacctatgatgacttcagaaatgtgctggacagtgaagatgaaattgaggagctgagcaagacagtggtgcaggtggccaagaaccagcactttgatggctttgtggtggaggtgtggaaccagctgctgagccagaagagggtgacagaccagctgggcatgttcacccacaaggagtttgagcagctggcccctgtgctggatggcttcagcctgatgacctatgactacagcacagcccaccagcccggccccaatgcccccctgtcctgggtgcgggcctgtgtgcaggtgctggaccccaagagcaagtggaggagcaagatcctgctgggcctgaacttctacggcatggactatgccaccagcaaggatgcccgggagcctgtggtgggcgcccgctacatccagaccctgaaggaccaccggcccaggatggtgtgggacagccaggccagcgagcacttctttgagtacaagaagagccgcagcggccgccacgtggtgttctaccccaccctgaagagcctgcaggtgcggctggagctggcccgggagctgggcgtgggcgtgtccatctgggagctgggccagggcctggactacttctatgacctgctgtag

SEQ ID NO: 7939 - DNA, 1350 bp, synthetic construct
  misc_feature 1..1350: note = source = /note="Description of Artificial Sequence: Synthetic coding sequence"
  source 1..1350: mol_type = other DNA
atgaagttccagggccccctggcctgcctgctgctggccctgtgcctgggcagcggggaggccggccccctgcagagcggggaggagagcacaggcaccaacattggagaggccctgggccacggcctgggagatgccctgtctgagggcgtgggcaaggccatcggcaaggaggccggcggcgctgctggcagcaaggtgtctgaggccctgggccagggcacccgggaggccgtgggcactggagtgcggcaggtgcccggctttggagtggctgatgccctgggcaacagagtgggggaggccgcccacgccctgggcaacacaggccatgaaattggccggcaggccgaggatgtgatcagacatggagcagatgctgtgcggggctcctggcagggcgtgcccggccacaatggagcctgggagaccagcggcggccacggcatcttcggcagccagggcggcctgggcggccagggccagggcaaccctgggggcctgggcaccccctgggtgcacggctacccaggcaacagcgctggcagctttggcatgaacccccagggcgccccctggggccagggcggcaatggaggcccccccaactttggcaccaacacccagggcgctgtggcccagcccggctacggctctgtgcgggccagcaaccagaatgaaggctgcaccaaccccccaccttctggcagcggcggcggcagcagcaacagcggcggcagcagcacaggcagcagcagcggcaaccacggcggcagcggcggcggcaatggccacaagccaggctgtgagaagccaggaaatgaggcccggggcagcggggagagcggcatccagggccagggcagctcctggggcagcggcggcggagatgctgtgggcggcgtgaacacagtgaacagcgagaccagccctggcatgttcaactttgacaccttctggaagaacttcaagagcaagctgggcttcatcaactgggatgccatcaacaagaaccaggtgcccccacccagcacccgggccctgctgtacttcagccggctgtgggaggacttcaagcagaacacccccttcctgaactggaaggccatcattgaaggagcagatgccagcagcctgcagaagagagctggaagagatgaccagcctggagctggctggcaggaggtggccgctgtgaccagcaagaactacaactacaaccagcacgcctaccccacagcctatggaggcaagtacagcgtgaagaccccagccaagggcggcgtgagccccagcagcagcgccagccgggtgcagcccggcctgctgcagtgggtgaagttctggtag

SEQ ID NO: 7940 - DNA, 735 bp, synthetic construct
  misc_feature 1..735: note = source = /note="Description of Artificial Sequence: Synthetic coding sequence"
  source 1..735: mol_type = other DNA
atgtggggcgcccccctgccccggcggcctgtgtgggatgtgcgcagcgccagcgctggcccccagccctgcctgggcggcaagatgaagctgaacctggtgcagatcttcttcatgctgctgatgctgctgctgggcctgggcatgggcctgggcctgggcctgcacatggccacagctgtgctggaggagagtgaccagcccctgaatgagttctggagcagtgacagccaggacaaggccgaggccacagaggagggagatggcacccagaccacagagaccctggtgctgagcaacaaggaggtggtgcagcccggctggccagaggaccccatcctgggggaggatgaggtgggcggcaacaagatgctgcgggccagcgccctcttccagagcaacaaggactacctgcggctggaccagacagaccgggagtgcaatgacatgatggcccacaagatgaaggagcccagccagagctgcatcgcccagtatgccttcatccacgaggacctgaacacagtgaaggctgtgtgcaacagccctgtgattgcctgtgagctgaagggcggcaagtgccacaagagcagccggccctttgacctgaccctgtgtgagctgagccagcctgaccaggtgacccccaactgcaactacctgaccagcgtcatcaagaagcacatcatcatcacctgcaatgacatgaagaggcagctgcccaccggccagtag

SEQ ID NO: 7941 - DNA, 1728 bp, synthetic construct; identical to SEQ ID NO: 6963
  misc_feature 1..1728: note = source = /note="Description of Artificial Sequence: Synthetic coding sequence"
  source 1..1728: mol_type = other DNA

SEQ ID NO: 7942 - DNA, 390 bp, synthetic construct; identical to SEQ ID NO: 7503
  misc_feature 1..390: note = source = /note="Description of Artificial Sequence: Synthetic coding sequence"
  source 1..390: mol_type = other DNA

SEQ ID NO: 7943 - DNA, 567 bp, synthetic construct; identical to SEQ ID NO: 7502
  misc_feature 1..567: note = source = /note="Description of Artificial Sequence: Synthetic coding sequence"
  source 1..567: mol_type = other DNA

SEQ ID NO: 7944 - DNA, 2676 bp, synthetic construct; identical to SEQ ID NO: 7495
  misc_feature 1..2676: note = source = /note="Description of Artificial Sequence: Synthetic coding sequence"
  source 1..2676: mol_type = other DNA

SEQ ID NO: 7945 - DNA, 2742 bp, synthetic construct; identical to SEQ ID NO: 7141
  misc_feature 1..2742: note = source = /note="Description of Artificial Sequence: Synthetic coding sequence"
  source 1..2742: mol_type = other DNA

SEQ ID NO: 7946 - DNA, 453 bp, synthetic construct; identical to SEQ ID NO: 7139
  misc_feature 1..453: note = source = /note="Description of Artificial Sequence: Synthetic coding sequence"
  source 1..453: mol_type = other DNA

SEQ ID NO: 7947 - DNA, 192 bp, synthetic construct
  misc_feature 1..192: note = source = /note="Description of Artificial Sequence: Synthetic coding sequence"
  source 1..192: mol_type = other DNA
atgggccctgaggccctgagcagcctgctgctgctgctgctggtggccagcggagatgctgacatgaagggccactttgatcctgccaagtgccgctatgccctgggcatgcaggacaggaccatcccagacagcgacatcagcgccagcagctcctggagcgacagcacagctgcccggcacagcaggtag

SEQ ID NO: 7948 - DNA, 1212 bp, synthetic construct
  misc_feature 1..1212: note = source = /note="Description of Artificial Sequence: Synthetic coding sequence"
  source 1..1212: mol_type = other DNA
atgcagggcaccccaggcggcggcaccaggcctggccccagccctgtggacaggaggaccctgctggtgttctccttcatcctggccgccgccctgggccagatgaacttcaccggggaccaggtgctgcgggtgctggccaaggatgagaagcagctgagcctgctgggggacctggagggcctgaagccccagaaggtggacttctggaggggccctgcccggcccagcctgcctgtggacatgagggtgcccttcagcgagctgaaggacatcaaggcctacctggagagccacggcctggcctacagcatcatgatcaaggacatccaggtgctgctggatgaggagcggcaggccatggccaagagccggcggctggagaggagcaccaacagcttctcctacagcagctaccacaccctggaggagatctacagctggattgacaactttgtgatggagcacagcgacatcgtgtccaagatccagatcggcaacagctttgagaaccagagcatcctggtgctgaagttcagcactggaggcagccgccacccagccatctggattgacaccggcatccacagccgggagtggatcacccacgccaccggcatctggacagccaacaagatcgtgtctgactatggcaaggacagagtgctgacagacatcctgaatgccatggacatcttcatcgagctggtgaccaacccagatggctttgccttcacccacagcatgaaccggctgtggaggaagaacaagagcatccggcccggcatcttctgcatcggcgtggacctgaacagaaactggaagagcggctttggaggaaatggcagcaacagcaacccctgcagcgagacctaccacggccccagcccccagagcgagcctgaggtggccgccatcgtgaacttcatcacagcccacggcaacttcaaggccctgatcagcatccacagctacagccagatgctgatgtacccctacggccgcctgctggagcctgtgagcaaccagcgggagctgatgtggcctgtgggcagccccagcacaggccccatgacagtggccagcagcacccccagcgccctgagcagcggcaccctgggctccatggccagctgctgccggccccacaggagcagcccccggcccaggagaagaggctggaggtttggccccagctggagcaccccctag

SEQ ID NO: 7949 - DNA, 1542 bp, synthetic construct
  misc_feature 1..1542: note = source = /note="Description of Artificial Sequence: Synthetic coding sequence"
  source 1..1542: mol_type = other DNA
atggccccagcccggaccatggcccgggcccggctggccccagctggcatcccagctgtggccctgtggctgctgtgcaccctgggcctgcagggcacccaggccggccccccaccagcccctcctggcctgcctgctggagctgactgcctgaacagcttcaccgctggggtgcccggctttgtgctggacaccaatgcctctgtgtccaatggagccaccttcctggagagccccaccgtgcggcggggctgggactgtgtgcgggcctgctgcaccacccagaactgcaacctggccctggtggagctgcagcctgacagaggagaagatgccatcgccgcctgcttcctgatcaactgcctgtatgagcagaactttgtgtgcaagtttgccccccgggagggcttcatcaactacctgacccgggaggtgtaccgcagctaccggcagctgcggacccagggctttggaggcagcggcatccccaaggcctgggccggcatcgacctgaaggtgcagccccaggagcccctggtgctgaaggatgtggagaacacagactggaggctgctgcggggggacacagatgtgcgggtggagaggaaggaccccaaccaggtggagctgtggggcctgaaggagggcacctacctgttccagctgactgtgaccagcagtgaccaccctgaggacacagccaacgtgacagtgacagtgctgagcaccaagcagacagaggactactgcctggccagcaacaaggtgggccgctgccggggcagcttcccccgctggtactatgaccccacagagcagatctgcaagagctttgtgtatggaggctgcctgggcaacaagaacaactacctgcgggaggaggagtgcatcctggcctgccggggcgtgcagggccccagcatggagcggcggcaccctgtgtgcagcggcacctgccagcccacccagttccgctgcagcaatggctgctgcatcgacagcttcctggagtgtgatgacacccccaactgcccagatgccagtgatgaagctgcctgtgagaagtacaccagcggctttgatgagctgcagaggatccacttccccagcgacaagggccactgtgtggacctgcctgacaccggcctgtgcaaggagagcatcccccgctggtactacaaccccttcagcgagcactgtgcccgcttcacctatggaggctgctacggcaacaagaacaactttgaggaggagcagcagtgcctggagagctgccggggcatcagcaagaaggatgtgtttggcctgcggcgggagatccccatccccagcactggatctgtggagatggctgtggccgtgttcctggtgatctgcatcgtggtggtggtggccatcctgggctactgcttcttcaagaaccagaggaaggacttccacggccaccaccaccaccccccacccaccccagccagcagcacagtgtccaccacagaggacacagagcacctggtgtacaaccacaccacccggcccctgtag

SEQ ID NO: 7950 - DNA, 798 bp, synthetic construct
  misc_feature 1..798: note = source = /note="Description of Artificial Sequence: Synthetic coding sequence"
  source 1..798: mol_type = other DNA
atggccccctggagccaccccagcgcccagctgcagcctgtgggcggagatgctgtgtccccagccctgatggtgctgctgtgcctgggcctgagcctgggccccaggacccacgtgcaggccggcaacctgagcaaggccaccctgtgggccgagcccggcagcgtcatcagccggggcaacagcgtgaccatccgctgccagggcaccctggaggcccaggagtaccgcctggtgaaggagggcagccctgagccctgggacacccagaaccccctggagcccaagaacaaggcccgcttcagcatccccagcatgacagagcaccacgccggccgctaccgctgctactactacagccctgctggctggagcgagcccagcgaccccctggagctggtggtgacaggcttctacaacaagcccaccctgagcgccctgcccagccctgtggtgaccagcggggagaatgtgaccctgcagtgtggcagccggctgcgctttgaccgcttcatcctgacagaggagggggaccacaagctgtcctggaccctggacagccagctgacccccagcggccagttccaggccctcttccctgtgggccctgtgacccccagccaccgctggatgctgcgctgctacggcagccgccgccacatcctgcaggtgtggagcgagcccagcgacctgctggagatccctgtgtctggagaggaggccaccgtcttcagcagcaccatccagggcagccagacaggctgtggggagctgtaccggcagggcagcccctgctag

SEQ ID NO: 7951 - DNA, 795 bp, synthetic construct
  misc_feature 1..795: note = source = /note="Description of Artificial Sequence: Synthetic coding sequence"
  source 1..795: mol_type = other DNA
atggagaagcccatcctgaagaacctgaatgagatgctgtgccccatcatcgccagcgaggtgaaggccctgaatgccaacctgagcaccctggaggtgctgaccaagattgacaactacaccctgctggactacagcctcatcagcagccctgagatcacagagaactacctggacctgaacctgaagggcgtcttctaccccctggagaacctgacagatcctcccttcagccctgtgccctttgtgctgcctgagaggagcaacagcatgctgtacatcggcattgctgagtacttcttcaagagcgccagctttgcccacttcaccgctggggtcttcaacgtgaccctgagcacagaggagatcagcaaccactttgtgcagaacagccagggcctgggcaatgtgctgagccgggtggccagcacctctgtgggcctggtgatcctgggccagaggctggtgtgcagcctgagcctgaaccgcttccggctggccctgcctgagagcaacagaagcaacatcgaggtgctgcgctttgagaacatcctgagcagcatcctgcactttggagtgctgcccctggccaatgccaagctgcagcagggcttccccctgagcaacccccacaagttcctgtttgtgaacagcgacatcgaggtgctggagggcttcctgctgatcagcacagacctgaagtatgagaccagcagcaagcagcagcccagcttccacgtgtgggagggcctgaacctgatcagccggcagtggaggggcaagagcgccccctag

SEQ ID NO: 7952 - DNA, 117 bp, synthetic construct
  misc_feature 1..117: note = source = /note="Description of Artificial Sequence: Synthetic coding sequence"
  source 1..117: mol_type = other DNA
atgaacaagatcctgagcagcacagtgtgcttcggcctgctgaccctgctgtctgtgctgtccttcctgcagagcgtgcacggccggccctacctgacccagggcaatgagatctag

SEQ ID NO: 7953 - DNA, 567 bp, synthetic construct; identical to SEQ ID NO: 7502
  misc_feature 1..567: note = source = /note="Description of Artificial Sequence: Synthetic coding sequence"
  source 1..567: mol_type = other DNA

SEQ ID NO: 7954 - DNA, 600 bp, synthetic construct; identical to SEQ ID NO: 7206
  misc_feature 1..600: note = source = /note="Description of Artificial Sequence: Synthetic coding sequence"
  source 1..600: mol_type = other DNA

SEQ ID NO: 7955 - DNA, 30 bp, synthetic construct; identical to SEQ ID NO: 4613
  misc_feature 1..30: note = source = /note="Description of Artificial Sequence: Synthetic coding sequence"
  source 1..30: mol_type = other DNA

SEQ ID NO: 7956 - DNA, 831 bp, synthetic construct
  misc_feature 1..831: note = source = /note="Description of Artificial Sequence: Synthetic coding sequence"
  source 1..831: mol_type = other DNA
atggcccccagccccctgcagaggctgcactgcggccccagccccagcccccggcccacagaggtgccccggggcaccgtgtctgtgtcctgccgctacctgaagaacagcctgcacgtgtttgtgtctggaggagccatcggcaccagcagccctgccctgctggagtgccaggagggcgtgggccctgcccggcccagcctgctggtgcccccaccaccccggccccggcggctggacctggcccggaccctgcctgctgagaggacagacagccagagcctgtacatcgtgtacatcgccctgcccggccgcacccccaggcctgccctggcctttgccttcctgatgcctgcctgctgcaaccggcccagcccccggcccagccctgcccacctgacagccagctctgtgctgcggcggcagagacatgtgctggccgccagcgctgccagcccctgccagtggagcggcctgcgggtggcccacagcctgcggcaggtggtgtccctgtgcccccgctgcaccggcagctgccccttcagcggggcctgtgccagcagcctgcccagccccctgagctgcccccacagccacagcggctcctggggcacctggagccagggccggccctgcagcagcacagaggtggccggcctggccctgtggcccacagacttcctgagctgcctgctggatgccagcgagctgcagacccagggcagccacggcttctccttcacccccaccggcttcagcagcaacaggaaggtgggcgtgggcagctgcagagatggagctggccgcggggccatgggcggcctcttctag

SEQ ID NO: 7957 - DNA, 678 bp, synthetic construct; identical to SEQ ID NO: 7810
  misc_feature 1..678: note = source = /note="Description of Artificial Sequence: Synthetic coding sequence"
  source 1..678: mol_type = other DNA

SEQ ID NO: 7958 - DNA, 534 bp, synthetic construct
  misc_feature 1..534: note = source = /note="Description of Artificial Sequence: Synthetic coding sequence"
  source 1..534: mol_type = other DNA
atggtgcctgctgctggggccctgctgtgggtgctgctgctgaacctgggccccagggctgctggggcccagggcctgacccagacccccacagagatgcagagggtgtccctgcgctttggaggccccatgaccaggagctaccgcagcacagccaggacaggcctgcccaggaagacccgcatcatcctggaggatgaaaatgatgccatggctgatgctgaccggctggccggccctgctgctgctgagctgctggccgccaccgtgtccacaggcttcagccgcagcagcgccatcaatgaagaagatggcagcagcgaggagggcgtggtgatcaatgccggcaaggacagcaccagccgggagctgcccagcgccacccccaacacagctggcagcagcagcacccgcttcatcgccaacagccaggagcctgagatccggctgaccagcagcctgcccaggagccctggccgcagcacagaggacctgcccccctgccacctgctgcgcatctgtggctggtgctag

SEQ ID NO: 7959 - DNA, 912 bp, synthetic construct
  misc_feature 1..912: note = source = /note="Description of Artificial Sequence: Synthetic coding sequence"
  source 1..912: mol_type = other DNA
atgctgcaccctgagaccagccctggccggggccacctgctggccgtgctgctggccctgctgggcacagcctgggccgaggtgtggccaccccagctgcaggagcaggcccccatggccggggccctgaacaggaaggagagcttcctgctgctgagcctgcacaaccggctgcgctcctgggtgcagcccccagctgctgacatgaggcggctggactggagcgacagcctggcccagctggcccaggcccgggccgccctgtgtggcatccccacccccagcctggccagcggcctgtggaggaccctgcaggtgggctggaacatgcagctgctgcctgctggcctggccagctttgtggaggtggtgtccctgtggtttgctgagggccagcgctacagccatgctgctggggagtgtgccagaaatgccacctgcacccactacacccagctggtgtgggccaccagcagccagctgggctgcggccgccacctgtgcagcgctggccaggccgccatcgaggcctttgtgtgtgcctacagcccccggggcaactgggaggtgaatggcaagaccatcgtgccctacaagaagggggcctggtgcagcctgtgcacagcctctgtgtctggctgcttcaaggcctgggaccatgctgggggcctgtgtgaggtgcccaggaacccctgcaggatgagctgccagaaccacggccgcctgaacatcagcacctgccactgccactgccccccaggctacacaggccgctactgccaggtgcgctgcagcctgcagtgtgtgcacggccgcttccgggaggaggagtgcagctgtgtgtgtgacatcggctacggggagcccagcgtgcccccacgctgcatcttccccagcacccctgtgacctag

SEQ ID NO: 7960 - DNA, 1482 bp, synthetic construct; identical to SEQ ID NO: 7826
  misc_feature 1..1482: note = source = /note="Description of Artificial Sequence: Synthetic coding sequence"
  source 1..1482: mol_type = other DNA

SEQ ID NO: 7961 - DNA, 807 bp, synthetic construct
  misc_feature 1..807: note = source = /note="Description of Artificial Sequence: Synthetic coding sequence"
  source 1..807: mol_type = other DNA
atgaagcagatcctgcacccagccctggagaccacagacccctgcagcactggatttgtgtttcctgccatgaccctcttccctgtgctgctcttcctggtggccggcctgctgcccagcttccctgccaatgaagacaaggaccctgccttcaccgccctgctgaccacccagacccaggtgcagcgggagatcgtgaacaagcacaatgagctgcggcgggctgtgagccccccagccaggaacatgctgaagatggagtggaacaaggaggccgccgccaatgcccagaagtgggccaaccagtgcaactaccgccacagcaaccccaaggacaggatgaccagcctgaagtgtggagaaaatctctacatgagcagcgccagcagctcctggagccaggccatccagagctggtttgatgagtacaatgactttgattttggagtgggccccaagaccccaaatgctgtggtgggccactacacccaggtggtgtggtacagcagctacctggtgggctgtggaaatgcctactgccccaaccagaaggtgctgaagtactactacgtgtgccagtactgcccagctggcaactgggccaaccggctgtatgtgccctatgagcagggcgccccctgtgccagctgcccagacaactgtgatgatggcctgtgcaccaacggctgcaagtatgaagatctctacagcaactgcaagagcctgaagctgaccctgacctgcaagcaccagctggtgcgggacagctgcaaggccagctgcaactgcagcaacagcatctactag

SEQ ID NO: 7962 - DNA, 372 bp, synthetic construct
  misc_feature 1..372: note = source = /note="Description of Artificial Sequence: Synthetic coding sequence"
  source 1..372: mol_type = other DNA
atgctgcccaagagccggcgggccctgaccatccaggagattgctgccctggcccggagcagcctgcacggcatcagccaggtggtgaaggaccacgtgaccaagcccacagccatggcccagggccgggtggcccacctgattgagtggaagggctggagcaagcccagcgacagccctgctgccctggagagcgccttcagcagctacagcgacctgtctgagggggagcaggaggccaggtttgctgctggggtggccgagcagtttgccatcgccgaggccaagctgcgggcctggagctctgtggatggagaggacagcacagatgacagctatgatgaagattttgctgggggcatggacacctag

SEQ ID NO: 7963 - DNA, 726 bp, synthetic construct
  misc_feature 1..726: note = source = /note="Description of Artificial Sequence: Synthetic coding sequence"
  source 1..726: mol_type = other DNA
atgggcgctgtgatgggcaccttcagcagcctgcagaccaagcagaggcggcccagcaaggacaagattgaagatgagctggagatgaccatggtgtgccacaggcctgagggcctggagcagctggaggcccagaccaacttcaccaagcgggagctgcaggtgctgtaccggggcttcaagaatgaatgtcccagcggcgtggtgaatgaagacaccttcaagcagatctatgcccagttcttcccccacggggccctgccctgcctggagggcagcccctgtgtggagttcctgccccccagccctgccctgctcttctgcctggtggatgccagcacctacgcccactacctgttcaatgcctttgacaccacccagacaggctctgtgaagtttgaggactttgtgacagccctgagcatcctgctgcggggcaccgtgcatgagaagctgcgctggaccttcaacctgtatgacatcaacaaggatggctacatcaacaaggaggagatgatggacatcgtgaaggccatctatgacatgatgggcaagtacacctaccctgtgctgaaggaggacaccccccggcagcacgtggatgtgttcttccagaagatggacaagaacaaggatggcatcgtgaccctggatgagttcctggagagctgccaggaggatgacaacatcatgaggagcctgcagctgttccagaatgtgatgtag

SEQ ID NO: 7964 - DNA, 630 bp, synthetic construct; identical to SEQ ID NO: 7859
  misc_feature 1..630: note = source = /note="Description of Artificial Sequence: Synthetic coding sequence"
  source 1..630: mol_type = other DNA

SEQ ID NO: 7965 - DNA, 312 bp, synthetic construct
  misc_feature 1..312: note = source = /note="Description of Artificial Sequence: Synthetic coding sequence"
  source 1..312: mol_type = other DNA
atgaggcagaggctgctgcccagcgtgaccagcctgctgctggtggccctgctcttccctggcagcagccaggcccggcacgtgaaccacagcgccacagaggccctgggggagctgcgggagcgggcccctggccagggcaccaacggcttccagctgctgcggcatgctgtgaagagggacctgctgccccccaggaccccaccctaccaggtgcacatcagccaccaggaggcccggggccccagcttcaagatctgtgtgggcttcctgggcccccgctgggcccggggctgcagcactggaaattag

SEQ ID NO: 7966 - DNA, 426 bp, synthetic construct
  misc_feature 1..426: note = source = /note="Description of Artificial Sequence: Synthetic coding sequence"
  source 1..426: mol_type = other DNA
atgaagacaggcctcttcttcctgtgcctgctgggcacagctgctgccatccccaccaatgcccggctgctgagtgaccacagcaagcccacagctgagaccgtggccccagacaacacagccatccccagcctgcgggcagaggccgaggagaatgagaaggagacagctgtgtccacagaagatgacagccaccacaaggccgagaagagctctgtgctgaagagcaaggaggagagccatgagcagagcgctgagcagggcaagagcagcagccaggagctgggcctgaaggaccaggaggacagtgatggccacctgtctgtgaacctggagtatgcccccacagagggcaccctggacatcaaggaggacatgtctgagccccaggagaagaagctgtctgagaacacagacttcctgtag

SEQ ID NO: 7967 - DNA, 642 bp, synthetic construct
  misc_feature 1..642: note = source = /note="Description of Artificial Sequence: Synthetic coding sequence"
  source 1..642: mol_type = other DNA
atgaggctggccggccccctgagaattgtggtgctggtggtgtctgtgggcgtgacctggatcgtggtgtccatcctgctgggcggccctggcagcggcttcccccgcatccagcagctgttcaccagccctgagagctctgtgacagctgccccccgggccaggaagtacaagtgtggcctgccccagccctgcccagaggagcacctggccttccgggtggtgtctggggccgccaacgtcatcggccccaagatctgcctggaggacaagatgctgatgagctctgtgaaggacaacgtgggccggggcctgaacatcgccctggtgaatgatgtgaatgacctgctgaagttcatccggcccctgcacgagggcaccctggtgtttgtggccagctatgatgatcctgccaccaagatgaatgaggagaccaggaagctgttcagcgagctgggcagcagaaatgccaaggagctggccttccgggacagctgggtgtttgtgggcgccaagggcgtgcagaacaagagcccctttgagcagcacgtgaagaacagcaagcacagcaacaagtatgagggctggccagaggccctggagatggagggctgcatcccccggcgcagcacagccagctag

SEQ ID NO: 7968 - DNA, 2700 bp, synthetic construct; identical to SEQ ID NO: 7525
  misc_feature 1..2700: note = source = /note="Description of Artificial Sequence: Synthetic coding sequence"
  source 1..2700: mol_type = other DNA

SEQ ID NO: 7969 - DNA, 192 bp, synthetic construct; identical to SEQ ID NO: 7947
  misc_feature 1..192: note = source = /note="Description of Artificial Sequence: Synthetic coding sequence"
  source 1..192: mol_type = other DNA

SEQ ID NO: 7970 - DNA, 489 bp, synthetic construct
  misc_feature 1..489: note = source = /note="Description of Artificial Sequence: Synthetic coding sequence"
  source 1..489: mol_type = other DNA
gatgaggaccgctacaccacctgctggcccaagacctggctggccaaggactgcccagccctgcgcatcatctctgtggagtatgacaccagcctgagtgactggagggcccgctgccccatggagaggaagagcatcgccttccgcagcaatgagctgctgaggaagctgcgggccgccggcgtgggggacaggcctgtggtgtggatcagccacagcatgggcggcctgctggtgaagaagatgctgctggaggccagcaccaagccagagatgagcaccgtcatcaacaacacccggggcatcatcttctacagcgtgccccaccacggcagccggctggccgagtacagcgtgaacatccgctacctgctcttccccagcctggaggtgaaggagctgagcaagggcaacaccttctgccacaagggcaactggggctacatcaacatctcctacacagagaagaagaagaagttcctgccctag

SEQ ID NO: 7971 - DNA, 1083 bp, synthetic construct
  misc_feature 1..1083: note = source = /note="Description of Artificial Sequence: Synthetic coding sequence"
  source 1..1083: mol_type = other DNA
atgcctgagctggtggtgacagccctgctggcccccagccggctgagcctgaagctgctgcgggccttcatgtggagcctggtgttttctgtggccctggtggccgctgctgtgtatggctgcatcgccctgacccacgtgctgtgccggccccggcggggctgctgcggcagaagaagaagtgccagccctgcctgcctgagtgaccccagcctgggggagcacggcttcctgaacctgaagagcagcggcctgcggctgcactacgtgtctgctggaagaggaaatggccccctgatgctgttcctgcacggcttccctgagaactggttctcctggagataccagctgcgggagttccagagccgcttccacgtggtggccgtggacctgcggggctacggccccagtgatgcccccagagatgtggactgctacaccatcgacctgctgctggtggacatcaaggatgtgatcctgggcctgggctacagcaagtgcatcctggtggcccatgactggggcgccctgctggcctggcacttcagcatctactaccccagcctggtggagaggatggtggtggtgtctggggcccccatgtctgtgtaccaggactacagcctgcaccacatcagccagttcttccgcagccactacatgttcctgttccagctgccctggctgcctgagaagctgctgtccatgtctgacttccagatcctgaagaccaccctgacccacaggaagacaggcatcccctgcctgaccccatctgagctggaggccttcctgtacaacttcagccagcccggcggcctgaccggccccctgaactactacagaaacctcttcaggaacttccccctggagccccaggagctgaccacccccaccctgctgctgtggggcgagaaggacacctacctggagctgggcctggtggaggccatcggcagcagatttgtgcccggccgcctggaggcccacatcctgcccggcatcggccactggatcccccagagcaacccccaggagatgcaccagtacatgtgggccttcctgcaggacctgctggactag

SEQ ID NO: 7972 - DNA, 678 bp, synthetic construct; identical to SEQ ID NO: 7810
  misc_feature 1..678: note = source = /note="Description of Artificial Sequence: Synthetic coding sequence"
  source 1..678: mol_type = other DNA

SEQ ID NO: 7973 - DNA, 192 bp, synthetic construct; identical to SEQ ID NO: 6920
  misc_feature 1..192: note = source = /note="Description of Artificial Sequence: Synthetic coding sequence"
  source 1..192: mol_type = other DNA

SEQ ID NO: 7974 - DNA, 5235 bp, synthetic construct; identical to SEQ ID NO: 7479
  misc_feature 1..5235: note = source = /note="Description of Artificial Sequence: Synthetic coding sequence"
  source 1..5235: mol_type = other DNA

SEQ ID NO: 7975 - DNA, 792 bp, synthetic construct
  misc_feature 1..792: note = source = /note="Description of Artificial Sequence: Synthetic coding sequence"
  source 1..792: mol_type = other DNA
atggctgacatgcagaacctggtggagcggctggagagagctgtgggccgcctggaggccgtgagccacaccagtgacatgcaccggggctacgccgacagccccagcaaaggagctgccccctacgtgcaggcctttgacagcctgctggccggccctgtggccgagtacctgaagatcagcaaggagattggaggagatgtgcagaagcacgccgagatggtgcacacaggcctgaagctggagcgggccctgctggtgacagccagccagtgccagcagcctgctgagaacaagctgagtgacctgctggcccccatcagcgagcagatcaaggaggtgatcaccttccgggagaagaacagaggcagcaagctgttcaaccacctgtctgctgtgtctgagagcatccaggccctgggctgggtggccatggcccccaagccaggcccctacgtgaaggagatgaatgatgctgccatgttctacaccaacagagtgctgaaggagtacaaggatgtggacaagaagcacgtggactgggtgaaggcctacctgagcatctggacagagctgcaggcctacatcaaggagttccacaccaccggcctggcctggagcaagacaggccctgtggccaaggagctgagcggcctgcccagcggccccagcgctggcagctgccccccacctcctccaccctgccccccacctcctcctgtgtccaccatcagctgcagctatgagagcgccagccgcagcagcctgtttgcccagatcaaccagggctag

SEQ ID NO: 7976 - DNA, 501 bp, synthetic construct
  misc_feature 1..501: note = source = /note="Description of Artificial Sequence: Synthetic coding sequence"
  source 1..501: mol_type = other DNA
atgggccctgaggccctgagcagcctgctgctgctgctgctggtggccagcggagatgctgacatgaagggccactttgatcctgccaagtgccgctatgccctgggcatgcaggacaggaccatcccagacagcgacatcagcgccagcagctcctggagcgacagcacagctgcccggcacagccggctggagagcagtgatggagatggagcctggtgcccagctggcagcgtcttccccaaggaggaggagtacctgcaggtggacctgcagaggctgcacctggtggccctggtgggcacccagggcagacatgctgggggcctgggcaaggagttcagccgcagctaccgcctgcgctacagcagagatggaagacgctggatgggctggaaggaccgctggggccaggaggtgatctctggaaatgaagatcctgagggcgtggtgctgaaggacctgggcccccccatggtggcccggctggtgcgcttctag

SEQ ID NO: 7977 - DNA, 2349 bp, synthetic construct
  misc_feature 1..2349: note = source = /note="Description of Artificial Sequence: Synthetic coding sequence"
  source 1..2349: mol_type = other DNA
tccatcctgcgggtggaggccgtggatgctgactgcagcccccagttcagccagatctgcagctatgagatcatcaccccagatgtgcccttcaccgtggacaaggatggctacatcaagaacacagagaagctgaactacggcaaggagcaccagtacaagctgactgtgacagcctatgactgtgggaagaagagggccacagaagatgtgctggtgaagatcagcatcaagcccacctgcaccccaggctggcagggctggaacaaccgcatcgagtatgagcccggcaccggggccctggccgtgttccccaacatccacctggagacctgtgatgagcctgtggcctctgtgcaggccaccgtggagctggagaccagccacatcggcaagggctgtgaccgggacacctacagcgagaagagcctgcaccggctgtgtggggctgctgctggaacagctgagctgctgcccagccccagcggcagcctgaactggaccatgggcctgcccacagacaatggacatgacagcgaccaggtgtttgagttcaacggcacccaggccgtgcgcatcccagatggagtggtgtctgtgagccccaaggagcccttcaccatctctgtgtggatgagacatggcccctttggaaggaagaaggagaccatcctgtgcagcagtgacaagacagacatgaacagacaccactacagcctgtatgtgcacggctgccgcctcatcttcctgttccggcaggaccccagcgaggagaagaagtacagacctgctgagttccactggaagctgaaccaggtgtgtgatgaggagtggcaccactacgtgctgaatgtggagttccccagcgtgaccctgtatgtggatggcaccagccatgagcccttctctgtgacagaggactaccccctgcaccccagcaagattgagacccagctggtggtgggcgcctgctggcagggcggggacctgcacatgacccagttcttccggggcaacctggccggcctgaccctgcggagcggcaagctggccgacaagaaggtgattgactgcctgtacacctgcaaggagggcctggacctgcaggtgctggaggacagcggccggggcgtgcagatccaggcccaccccagccagctggtgctgaccctggagggggaggacctgggggagctggacaaggccatgcagcacatctcctacctgaacagccggcagttccccaccccaggcatccggcggctgaagatcaccagcaccatcaagtgcttcaatgaggccacctgcatctctgtgccccctgtggatggctacgtgatggtgctgcagcctgaggagcccaagatcagcctgtctggagtgcaccactttgcccgggccgccagcgagtttgagagcagcgagggcgtcttcctgtttcctgagctgcgcatcatcagcaccatcacccgggaggtggagccagaaggagatggagctgaggaccccaccgtgcaggagagcctggtgtctgaggagatcgtgcatgacctggacacctgtgaggtgacagtggagggggaggagctgaaccacgagcaggagagcctggaggtggacatggcccggctgcagcagaagggcatcgaggtgagcagcagcgagctgggcatgaccttcaccggggtggacaccatggccagctatgaggaggtgctgcacctgctgcgctacagaaactggcacgcccggagcctgctggacaggaagttcaagctgatctgcagcgagctgaatggccgctacatcagcaatgagttcaaggtggaggtgaatgtcatccacacagccaaccccatggagcacgccaaccacatggccgcccagccccagtttgtgcaccctgagcacaggagctttgtggacctgagcggccacaacctggccaacccccacccctttgctgtggtgcccagcacagccaccgtggtgattgtggtgtgtgtgtccttcctggtgttcatgatcatcctgggcgtcttccgcatccgggccgcccacaggaggaccatgagggaccaggacaccgggaaggaaaatgagatggactgggatgattctgccctgaccatcaccgtgaaccccatggagacctatgaggaccagcacagcagcgaggaggaggaggaggaggaggaggaggaggagagtgaagatggagaggaggaggatgacatcaccagcgctgagagcgagagcagcgaggaggaggagggggagcagggcgacccccagaatgccacccggcagcagcagctggagtgggatgacagcaccctgagctactag

SEQ ID NO: 7978 - DNA, 531 bp, synthetic construct
  misc_feature 1..531: note = source = /note="Description of Artificial Sequence: Synthetic coding sequence"
  source 1..531: mol_type = other DNA
atggcccggcggcactgcttctcctactggctgctggtgtgctggctggtggtgacagtggccgaggccctgagcaccttctacctgcagcagcacatcaacctgcacatggacaagaagcgctacctgcggctgctggagatccacaagatcatgaggaccctgcccacagcccggagcctgcacagccccctgcacctgccccggggcgtgcgcagccagggccccagccccagccagaggcaccctggggtgcccagcatcttcttccacgagggccctgagagcatcctgggcttccagacagacctgagcagcctgcagggcgtgaccaccgtcttccacagcagccacttcatcggccacacagtgaccctgctgattggcatcagccctgaggaggacagccgggaggaggcccacctgaggaaggccgagcgggaggagaagcccaagcacacagaggccaagaagagcctgtccttcaggaagaagcagcagaaggacttctgcttcatcttcagaaattag

SEQ ID NO: 7979 - DNA, 1182 bp, synthetic construct; identical to SEQ ID NO: 7135
  misc_feature 1..1182: note = source = /note="Description of Artificial Sequence: Synthetic coding sequence"
  source 1..1182: mol_type = other DNA

SEQ ID NO: 7980 - DNA, 324 bp, synthetic construct
  misc_feature 1..324: note = source = /note="Description of Artificial Sequence: Synthetic coding sequence"
  source 1..324: mol_type = other DNA
atgctgccctgcctggccctgctgctgctgatggagctgtctgtgtgcaccgtggccggagatggaggagaggagcagaccctgagcacagaggccgagacctgggagggcgccggccccagcatccagctgcagctgcaggaggtgaagacaggcaaggccagccagttcttcggcctgatgggcaagagggtgggcggccggcccctcatccagcccaggaggaagaaggcctaccagctggagcacaccttccagggcctgctgggcaagaggagcctcttcacagagggccgggaggatgaggcccagggcagcgagtag

SEQ ID NO: 7981 - DNA, 1086 bp, synthetic construct
  misc_feature 1..1086: note = source = /note="Description of Artificial Sequence: Synthetic coding sequence"
  source 1..1086: mol_type = other DNA
atgggcatcatccagagcatcctggccaccagccgggactgctacagcttcaagaagaagcccatccccaagaagcccaccatgctggccctggccaagatcctgctgatcagcaccctcttctacagcctgctgagcggcagccacggcaaggagaaccaggacatcaacaccacccagaacattgctgaggtgttcaagaccatggagaacaagcccatcagcctggagagcgaggccaacctgaacagcgacaaggagaacatcaccaccagcaacctgaaggccagccacagcccccccctgaacctgcccaacaacagccacggcatcacagacttcagcagcaacagcagcgctgagcacagcctgggcagcctgaagcccaccagcaccatcagcaccagccccccactcatccacagctttgtgtccaaggtgccctggaatgcccccatcgcagatgaggacctgctgcccatcagcgcccaccccaatgccaccccagccctgagcagcgagaacttcacctggagcctggtgaatgacacagtgaagaccccagacaacagcagcatcaccgtgtccatcctgagcagcgagcccaccagccccagcgtgacccccctgattgtggagcccagcggctggctgaccaccaacagcgacagcttcaccggcttcaccccctaccaggagaagaccaccctgcagcccaccctgaagttcaccaacaacagcaagctgttccccaacaccagtgacccccagaaggaaaatagaaatactggaattgtgtttggagccatcctgggcgccatcctgggcgtgtccctgctgaccctggtgggctacctgctgtgtgggaagaggaagacagacagcttcagccaccggcggctgtatgatgacagaaatgaacctgtgctgcggctggacaatgcccctgagccctatgatgtgtcctttggaaacagcagctactacaaccccaccctgaatgacagcgccatgcctgagagtgaagaaaatgccagagatggcatccccatggatgacatcccccccctgcggacctctgtgtag

SEQ ID NO: 7982 - DNA, 279 bp, synthetic construct
  misc_feature 1..279: note = source = /note="Description of Artificial Sequence: Synthetic coding sequence"
  source 1..279: mol_type = other DNA
atgaggggccctggccaccccctgctgctgggcctgctgctggtgctgggccccagccctgagcagagggtggagatcgtgccccgggacctgaggatgaaggacaagttcctgaagcacctgaccggccccctgtacttcagccccaagtgcagcaagcacttccaccggctgtaccacaacacccgggactgcaccatcccagcctactacaagagatgtgcccggctgctgacccggctggccgtgtcccctgtgtgcatggaggacaagcagtag

SEQ ID NO: 7983 - DNA, 1125 bp, synthetic construct
  misc_feature 1..1125: note = source = /note="Description of Artificial Sequence: Synthetic coding sequence"
  source 1..1125: mol_type = other DNA
tgaagagtgcggcggggccccctgcctgctgaccggccccgggccctgggccctgcccggcgctgcagccgccacccccacccagcccccttccgggtgtgcagcgagggcgccgcccaccggctgcggcggcctgagcggctgcccctgcccagccgggccctgcggcccaggcctgcccacacccccatcctgggccctgccccccgggcctgccctggggccccccgggccagtgacagccccacctgtgccgctgctgctgccacagcctggcccaggaccagggctgtggagaggaagggctgccaggtggccgctgctgctggggtgcggggcaccggctgccccagcagagctgacctggagaaggacagctggaatgacaccaaggaggatgtgtttgtgcaccagacagccatcaagaagaacaaccccaggaagtacctgcggtctgtgggagatggagagaccgtggagtttgatgtggtggagggggagaagggagctgaggccgccaacgtgacaggccctgggggcgtgcctgtgcagggcagcaaatatgctgctgacaggaaccactaccgccgctaccccaggagaagaggcccccccaggaactaccagcagaactaccagaacagcgagagcggggagaagaatgaaggcagcgagagcgcccctgagggccaggcccagcagaggcggccctacagaagaagacgcttccccccctactacatgagaagaccctacggccggcggccccagtacagcaacccccctgtgcagggcgaggtgatggagggcgctgacaaccagggcgctggggagcagggccggcctgtgcggcagaacatgtaccggggctaccggccccgcttccggcggggccccccccggcagaggcagcccagagaagatggaaatgaggaggacaaggagaaccagggagatgagacccagggccagcagcccccccagaggcgctacagaagaaacttcaactacagaagaagaagacctgagaaccccaagccccaggacggcaaggagaccaaggctgctgaccccccagctgagaacagcagcgcccctgaggccgagcagggcggcgctgagtag

SEQ ID NO: 7984 - DNA, 420 bp, synthetic construct
  misc_feature 1..420: note = source = /note="Description of Artificial Sequence: Synthetic coding sequence"
  source 1..420: mol_type = other DNA
atggccctgaggatgctgtgggccggccaggccaagggcatcctgggcggctggggcatcatctgcctggtgatgagcctgctgctgcagcaccctggggtgtacagcaagtgctacttccaggcccaggccccctgccactatgagggcaagtacttcaccctgggggagagctggctgaggaaggactgcttccactgcacctgcctgcaccctgtgggcgtgggctgctgtgacaccagccagcaccccatcgacttccctgctggctgtgaggtgcggcaggaggccggcacctgccagttcagcctggtgcagaagagtgacccccggctgccctgcaagggcggcggccctgaccctgagtggggcagcgccaacacccctgtgcctggggccccagccccccacagcagctag

SEQ ID NO: 7985 - DNA, 462 bp, synthetic construct
  misc_feature 1..462: note = source = /note="Description of Artificial Sequence: Synthetic coding sequence"
  source 1..462: mol_type = other DNA
cactactgcaaggagggctactacagagacatgggcaagcccatcacccacaggaaggcctgcaaggcctgtgactgccaccctgtgggcgccgccggcaagacctgcaaccagaccaccggccagtgcccctgcaaggatggagtgacaggcatcacctgcaacagatgtgccaagggctaccagcagagccgcagccccatcgccccctgcatcaagatccctgtggccccacccaccacagctgccagctctgtggaggagcctgaggccgcccggcagcccaacaccttccaggccgagggcctgagcctgctgcctggagctgctgagaaggagggcgcccgctgctggggctacagaagaaggctgggccaccgggtggcccaggccgagtgccggggccccaggtcctgggcctggggccgcatcaccagcagcttctcctttgccagcaactag

SEQ ID NO: 7986 - DNA, 213 bp, synthetic construct
  misc_feature 1..213: note = source = /note="Description of Artificial Sequence: Synthetic coding sequence"
  source 1..213: mol_type = other DNA
atgctggtgctcttcctgctgggcaccgtcttcctgctgtgcccctactggggcgagctgcatgaccccatcaagggccagagcatgtaccactacagcaagctgagctgcatgaccagctgtgaggacatcaacttcctgggcttcaccaagagggtggagctgatctgctgtgaccacagcaactactgcaacctgcctgagggcgtgtag

SEQ ID NO: 7987 - DNA, 567 bp, synthetic construct; identical to SEQ ID NO: 7502
  misc_feature 1..567: note = source = /note="Description of Artificial Sequence: Synthetic coding sequence"
  source 1..567: mol_type = other DNA

SEQ ID NO: 7988 - DNA, 2316 bp, synthetic construct; identical to SEQ ID NO: 6949
  misc_feature 1..2316: note = source = /note="Description of Artificial Sequence: Synthetic coding sequence"
  source 1..2316: mol_type = other DNA

SEQ ID NO: 7989 - DNA, 1014 bp, synthetic construct
  misc_feature 1..1014: note = source = /note="Description of Artificial Sequence: Synthetic coding sequence"
  source 1..1014: mol_type = other DNA
atggcccggcccatgatcaaggaggccaggatggccagcctgctgctggagaacccctactacggctgcaggaagcccaaggaccaggtgcgcagcagcctgaagaatgtgtctgacctgtttgtgatgggcggggccctggtgctggagagcgctgccctgctgcactggctggagcgggagggctacggccccctgggcatgacaggcatctccatgggcggccacatggccagcctggccgtgagcaactggcccaagcccatgcccctcatcccctgcctgtcctggagcacagccagcggggtcttcaccaccggggtgctgagcaagagcatcaactggagggagctggagaagcagtactacacccagacagtgtatgaggaggagatcatccacatgctggagtactgcggcacagacagcttcaagatgggccaggagtttgtgaagcacttcaccagcagcgctgacaagctgaccaacctgaacctggtgtccaggaccctgaacctggacatcagcaaccaggtggtgtcccagaagccagctgactgccacaacagcagcaagacctctgtgtctgccaccagcgagggcctgctgctgcaggacaccagcaagatgaagcgcttcaaccagaccctgagcaccaacaagagcggctacaccagcaggaacccccagagctaccacctgctgagcaaggagcagagcaggaacagcctgaggaaggagagcctcatcttcatgaagggcgtgatggatgagtgcacccacgtggccaacttctctgtgcctgtggaccccagcctcatcatcgtggtgcaggccaaggaggatgcctacatccccaggactggagtgcgcagcctgcaggagatctggccaggctgtgagatccgctacctggagggcggccacatcagcgcctacctgttcaagcagggcctcttccggcaggccatctatgatgcctttgaccgcttcctgcacaagtatgccaactag

SEQ ID NO: 7990 - DNA, 462 bp, synthetic construct
  misc_feature 1..462: note = source = /note="Description of Artificial Sequence: Synthetic coding sequence"
  source 1..462: mol_type = other DNA
atgggccctgaggccctgagcagcctgctgctgctgctgctggtggccagcggagatgctgacatgaagggccactttgatcctgccaagtgccgctatgccctgggcatgcaggacaggaccatcccagacagcgacatcagcgccagcagctcctggagcgacagcacagctgcccggcacagccggctggagagcagtgatggagatggagcctggtgcccagctggcagcgtcttccccaaggaggaggagtacctgcaggtggacctgcagaggctgcacctggtggccctggtgggcacccagggcagacatgctgggggcctgggcaaggagttcagccgcagctaccgcctgcgctacagcagagatggaagacgctggatgggctggaaggaccgctggggccaggaggtgatctctggaaatgaagatcctgagggcgtggtgctgaagtag

SEQ ID NO: 7991 - DNA, 345 bp, synthetic construct
  misc_feature 1..345: note = source = /note="Description of Artificial Sequence: Synthetic coding sequence"
  source 1..345: mol_type = other DNA
atggacaagagcctgctgctggagctgcccatcctgctgtgctgcttccgggccctgagcggcagcctgtccatgagaaatgatgctgtgattgaaattgtgcagtgcaggatgtgccacctgcagtttcctggagagaagtgcagccggggccggggcatctgcacagccaccacagaggaggcctgcatggtgggccgcatgttcaagagagatggcaacccctggctgaccttcatgggctgcctgaagaactgtgctgatgtgaagggcatccgctggagcgtgtacctggtgaacttccgctgctgccgcagccatgacctgtgcaatgaagacctgtag

SEQ ID NO: 7992 - DNA, 630 bp, synthetic construct; identical to SEQ ID NO: 7859
  misc_feature 1..630: note = source = /note="Description of Artificial Sequence: Synthetic coding sequence"
  source 1..630: mol_type = other DNA

SEQ ID NO: 7993 - DNA, 639 bp, synthetic construct
  misc_feature 1..639: note = source = /note="Description of Artificial Sequence: Synthetic coding sequence"
  source 1..639: mol_type = other DNA
gactttggctactgcccccgggtgtactgtgagaaccagcccatgctgcccatcggcgtgctggtgatggtgggcttcaccgtgggcaaggtgcctgtgcctgacatccgcacctgccacttctgcctggtggaggaccccagcgtgggctgcatcagcggcagcgagaagtgcaccatcagcagcagcagcctgtgcatggtgatcaccatctactatgatgtgaaggtgcgcttcatcgtgcggggctgcggccagtacatctcctaccgctgccaggagaagaggaacacctactttgctgagtactggtaccaggcccagtgctgccagtatgactactgcaacagctggagcagcccccagctgcagagcagcctgcctgagccccatgaccggcccctggccctgcccctgagtgacagccagatccagtggttctaccaggccctgaacctgagcctgcccctgcccaacttccacgccggcacagagccagatggcctggaccccatggtgaccctgagcctgaacctgggcctgagctttgctgagctgcggaggatgtacctgttcctgaacagcagcggcctgctggtgctgccccaggccggcctgctgaccccccaccccagctag

SEQ ID NO: 7994 - DNA, 240 bp, synthetic construct; identical to SEQ ID NO: 7750
  misc_feature 1..240: note = source = /note="Description of Artificial Sequence: Synthetic coding sequence"
  source 1..240: mol_type = other DNA

SEQ ID NO: 7995 - DNA, 1620 bp, synthetic construct
  misc_feature 1..1620: note = source = /note="Description of Artificial Sequence: Synthetic coding sequence"
  source 1..1620: mol_type = other DNA
atgtctgagccccaggagaagaagctgtctgaaaatacagacttcctggcccctggggtgagcagcttcacagacagcaaccagcaggagagcatcaccaagcgggaggagaaccaggagcagcccaggaactacagccaccaccagctgaacagaagcagcaagcacagccagggcctgcgggaccagggcaaccaggagcaggaccccaacatcagcaatggagaggaggaggaggagaaggagcctggagaggtgggcacccacaatgacaaccaggagaggaagacagagctgccccgggagcacgccaacagcaagcaggaggaggacaacacccagagtgatgacatcctggaggagagtgaccagcccacccaggtgtccaagatgcaggaggatgaatttgaccagggcaaccaggagcaggaggacaacagcaatgctgagatggaggaggagaatgccagcaatgtgaacaagcacatccaggagacagagtggcagagccaggagggcaagacaggcctggaggccatcagcaaccacaaggagacagaggagaagacagtgtctgaggccctgctgatggagcccacagatgatggcaacaccacccccaggaaccacggcgtggatgatgatggagatgatgatggagatgatggcggcacagatggccccaggcacagcgccagtgatgactacttcatccccagccaggccttcctggaggccgagcgggcccagagcatcgcctaccacctgaagattgaggagcagcgggagaaggtgcatgaaaatgaaaatattggcaccacagagcccggggagcaccaggaggccaagaaggccgagaacagcagcaatgaggaggagaccagcagcgagggcaacatgagggtgcatgctgtggacagctgcatgtccttccagtgcaagaggggccacatctgcaaggctgaccagcagggcaagccccactgtgtgtgccaggaccctgtgacctgcccccccaccaagcccctggaccaggtgtgtggcacagacaaccagacctacgccagcagctgccacctgtttgccaccaagtgccgcctggagggcaccaagaagggccaccagctgcagctggactactttggagcctgcaagagcatccccacctgcacagactttgaagtcatccagttccccctgaggatgagggactggctgaagaacatcctgatgcagctgtatgaggccaacagcgagcacgccggctacctgaatgagaagcagaggaacaaggtgaagaagatctacctggatgagaagaggctgctggccggggaccaccccatcgacctgctgctgcgggacttcaagaagaactaccacatgtatgtgtaccctgtgcactggcagttcagcgagctggaccagcaccccatggacagagtgctgacccacagcgagctggcccccctgcgggccagcctggtgcccatggagcactgcatcacccgcttctttgaggagtgtgaccccaacaaggacaagcacatcaccctgaaggagtggggccactgcttcggcatcaaggaggaggacattgatgagaacctgctcttctag

SEQ ID NO: 7996 - DNA, 2535 bp, synthetic construct; identical to SEQ ID NO: 7302
  misc_feature 1..2535: note = source = /note="Description of Artificial Sequence: Synthetic coding sequence"
  source 1..2535: mol_type = other DNA

SEQ ID NO: 7997 - DNA, 993 bp, synthetic construct
  misc_feature 1..993: note = source = /note="Description of Artificial Sequence: Synthetic coding sequence"
  source 1..993: mol_type = other DNA
atgcagctgttcctgctgctgtgcctggtgctgctgagcccccagggcgccagcctgcaccgccaccacccccgggagatgaagaagagggtggaggacctgcacgtgggcgccaccgtggcccccagcagcagaagagacttcacctttgacctgctgggcaatgccctcttcacagacctggtggtggacctgcaggacacctttgtgtctgccatgaagaccctgtacctggccgacaccttccccaccaacttccgggacagcgctggggccatgaagcagatcaatgactatgtggccaagcagaccaagggcaagatcgtggacctgctgaagaacctggacagcaatgctgtggtgatcatggtgaactacatcttcttcaaggccaagtgggagaccagcttcaaccacaagggcacccaggagcaggacttctacgtgaccagcgagaccgtggtgcgggtgcccatgatgagccgggaggaccagtaccactacctgctggacaggaacctgagctgccgggtggtgggcgtgccctaccagggcaatgccacagccctcttcatcctgcccagcgagggcaagatgcagcaggtggagaatggcctgtctgagaagaccctgaggaagtggctgaagatgttcaagaagaggcagctggagctgtacctgcccaagttcagcattgagggcagctaccagctggagaaggtgctgcccagcctgggcatcagcaatgtgttcaccagccatgctgacctgagcggcatcagcaaccacagcaacatccaggtgtctgagatggtgcacaaggctgtggtggaggtggatgagagcggcaccagggctgctgctgccaccggcaccatcttcaccttccgcagcgcccggctgaacagccagaggctggtgttcaaccggcccttcctgatgttcatcgtggacaacaacatcctcttcctgggcaaggtgaaccggccctag

SEQ ID NO: 7998 - DNA, 2676 bp, synthetic construct; identical to SEQ ID NO: 7495
  misc_feature 1..2676: note = source = /note="Description of Artificial Sequence: Synthetic coding sequence"
  source 1..2676: mol_type = other DNA

SEQ ID NO: 7999 - DNA, 708 bp, synthetic construct; identical to SEQ ID NO: 7281
  misc_feature 1..708: note = source = /note="Description of Artificial Sequence: Synthetic coding sequence"
  source 1..708: mol_type = other DNA

SEQ ID NO: 8000 - DNA, 1386 bp, synthetic construct; identical to SEQ ID NO: 7292
  misc_feature 1..1386: note = source = /note="Description of Artificial Sequence: Synthetic coding sequence"
  source 1..1386: mol_type = other DNA

SEQ ID NO: 8001 - DNA, 2676 bp, synthetic construct; identical to SEQ ID NO: 7495
  misc_feature 1..2676: note = source = /note="Description of Artificial Sequence: Synthetic coding sequence"
  source 1..2676: mol_type = other DNA

SEQ ID NO: 8002 - DNA, 501 bp, synthetic construct; identical to SEQ ID NO: 7976
  misc_feature 1..501: note = source = /note="Description of Artificial Sequence: Synthetic coding sequence"
  source 1..501: mol_type = other DNA

SEQ ID NO: 8003 - DNA, 420 bp, synthetic construct
  misc_feature 1..420: note = source = /note="Description of Artificial Sequence: Synthetic coding sequence"
  source 1..420: mol_type = other DNA
atgcaggccgcctgctggtacgtgctcttcctgctgcagcccaccgtgtacctggtgacctgtgccaacctgaccaacggcggcaagtctgagctgctgaagagcggcagcagcaagagcaccctgaagcacatctggacagagagcagcaaggacctgagcatcagccggctgctgagccagaccttccggggcaaggaaaatgacacagacctggacctgcgctatgacaccccagagccctacagcgagcaggacctgtgggactggctgaggaacagcacagacctgcaggagccccggccccgggccaagaggcggcccatcgtgaagacaggcaagttcaagaagatgtttggctggggagacttccacagcaacatcaagacagtgaagctgaacctgctgatcaccggctag

SEQ ID NO: 8004 - DNA, 2412 bp, synthetic construct
  misc_feature 1..2412: note = source = /note="Description of Artificial Sequence: Synthetic coding sequence"
  source 1..2412: mol_type = other DNA
atggctgctgctggcctggtggccgtggccgctgctgctgagtacagcggcaccgtggccagcggcggcaacctgcccggggtgcactgcggccccagcagcggggccggccctggcttcggccctggctcctggagccgcagcctggaccgggccctggaggaggccgctgtgactggagtgctgagcctgagcggcaggaagctgcgggagttccccaggggggccgccaaccacgacctgacagacaccaccagggctgacctgagcaggaaccggctgtctgagatccccatcgaggcctgccactttgtgtccctggagaacctgaacctgtaccagaactgcatccgctacatccctgaggccatcctgaacctgcaggccctgaccttcctgaacatcagcaggaaccagctgagcaccctgcctgtgcacctgtgcaacctgcccctgaaggtgctgattgccagcaacaacaagctggtgtccctgcctgaggagatcggccacctgcggcacctgatggagctggatgtgtcctgcaatgagatccagaccatccccagccagatcggcaacctggaggccctgcgggacctgaatgtgagaagaaaccacctggtgcacctgcctgaggagctggccgagctgcccctcatccggctggacttcagctgcaacaagatcaccaccatccctgtgtgctacagaaacctgcggcacctgcagaccatcaccctggacaacaaccccctgcagagccccccagcccagatctgcatcaagggcaaggtgcacatcttcaagtacctgaacatccaggcctgcaagatcgccccagacctgcctgactatgaccggcggcccctgggcttcggcagctgccacgaggagctgtacagcagccggccctacggggccctggacagcggcttcaacagcgtggacagcggggacaagcgctggagcggaaatgagcccacagatgagttcagtgacctgcccctgcgggtggccgagatcaccaaggagcagaggctgcggcgggagagccagtaccaggagaacagaggcagcctggtggtgaccaatggaggagtggagcatgacctggaccagattgactacatcgacagctgcacagctgaggaggaggaggccgaggtgcggcagcccaagggccctgaccctgacagcctgagcagccagttcatggcctacatcgagcagaggcgcatcagccatgagggcagccctgtgaagcctgtggccatccgggagttccagaagacagaggacatgaggcgctacctgcaccagaacagagtgcctgctgagcccagcagcctgctgagcctgagcgccagccacaaccagctgagccacacagacctggagctgcaccagaggcgggagcagctggtggagaggacccggcgggaggcccagctggccgccctgcagtatgaggaggagaagatccgcaccaagcagatccagagagatgctgtgctggactttgtgaagcagaaggccagccagagcccccagaagcagcaccccctgctggatggagtggatggagagtgccccttccccagccgccgcagccagcacacagatgacagcgccctgtgcatgagcctgagcggcctgaaccaggtgggctgtgccgccaccctgccccacagcagcgccttcacccccctgaagagtgatgaccggcccaatgccctgctgagcagccctgccacagagaccgtgcaccacagccctgcctacagcttccctgctgccatccagaggaaccagccccagaggcctgagagcttcctgttccgggccggcgtgcgggcagagaccaacaagggccacgccagccccctgcccccatctgctgcccccaccacagacagcacagacagcatcaccggccagaacagccggcagcgggaggaggagctggagctgattgaccagctgaggaagcacatcgagtaccgcctgaaggtgtccctgccctgtgacctgggcgccgccctgacagatggagtggtgctgtgccacctggccaaccacgtgcggcccaggtctgtgcccagcatccacgtgcccagccctgctgtgcccaagctgaccatggccaagtgcagaagaaatgtggagaacttcctggaggcctgcaggaagattggagtgccccaggacaacctgtgcagccccagcgacatcctgcagctgaacctgtctgtgaagaggacagtggagaccctgctgagcctgggcgcccacagcgaggagagcagctttgtgtgcctgagcctgcagctgctgggctttgtggccttctactgcaccgtgatgctgaccctgtgtgtgctgtactactggctgtttcctgccaggtag

SEQ ID NO: 8005 - DNA, 633 bp, synthetic construct
  misc_feature 1..633: note = source = /note="Description of Artificial Sequence: Synthetic coding sequence"
  source 1..633: mol_type = other DNA
atgtacaaggcccggcccccagctggcagcggcggccctggagctgagcccccagccatggccgccccccggggccgggccgccccctggaccacagccctgctgctgctgctggccagccaggtgctgagccctggcagctgtgctgatgaggaggaggtgcctgaggagtgggtgctgctgcacgtggtgcagggccagatcggggccggcaactacagctacctgcggctgaaccacgagggcaagatcgtgctgaggatgaggagcctgaagggagatgctgacctgtatgtgtctgccagcagcctgcaccccagctttgatgattatgagctgcagagcgccacctgtggcccagatgctgtgtccatcccagcccacttccggcggcctgtgggcattggagtgtatggccaccccagccacctggagagcgagtttgagatgaaggtgtactatgatggcaccgtggagcagcacccctttggagaggccgcctacccagcagatggagcagatgctggccagaagcacgccggggccccagaagatgccagccaggaggaggagagcgtgctgtggaccatcctgatcagcatcctgaagctggtgctggagatcctcttctag

SEQ ID NO: 8006 - DNA, 486 bp, synthetic construct
  misc_feature 1..486: note = source = /note="Description of Artificial Sequence: Synthetic coding sequence"
  source 1..486: mol_type = other DNA
tgatgccccacagagatcatcgcctttggagaccggctggaggagttccgcagcatcaacacagaggtggtggcctgcagcgtggacagccagttcacccacctggcctggatcaacaccccccggcggcagggcggcctgggccccatccgcatccccctgctgagtgacctgacccaccagatcagcaaggactatggagtgtacctggaggacagcggccacaccctgcggggcctcttcatcattgatgacaagggcatcctgcggcagatcaccctgaatgacctgcctgtgggccgctctgtggatgagaccctgcggctggtgcaggccttccagtacacagacaagcatggagaggtgtgcccagctggctggaagccaggcagcgagaccatcaagccagaggacaccatgaaggcctggtggccccgggagagctacaaccccaggagctcctggaaggccgaggtgttcagatag

SEQ ID NO: 8007 - DNA, 2886 bp, synthetic construct; identical to SEQ ID NO: 7526
  misc_feature 1..2886: note = source = /note="Description of Artificial Sequence: Synthetic coding sequence"
  source 1..2886: mol_type = other DNA

SEQ ID NO: 8008 - DNA, 2853 bp, synthetic construct
  misc_feature 1..2853: note = source = /note="Description of Artificial Sequence: Synthetic coding sequence"
  source 1..2853: mol_type = other DNA
atgacctggaggatgggcccccgcttcaccatgctgctggccatgtggctggtgtgtggcagcgagccccacccccacgccaccatccggggcagccatggaggcaggaaggtgcccctggtgtccccagacagcagcaggcctgcccgcttcctgcggcacacaggccgcagccggggcatcgagaggagcaccctggaggagcccaacctgcagcccctgcagaggagaagatctgtgcctgtgctgcggctggcccggcccacagagcccccagcccggagtgacatcaacggggctgctgtgcggcctgagcagaggcctgctgcccggggcagcccccgggagatgatcagagatgagggcagcagcgcccggagcaggatgctgcgcttccccagcggcagcagcagccccaacatcctggccagctttgctgggaagaacagagtgtgggtgatcagcgccccccacgccagcgagggctactaccgcctgatgatgagcctgctgaaggatgatgtgtactgtgagctggccgagcggcacatccagcagatcgtgctcttccaccaggccggggaggagggcggcaaggtgcggcgcatcaccagcgagggccagatcctggagcagcccctggaccccagcctcatccccaagctgatgtccttcctgaagctggagaagggcaagtttggcatggtgctgctgaagaagaccctgcaggtggaggagcgctacccctaccctgtgcggctggaggccatgtatgaggtgattgaccagggccccatcagaagaattgagaagatccggcagaagggctttgtgcagaagtgcaaggccagcggcgtggagggccaggtggtggccgagggcaatgatggcggcggcggggccggccggcccagcctgggcagcgagaagaagaaggaggacccccggcgggcccaggtgccccccacccgggagagccgggtgaaggtgctgaggaagctggccgccacagccccagccctgccccagccccccagcaccccccgggccaccaccctgcccccagccccagccaccaccgtgaccaggagcaccagcagagctgtgacagtggccgcccggcccatgaccaccacagccttccccaccacccagaggccctggacccccagccccagccaccggccccccaccaccacagaggtgatcacagcccggcggcccagcgtgtctgagaacctgtacccacccagcaggaaggaccagcaccgggagcggccccagaccacccggcggcccagcaaggccaccagcctggagagcttcaccaatgccccacccaccaccatcagcgagcccagcaccagggctgctggccctggccgcttccgggacaacaggatggaccggcgggagcacggccaccgggaccccaacgtggtgcccggcccccccaagccagccaaggagaagccacccaagaagaaggcccaggacaagatcctgagcaatgaatatgaggagaagtatgacctgagccggcccacagccagccagctggaggatgagctgcaggtgggcaatgtgcccctgaagaaggccaaggagagcaagaagcatgagaagctggagaagccagagaaggagaagaagaagaagatgaagaatgaaaatgctgacaagctgctgaagtctgagaagcagatgaagaagtctgagaagaagagcaagcaggagaaggagaagagcaagaagaagaagggcggcaagacagagcaggacggctaccagaagcccaccaacaagcacttcacccagagccccaagaagtctgtggccgacctgctgggcagctttgagggcaagaggcggctgctgctgatcacagcccccaaggccgagaacaacatgtatgtgcagcagagagatgagtacctggagagcttctgcaagatggccaccaggaagatcagcgtcatcaccatctttggacctgtgaacaacagcaccatgaagattgaccacttccagctggacaatgagaagcccatgagggtggtggatgatgaggacctggtggaccagaggctcatcagcgagctgaggaaggagtatggcatgacctacaatgacttcttcatggtgctgacagatgtggacctgcgggtgaagcagtactatgaggtgcccatcaccatgaagtctgtgtttgacctgattgacaccttccagagccgcatcaaggacatggagaagcagaagaaggagggcatcgtgtgcaaggaggacaagaagcagagcctggagaacttcctgagccgcttccgctggaggcggcggctgctggtgatcagcgccccaaatgatgaggactgggcctacagccagcagctgagcgccctgagcggccaggcctgcaactttggcctgcggcacatcaccatcctgaagctgctgggcgtgggggaggaggtgggcggcgtgctggagctgttccccatcaatggcagctctgtggtggagagagaagatgtgcctgcccacctggtgaaggacatccggaactacttccaggtgtccccagagtacttctccatgctgctggtgggcaaggatggaaatgtgaagtcctggtaccccagccccatgtggagcatggtgattgtgtatgacctgattgacagcatgcagctgcggcggcaggagatggccatccagcagagcctgggcatgcgctgcccagaagatgaatatgccggctacggctaccacagctaccaccagggctaccaggacggctaccaggatgactaccgccaccacgagagctaccaccacggctacccctactag

SEQ ID NO: 8009 - DNA, 351 bp, synthetic construct; identical to SEQ ID NO: 7504
  misc_feature 1..351: note = source = /note="Description of Artificial Sequence: Synthetic coding sequence"
  source 1..351: mol_type = other DNA

SEQ ID NO: 8010 - DNA, 1251 bp, synthetic construct
  misc_feature 1..1251: note = source = /note="Description of Artificial Sequence: Synthetic coding sequence"
  source 1..1251: mol_type = other DNA
atgaagttccagggccccctggcctgcctgctgctggccctgtgcctgggcagcggggaggccggccccctgcagagcggggaggagagcacaggcaccaacattggagaggccctgggccacggcctgggagatgccctgtctgagggcgtgggcaaggccatcggcaaggaggccggcggcgctgctggcagcaaggtgtctgaggccctgggccagggcacccgggaggccgtgggcactggagtgcggcaggtgcccggctttggagtggctgatgccctgggcaacagagtgggggaggccgcccacgccctgggcaacacaggccatgaaattggccggcaggccgaggatgtgatcagacatggagcagatgctgtgcggggctcctggcagggcgtgcccggccacaatggagcctgggagaccagcggcggccacggcatcttcggcagccagggcggcctgggcggccagggccagggcaaccctgggggcctgggcaccccctgggtgcacggctacccaggcaacagcgctggcagctttggcatgaacccccagggcgccccctggggccagggcggcaatggaggcccccccaactttggcaccaacacccagggcgctgtggcccagcccggctacggctctgtgcgggccagcaaccagaatgaaggctgcaccaaccccccaccttctggcagcggcggcggcagcagcaacagcggcggcggcagcggcagccagagcggcagcagcggcagcggcagcaatggagacaacaacaacggcagcagcagcggcggcagcagcagcggcagcagcagcggcggcagcagcggcggcagcagcggcggcagcagcggcaacagcggcggcagcagaggagacagcggcagcgagagctcctggggcagcagcacaggcagcagcagcggcaaccacggcggcagcggcggcggcaatggccacaagccaggctgtgagaagccaggaaatgaggcccggggcagcggggagagcggcatccagggcttccggggccagggcgtgagcagcaacatgagggagatcagcaaggagggcaaccggctgctgggcggcagcggggacaactacagaaacagcgagaccagccctggcatgttcaactttgacaccttctggaagaacttcaagagcaagctgggcttcatcaactgggatgccatcaacaaggaccagaggagcagccgcatcccctag

SEQ ID NO: 8011 - DNA, 933 bp, synthetic construct
  misc_feature 1..933: note = source = /note="Description of Artificial Sequence: Synthetic coding sequence"
  source 1..933: mol_type = other DNA
atggtggacaaggacacagagcgggacatcgagatgaagaggcagctgcggcggctgcgggagctgcacctgtacagcacctggaagaagtaccaggaggccatgaagaccagcctgggcgtgccccagtgtgaaagagatgagggcagcctgggcaagcccctgtgccccccagagatcctgtctgagaccctgcccggctctgtgaagaagagggtgtgcttccccagcgaggaccacctggaggagttcatcgccgagcacctgcctgaggccagcaaccagagcctgctgactgtggcccatgctgatgctggcacccagaccaacggggacctggaggacctggaggagcacggccctggccagacagtgtctgaggaggccacagaggtgcacaccatggagggggaccctgacaccctggccgagttcctgatcagagatgtgctgcaggagctgagcagctacaacggggaggaggaggaccctgaggaggtgaagaccagcctgggcgtgccccagagaggagacctggaggacctggaggagcacgtgcccggccagacagtgtctgaggaggccaccggggtgcacatgatgcaggtggaccctgccaccctggccaagagtgacctggaggacctggaggagcacgtgcctgagcagacagtgtctgaggaggccaccggggtgcacatgatgcaggtggaccctgccaccctggccaagcagctggaggacagcaccatcaccggcagccaccagcagatgtctgccagccccagcagcgccccagctgaggaggccacagagaagaccaaggtggaggaggaggtgaagaccaggaagcccaagaagaagaccaggaagcccagcaagaagagccgctggaatgtgctgaagtgctgggacatcttcaacatcttctag

SEQ ID NO: 8012 - DNA, 150 bp, synthetic construct
  misc_feature 1..150: note = source = /note="Description of Artificial Sequence: Synthetic coding sequence"
  source 1..150: mol_type = other DNA
atggcccctccttctgtgcccctggtgctgctgctggtgctgctgctgagcctggccgagaccccagccagcgccccagcccacaggagcagcaccttccccaagtgggtgaccaagacagagcggggccggcagcccctgcggagctag

SEQ ID NO: 8013 - DNA, 978 bp, synthetic construct; identical to SEQ ID NO: 6924
  misc_feature 1..978: note = source = /note="Description of Artificial Sequence: Synthetic coding sequence"
  source 1..978: mol_type = other DNA

SEQ ID NO: 8014 - DNA, 390 bp, synthetic construct; identical to SEQ ID NO: 7503
  misc_feature 1..390: note = source = /note="Description of Artificial Sequence: Synthetic coding sequence"
  source 1..390: mol_type = other DNA

SEQ ID NO: 8015 - DNA, 1056 bp, synthetic construct
  misc_feature 1..1056: note = source = /note="Description of Artificial Sequence: Synthetic coding sequence"
  source 1..1056: mol_type = other DNA
atggccggcatccctggcctgctcttcctgctcttcttcctgctgtgtgctgtgggccaggtgagcccctacagcgccccctggaagcccacctggccagcctaccgcctgcctgtggtgctgccccagagcaccctgaacctggccaagcagtacctgtcctatgagaccctgtatgccaacggcagcaggacagagacccaggtgggcatctacatcctgagcagcagtggagatggagcccagcaccgggacagcggcagcagcggcaagagcaggaggaagaggcagatctacggctatgacagccgcttcagcatctttgggaaggacttcctgctgaactaccccttcagcacctctgtgaagctgagcacaggctgcaccggcaccctggtggccgagaagcacgtgctgacagctgcccactgcatccatgatggcaagacctacgtgaagggcacccagaagctgcgggtgggcttcctgaagcccaagttcaaggatggcggccgcggggccaatgacagcaccagcgccatgcctgagcagatgaagttccagtggatccgggtgaagaggacccacgtgcccaagggctggatcaagggaaatgccaatgacatcggcatggactatgactatgccctgctggagctgaagaagccccacaagaggaagttcatgaagattggagtgtccccaccagccaagcagctgcccggcggccgcatccacttcagcggctatgacaatgacaggcctggcaacctggtgtaccgcttctgtgatgtgaaggatgagacctatgacctgctgtaccagcagtgtgatgcccagcccggggccagcggcagcggcgtgtatgtgaggatgtggaagaggcagcagcagaagtgggagaggaagatcatcggcatcttcagcggccaccagtgggtggacatgaatggcagcccccaggacttcaacgtggccgtgcgcatcacccccctgaagtatgcccagatctgctactggatcaagggcaactacctggactgccgggagggctag

SEQ ID NO: 8016 - DNA, 345 bp, synthetic construct
  misc_feature 1..345: note = source = /note="Description of Artificial Sequence: Synthetic coding sequence"
  source 1..345: mol_type = other DNA
atggagagaggagctggggccaagctgctgcccctgctgctgctgctgcgggccaccggcttcacctgtgcccagacagatggaagaaatggctacacagctgtgattgaggtgaccagcggcggcccctggggagactgggcctggccagagatgtgcccagatggcttctttgccagcggcttcagcctgaaggtggagcccccccagggcatccctggagatgacacagccctgaatggcatccggctgcactgtgcccggggaaatgtgctgggcaacacccacgtggtggagagccagagcggccgctggggcgccggcgtggaggaccccctgggctag

SEQ ID NO: 8017 - DNA, 825 bp, synthetic construct
  misc_feature 1..825: note = source = /note="Description of Artificial Sequence: Synthetic coding sequence"
  source 1..825: mol_type = other DNA
atgtggcgctgccccctgggcctgctgctgctgctgcccctggccggccacctggccctgggcgcccagcagggccggggccggcgggagctggcccctggcctgcacctgcggggcatcagagatgctgggggccgctactgccaggagcaggacctgtgctgccggggccgggcagatgactgtgccctgccctacctgggcgccatctgctactgtgacctcttctgcaacagaacagtgtctgactgctgcccagacttctgggacttctgcctgggcgtgcccccacccttcccccccatccagggctgcatgcatggaggccgcatctaccctgtgctgggcacctactgggacaactgcaaccgctggccacccctggagtgctgggacctgctgcccccagccctgcccggccctgtgtgggccgccctgggcgccaaggaggagatggccggcaaggacagaacagtgtactgccccctgctgatgaaggccctgggcgcccgggtgggggagtgccccggctgccagagcccccagaggatgctgcctgagagcagccgggtgctgctgccccgctgtgccgagggggagcagcccggggtgcagaggggcaagggccgcatgaggaaggccttccctgccctgcagacccccctggccctgcccagcagcgccccagccagccctggggccggcaagcccagccacacaggctcctggctgcccctgcggctgctgaagaggcagcactggcgctgggagccctggacagcctgcaaggaggccgtgcagcacctggtgatcacagagctgtag

SEQ ID NO: 8018 - DNA, 438 bp, synthetic construct
  misc_feature 1..438: note = source = /note="Description of Artificial Sequence: Synthetic coding sequence"
  source 1..438: mol_type = other DNA
atggcccagctgttcctgcccctgctggccgccctggtgctggcccaggccccagctgccctggctgatgtgctggagggggacagcagtgaagatcgggccttccgggtgagaattgctggagatgcccccctgcagggcgtgctgggcggggccctgaccatcccctgccacgtgcactacctgcggcccccacccagccggcgggctgtgctgggcagcccccgggtgaagtggaccttcctgagccggggccgggaggccgaggtgctggtggcccggggcgtgcgggtgaaggtgaatgaggcctaccgcttccgggtggccctgcctgcctacccagccagcctgacagatgtgtccctggccctgtctgagctgcggcccaatgacagcggcatctaccgctgtgaggtgcagcacggcattgatgactag

SEQ ID NO: 8019 - DNA, 567 bp, synthetic construct; identical to SEQ ID NO: 7502
  misc_feature 1..567: note = source = /note="Description of Artificial Sequence: Synthetic coding sequence"
  source 1..567: mol_type = other DNA

SEQ ID NO: 8020 - DNA, 558 bp, synthetic construct
  misc_feature 1..558: note = source = /note="Description of Artificial Sequence: Synthetic coding sequence"
  source 1..558: mol_type = other DNA
atgggccctgctggctgtgccttcaccctgctgctgctgctgggcatcagtgaccgggactaccacagcgccctgcaggaggccgaggtgcccatcatcgaccggcaggcctgtgagcagctgtacaaccccatcggcatcttcctgcctgccctggagcccgtcatcaaggaggacaagatctgtgccggggacacccagaacatgaaggacagctgcaagggggacagcggcggccccctgagctgccacattgatggagtgtggatccagacaggagtggtgtcctggggcctggagtgtgggaagagcctgcccggggtgtacaccaacgtcatctactaccagaagtggatcaatgccaccatcagccgggccaacaacctggacttcagtgacttcctgttccccatcgtgctgctgagcctggccctgctgcggcccagctgtgccttcggccccaacaccatccaccgggtgggcaccgtggccgaggccgtggcctgcatccagggctgggaggagaatgcctggaggttcagcccccggggccgctag

SEQ ID NO: 8021 - DNA, 1653 bp, synthetic construct
  misc_feature 1..1653: note = source = /note="Description of Artificial Sequence: Synthetic coding sequence"
  source 1..1653: mol_type = other DNA
ccagccccagccagcaggaagctgctgcccaggaggcacctgtctgagaagagccaccacatcagcatccccagcccagacatcagccacaagggcctgcggagcaagaggacccagcccagcgaccctgagacctgggagagcctgccccggctggacagccagagacatggaggccctgagttctcctttgacctgctgcctgaggcccgggccatccgggtgaccatcagcagcggccctgaggtgtctgtgcggctgtgccaccagtgggccctggagtgtgaggagctgagcagcccctatgatgtgcagaagatcgtgtctgggggccacacagtggagctgccctatgagttcctgctgccctgcctgtgcatcgaggccagctacctgcaggaggacacagtgcggaggaagaagtgccccttccagagctggccagaggcctacggcagtgacttctggaagtctgtgcacttcacagactacagccagcacacccagatggtgatggccctgaccctgcgctgccccctgaagctggaggccgccctgtgccagagacatgactggcacaccctgtgcaaggacctgcccaatgccacagcccgggagagtgatggctggtacgtgctggagaaggtggacctgcacccccagctgtgcttcaagttctcctttggaaacagcagccacgtggagtgcccccaccagacaggcagcctgacctcctggaatgtgtccatggacacccaggcccagcagctgatcctgcacttcagcagcaggatgcacgccaccttctctgctgcctggagcctgcccggcctgggccaggacaccctggtgccccctgtgtacacagtgtcccaggcccggggcagcagccctgtgtccctggacctgatcatccccttcctgcggcccggctgctgcgtgctggtgtggaggagtgatgtgcagtttgcctggaagcacctgctgtgcccagatgtgtcctaccgccacctgggcctgctgatcctggccctgctggccctgctgaccctgctgggcgtggtgctggccctgacctgcagaagaccccagagcggccctggccctgcccggcctgtgctgctgctgcacgccgctgacagcgaggcccagaggcggctggtgggcgccctggccgagctgctgcgggccgccctgggcggcggcagagatgtgattgtggacctgtgggagggccgccacgtggcccgggtgggccccctgccctggctgtgggccgcccggaccagggtggcccgggagcagggcaccgtgctgctgctgtggagcggggctgacctgcggcctgtgtctggccctgaccccagggctgcccccctgctggccctgctgcacgccgccccccggcccctgctgctgctggcctacttcagccggctgtgtgccaagggggacatccccccacccctgcgggccctgccccgctaccgcctgctgcgggacctgccccggctgctgcgggccctggatgcccggccctttgctgaggccacctcctggggccgcctgggcgcccggcagaggcggcagagccggctggagctgtgcagccggctggagcgggaggccgcccggctggccgacctgggctag

SEQ ID NO: 8022 - DNA, 816 bp, synthetic construct
  misc_feature 1..816: note = source = /note="Description of Artificial Sequence: Synthetic coding sequence"
  source 1..816: mol_type = other DNA
atgggcatcgtgtgtgcccagtgcagcttcatcctgctgctgagcatcatccgggcccggcccccacccttcctgttctgccccctgagcagccagaggacagagagcccctacaagcctgtgcacctgggcctgggccccacagacaaggtggccgccatcgccatggcccgcatcatcgacctggtgccctgggatgatggcagcacccacgtgtatgccagccctgccatcctgctgcccatggagcggcagaggaaccagctggccggcgtgaagcagcagctgtaccacccagccctgcccaccctgcggcacatggaccgggacacagtgaaggcctgcctgcctgatgagcactgccagagcaccacctactgcaggaaggatgaatttgacaatgcccacttcaccctgctgggcgtgcccaacaagcccctgcagtgcctggacatcacagccaccggccagaagctgaggaaccgctaccacgagggcaagctggcccccatcgcccctggcatcaacagagtggactggccctgcttcacccgggccatcgaggactggagccactttgtgagcagcgctggggagttcaagctgccctgcctgaggaagagagctgagggcctgagcggctatgctgtgcgctacctgaagccagatgtgacccagacctggagatactgcctgagccagaaccccagcctggacagatatggccagaagcccctgccctttgacagcctgaacaccttccgcagctttggcagcagctacagccgggtgaactacctgaccccctggcactag

SEQ ID NO: 8023 - DNA, 1743 bp, synthetic construct; identical to SEQ ID NO: 7266
  misc_feature 1..1743: note = source = /note="Description of Artificial Sequence: Synthetic coding sequence"
  source 1..1743: mol_type = other DNA

SEQ ID NO: 8024 - DNA, 513 bp, synthetic construct
  misc_feature 1..513: note = source = /note="Description of Artificial Sequence: Synthetic coding sequence"
  source 1..513: mol_type = other DNA
atggagtttgtggatgtgacagagagcaatgcccgctgggtgcaggacttccggctgaaggcctatgccagccctgccaagctggagagcattgatggagcccgctaccacgccctgctgatccccagctgccctggggccctgacagacctggccagcagcggcagcctggcccgcatcctgcagcacttccacagcgagagcaagcccatctgtgctgtgggccacggcgtggccgccctgtgctgtgccaccaatgaagatcgctcctgggtgtttgacagctacagcctgaccggccccagcgtgtgtgagctggtgcgggcccctggctttgcccggctgcccctggtggtggaggactttgtgaaggacagcggggcctgcttcagcgccagcgagccagatgctgtgcacgtggtgctggacagacacctggtgacaggccagaatgccagcagcacagtgcctgctgtgcagaacctgctcttcctgtgtggcagcaggaagtag

SEQ ID NO: 8025 - DNA, 1041 bp, synthetic construct
  misc_feature 1..1041: note = source = /note="Description of Artificial Sequence: Synthetic coding sequence"
  source 1..1041: mol_type = other DNA
atgaggctgctcttcctggccgtgctgcggccccacactggaaatgctgtgacagcccagagggtgcgggcccacctggaggccgccggccacgtgtgtgtgctgaaggatgcctttgattttgagagccgctcagaaattgccaacctgatcctggccgagaactgtgaggccgccctggccctgcacctgtacagaggaggccgcctgctgcagggccaccgcatcccctttggagtcatctttggaggaacagatgtgaatgaagatgccaaccaggccgagaagaacacagtgatgggccgggtgctggaggaggccaggtttgctgtggccttcacagagagcatgaaggagatggcccaggcccagtggccccacgccaagggcaaggtgtatgtgcagagccagggcatcgccaccaccccaaatgctgccttcaactggaacaccttcctgcagaggtctgagatcaaccagagcgctgacaacctgcacatcttcctgctgatctgtggcctgcggcaggtgaaggaccccctgtacctggtggatgccttcagcgcctggcaccaggaggagcccaacgtgcacctggtgattgtgggccctgaggtggaccccgtcttcacccgggaggtgaaggccaaggtgaagagagctgctggggtgcggctgattggagagatgccccaggaggacctgcatgctgtggtgaagaactgctttgctgtggtgaacagctctgtgtctgagggcatgtctgctgccatcctggaggccatggacctggaggtgcctgtgctggccaggaacatccctggaaatgctgctgtggtgaagcatgaggtgacaggcctgctcttcagcaacccccaggagtttgtgcacctggccaagaggctggtgtctgaccctgccctggagaaggagatcgtggtgaatggccgggagtatgtgaggatgtaccacagctggcaggtggagcgggacacctaccagcagctgatcaggaagctggagggcagcacagaagattag

SEQ ID NO: 8026 - DNA, 1482 bp, synthetic construct; identical to SEQ ID NO: 7826
  misc_feature 1..1482: note = source = /note="Description of Artificial Sequence: Synthetic coding sequence"
  source 1..1482: mol_type = other DNA

SEQ ID NO: 8027 - DNA, 354 bp, synthetic construct
  misc_feature 1..354: note = source = /note="Description of Artificial Sequence: Synthetic coding sequence"
  source 1..354: mol_type = other DNA
atgctgatcttctggaccatcaccctcttcctgctgggcgccgccaagggcaaggaggtgtgctatgaggacctgggctgcttcagtgacacagagccctggggcggcacagccatccggcccctgaagatcctgccctggagccctgagaagattggcacccgcttcctgctgtacaccaatgaaaaccccaacaacttccagatcctgctgctgagtgaccccagcaccatcgaggccagcaacttccagatggacaggaagacccgcttcatcatccacggcttcatcgacaagggagatgagagctgggtgacagacatgtgcaagccaggggccagcccccgggcctag

SEQ ID NO: 8028 - DNA, 1581 bp, synthetic construct
  misc_feature 1..1581: note = source = /note="Description of Artificial Sequence: Synthetic coding sequence"
  source 1..1581: mol_type = other DNA
atgcagggccccctgctgctgcccggcctgtgcttcctgctgagcctgtttggagctgtgacccagaagaccaagaccagctgtgccaagtgccccccaaatgccagctgtgtgaacaacacccactgcacctgcaaccacggctacaccagcggcagcggccagaagctgttcaccttccccctggagacctgcaatgccatcgagacccaggccatcacagacaactgcagcgaggagaggaagaccttcaacctgaatgtgcagatgaacagcatggacatccgctgcagcgacatcatccagggcgacacccagggccccagcgccatcgccttcatctcctacagcagcctgggcaacatcatcaatgccaccttctttgaggagatggacaagaaggaccaggtgtacctgaacagccaggtggtgtctgctgccatcggccccaagagaaatgtgtccctgagcaagtctgtgaccctgaccttccagcacgtgaagatgacccccagcaccaagaaggtgttctgtgtgtactggaagagcacaggccagggcagccagtggagcagagatggctgcttcctgattcatgtgaacaagagccacaccatgtgcaactgcagccacctgagcagctttgctgtgctgatggccctgaccagccaggaggaggaccctgtgctgaccgtcatcacctacgtgggcctgtctgtgtccctgctgtgcctgctgctggccgccctgaccttcctgctgtgcaaggccatccggaacaccagcaccagcctgcacctgcagctgagcctgtgcctcttcctggcccacctgctcttcctggtgggcatcgacagaacagagcccaaggtgctgtgcagcatcatcgccggggccctgcactacctgtacctggccgccttcacctggatgctgctggagggcgtgcacctgttcctgacagccaggaacctgactgtggtgaactacagcagcatcaaccggctgatgaagtggatcatgtttcctgtgggctacggcgtgcctgctgtgacagtggccatctctgctgcctcctggccccacctgtatggaacagctgaccgctgctggctgcacctggaccagggcttcatgtggagcttcctgggccctgtgtgtgccatcttcagcgccaacctggtgctcttcatcctggtgttctggatcctgaagaggaagctgagcagcctgaacagcgaggtgtccaccatccagaacaccaggatgctggccttcaaggccacagcccagctgttcatcctgggctgcacctggtgcctgggcctgctgcaggtgggccctgctgcccaggtgatggcctacctgttcaccatcatcaacagcctgcagggcttcttcatcttcctggtgtactgcctgctgagccagcaggtgcagaagcagtaccagaagtggttccgggagatcgtgaagagcaagtctgagagcgagacctacaccctgagcagcaagatgggccctgacagcaagcccagtgaaggagatgtgtttcctggccaggtgaagaggaagtactag

SEQ ID NO: 8029 - DNA, 5832 bp, synthetic construct
  misc_feature 1..5832: note = source = /note="Description of Artificial Sequence: Synthetic coding sequence"
  source 1..5832: mol_type = other DNA
tgacccagcctggccggcagaggagctggccgcatggcccctggggccctgcggggcggctgtgagcagagggcccctgggggcggggccaggacagctgccctgggcccctggccctggcccagccctggccctgcccccagccctggagctgccccacccaggagcaggaagatgtctggggccctgctgtggcccctgctgcccctgctgctgctgctgctgagcgccagagatggagtgcgggccgcccagccccaggcccctggctacctgattgctgcccccagcgtcttccgggccggcgtggaggaggtgatctctgtgaccatcttcaacagcccccgggaggtgacagtgcaggcccagctggtggcccagggcgagcctgtggtgcagagccagggcgccatcctggacaagggcaccatcaagctgaaggtgcccaccggcctgcggggccaggccctgctgaaggtgtggggccggggctggcaggccgaggagggccccctcttccacaaccagacctctgtgacagtggatggccgcggggcctctgtgttcatccagacagacaagcctgtgtaccggccccagcaccgggtgctgatcagcatcttcaccgtgagccccaacctgcggcctgtgaatgagaagctggaggcctacatcctggacccccggggcagcaggatgattgagtggaggcacctgaagcccttctgctgcggcatcaccaacatgtccttccccctgagtgaccagcctgtgctgggggagtggttcatctttgtggagatgcagggccacgcctacaacaagagctttgaggtgcagaagtatgtgctgcccaagtttgagctgctgattgatcctccccgctacatccaggacctggatgcctgtgaaacaggaacagtgcgggcccgctacaccttcggcaagcctgtggccggggccctgatgatcaacatgacagtgaatggagtgggctactacagccatgaggtgggccggcctgtgctgcggaccaccaagatcctgggcagccgggactttgacatctgtgtgcgggacatgatcccagcagatgtgcctgagcacttccggggccgggtgtccatctgggccatggtgacctctgtggatggcagccagcaggtggcctttgatgacagcacccctgtgcagaggcagctggtggacatccgctacagcaaggacaccaggaagcagttcaagccaggcctggcctacgtgggcaaggtggagctgagctacccagatggcagccctgctgagggcgtgacagtgcagatcaaggccgagctgacccccaaggacaacatctacaccagcgaggtggtgtcccagaggggcctggtgggctttgagatccccagcatccccaccagcgcccagcacgtgtggctggagaccaaggtgatggccctgaatggcaagcctgtgggcgcccagtacctgcccagctacctgagcctgggctcctggtacagccccagccagtgctacctgcagctgcagccccccagccaccccctgcaggtgggggaggaggcctacttctctgtgaagagcacctgcccctgcaacttcaccctgtactatgaggtggccgcccggggcaacatcgtgctgagcggccagcagcctgcccacaccacccagcagaggagcaagagagctgccccagccctggagaagcccatccggctgacccacctgtctgaaacagagcccccaccagcccctgaggccgaggtggatgtgtgtgtgaccagcctgcacctggccgtgacccccagcatggtgcccctgggccgcctgctggtgttctacgtgcgggagaatggagagggcgtggccgacagcctgcagtttgctgtggagaccttctttgagaaccaggtgtctgtgacctacagcgccaatgagacccagcccggggaggtggtggacctgcgcatccgggccgcccggggcagctgtgtgtgtgtggccgctgtggacaagtctgtgtacctgctgcggagcggcttccggctgaccccagcccaggtgttccaggagctggaggactatgatgtgtctgacagctttggagtgtccagagaagatggccccttctggtgggccggcctgacagcccagaggagaagaagaagctctgtgttcccctggccctggggcatcaccaaggacagcggctttgccttcacagagaccggcctggtggtgatgacagacagagtgtccctgaaccaccggcaggacggcggcctgtacacagatgaggccgtgcctgccttccagccccacacaggcagcctggtggccgtggcccccagccgccacccccccaggacagagaagaggaagaggaccttcttccctgagacctggatctggcactgcctgaacatcagtgaccccagcggggagggcaccctgtctgtgaaggtgcctgacagcatcacctcctgggtgggggaggccgtggccctgagcaccagccagggcctgggcattgctgagcccagcctgctgaagaccttcaagcccttctttgtggacttcatgctgcctgccctgatcatccggggggagcaggtgaagatccccctgtctgtgtacaactacatgggcacctgtgccgaggtgtacatgaagctgtctgtgcccaagggcatccagtttgtgggccaccctgggaagagacatgtgaccaagaagatgtgtgtggcccctggagaggccgagcccatctgggtggtgctgtccttcagtgacctgggcctgaacaacatcacagccaaggccctggcctatggagacaccaactgctgcagagatggccgcagcagcaagcaccctgaggagaaccacgccgacagaagagtgcccatcggcgtggaccacgtgagaagatctgtgatggtggaggccgagggcgtgccccgggcctacacctacagcgccttcttctgccccagcgagcgggtgcacatcagcacccccaacaagtatgagttccagtatgtgcagaggcccctgcggctgaccaggtttgatgtggccgtgcgggcccacaatgatgcccgggtggccctgagcagcggcccccaggacacagctggcatgattgagatcgtgctgggcggccaccagaacaccaggtcctggatcagcaccagcaagatgggagagcctgtggccagcgcccacacagccaagatcctgtcctgggatgagttccgcaccttctggatctcctggaggggcggcctcatccaggtgggccacggccctgagcccagcaatgaatctgtgattgtggcctggaccctgcccaggcctcctgaggtgcagttcatcggcttcagcacaggctggggctccatgggagagttccgcatctggaggaagatggaggtggatgagagctacagcgaggccttcaccctgggcgtgccccatggagccatccctggcagcgagcgggccacagccagcatcattggagatgtgatgggccccaccctgaaccacctgaacaacctgctgcggctgcccttcggctgtggggagcagaacatgatccactttgccccaaatgtgtttgtgctgaagtacctgcagaagacccagcagctgagccctgaggtggagcgggagaccacagactacctggtgcagggctaccagaggcagctgacctacaagaggcaggacggcagctacagcgccttcggggagagagatgccagcggctccatgtggctgacagcctttgtgctgaagagctttgcccaggcccggagcttcatctttgtggacccccgggagctggccgccgccaagtcctggatcatccagcagcagcaggctgatggcagcttcctggccgtgggccgggtgctgaacaaggacatccagggcggcatccacggcaccgtgcccctgacagcctacgtggtggtggccctgctggagaccggcacagccagcgaggaggagcggggcagcacagacaaggcccggcacttcctggagagcgctgcccccctggccatggacccctacagctgtgccctgaccacctacgccctgaccctgctgcggagccctgctgcccctgaggccctgaggaagctgcggagcctggccatcatgagagatggagtgacccactggagcctgagcaacagctgggatgtggacaagggcaccttcctgtccttcagtgacagagtgtcccagagcgtggtgtctgctgaggtggagatgacagcctatgccctgctgacctacaccctgctgggagatgtggccgccgccctgcctgtggtgaagtggctgagccagcagagaaatgccctgggcggcttcagcagcacccaggacacctgtgtggccctgcaggccctggccgagtatgccatcctgtcctatgccggcggcatcaacctgactgtgtccctggccagcaccaacctggactaccaggagacctttgagctgcacaggaccaaccagaaggtgctgcagacagctgccatccccagcctgcccaccggcctgtttgtgtctgccaagggagatggctgctgcctgatgcagattgatgtgacctacaacgtgcctgaccctgtggccaagccagccttccagctgctggtgtccctgcaggagcctgaggcccagggccggcccccacccatgcctgccagcgctgctgagggcagcagaggagactggcccccagcagatgatgatgatcctgctgctgaccagcaccaccaggagtacaaggtgatgctggaggtgtgcacccgctggctgcacgccggcagcagcaacatggctgtgctggaggtgcccctgctgagcggcttccgggctgacatcgagagcctggagcagctgctgctggacaagcacatgggcatgaagagatatgaggtggccggccggcgggtgctcttctactttgatgagatccccagccgctgcctgacctgtgtgcgcttccgggccctgcgggagtgtgtggtgggccgcaccagcgccctgcctgtgtctgtgtatgactactatgagcccgcctttgaggccacccgcttctacaacgtgtccacccacagccccctggcccgggagctgtgtgccggccctgcctgcaatgaggtggagcgggccccagcccggggccctggctggttccctggagagagcggccctgctgtggcccctgaggagggcgccgccatcgcccgctgtggctgtgaccatgactgtggggcccagggcaaccctgtgtgtggcagtgatggagtggtgtatgccagcgcctgccgcctgcgggaggccgcctgccggcaggccgcccccctggagcccgccccacccagctgctgtgccctggagcagaggctgcctgccagcagcagcagcacctatggagatgacctggcctctgtggcccctggccccctgcagcaggatgtgaagctgaatggagctggcctggaggtggaggacagcgaccctgagcctgagggggaggctgaagatagagtgacagctggcccccggccccctgtgagcagcggcaacctggagagcagcacccagagcgccagccccttccaccgctggggccagaccccagccccccagaggcacagcggccgggtggtgggcgcccacaggcctggcctgctgagccctgtgtttgtgtacagccctgccttccagagcggcggggaggagggcctgtggatgagcaacacctgcaccctgaggtag

SEQ ID NO: 8030 - DNA, 456 bp, synthetic construct
  misc_feature 1..456: note = source = /note="Description of Artificial Sequence: Synthetic coding sequence"
  source 1..456: mol_type = other DNA
atggaggccaccggcacagatgaggtggacaagctgaagaccaagttcatcagcgcctggaacaacatgaagtacagctgggtgctgaagaccaagacctacttcagcaggaacagccctgtgctgctgctgggcaagtgctaccacttcaagtatgaagatgaggacaagaccctgcctgctgagagcggctgcaccatcgaggaccacgtgattgctggaaatgtggaggagttcaggaaggacttcatcagccgcatctggctgacctaccgggaggagttcccccagatcgagggcagcgccctgaccacagactgtggctggggctgcaccctgaggacaggccagatgctgctggcccagggcctcatcctgcacttcctgggccgggcctggacctggccagatgccctgaacatcgagaacagcgacagcgagagctggaccagctag

SEQ ID NO: 8031 - DNA, 2616 bp, synthetic construct
  misc_feature 1..2616: note = source = /note="Description of Artificial Sequence: Synthetic coding sequence"
  source 1..2616: mol_type = other DNA
atgaggaagcccaggaggaagagccggcagaatgctgagggcagaagaagccccagcccctacagcctgaagtgcagccccacccgggagaccctgacctacgcccaggcccagagaattgtggaggtggacattgatggccgcctgcaccgcatcagcatctatgaccccctgaagatcatcacagaagatgagctgacagcccaggacatcacagagtgcaacagcaacaaggaaaattctgagcagccccagtttcctgggaagagcaagaagcccagcagcaagggcaagaagaaggagagctgcagcaagcacgccagcggcaccagcttccacctgccccagcccagcttcaggatggtggacagcggcatccagcctgaggccccacccctgcctgctgcctactaccgctacatcgagaagcccccagaggacctggatgctgaggtggagtatgacatggatgaggaggacctggcctggctggacatggtgaatgagaagagaagagtggatggccacagcctggtgtctgctgacacctttgagctgctggtggaccggctggagaaggagagctacctggagagccgcagcagcggggcccagcagagcctgattgatgaagatgccttctgctgcgtgtgcctggatgatgagtgccacaacagcaatgtcatcctcttctgtgacatctgcaacctggccgtgcaccaggagtgctacggcgtgccctacatccctgagggccagtggctgtgccgctgctgcctgcagagccccagcaggcctgtggactgcatcctgtgccccaacaagggcggggccttcaagcagaccagtgatggccactgggcccacgtggtgtgtgccatctggatccctgaggtgtgctttgccaacacagtgttcctggagcccatcgagggcatcgacaacatccccccagcccgctggaagctgacctgctacatctgcaagcagaagggcctgggcgccgccatccagtgccacaaggtgaactgctacacagccttccacgtgacctgtgcccagagagctggcctcttcatgaagattgagcccatgagggagaccagcctgaatggcaccatcttcaccgtgaggaagacagcctactgtgaggcccacagccccccaggagctgccacagcccggaggaaaggagacagccccaggagcatcagcgagactggagatgaggagggcctgaaggagggagatggagaggaggaggaggaggaggaggtggaggaggaggagcaggaggcccagggcggcgtgtctggcagcctgaagggcgtgcccaagaagagcaagatgagcctgaagcagaagatcaagaaggagcctgaggaggccggccaggacacccccagcaccctgcccatgctggccgtgccccagatccccagctaccgcctgaacaagatctgcagcggcctgtccttccagaggaagaaccagttcatgcagaggctgcacaactactggctgctgaagaggcaggccagaaatggagtgcccctcatccggcggctgcacagccacctgcagagccagagaaatgctgagcagcgggagcaggatgagaagaccagcgctgtgaaggaggagctgaagtactggcagaagctgcggcatgacctggagcgggcccggctgctgattgagctgatcaggaagcgggagaagctgaagcgggagcaggtgaaggtgcagcaggccgccatggagctggagctgatgcccttcaacgtgctgctgcggaccaccctggacctgctgcaggagaaggaccctgcccacatctttgctgagcctgtgaacctgtctgaggtgcctgactacctggagttcatcagcaagcccatggacttcagcaccatgaggaggaagctggagagccacctgtaccgcaccctggaggagtttgaggaggacttcaacctgattgtgaccaactgcatgaagtacaatgccaaggacaccatcttccacagagctgctgtgcggctgcgggacctgggcggggccatcctgcggcatgcccggcggcaggccgagaacatcggctatgaccctgagcggggcacccacctgcctgagagccccaagctggaggacttctaccgcttctcctgggaggatggccgcagcctgctgctgccctttgaagatagaggagacctggagcccctggagctggtgtgggccaagtgccggggctaccccagctacccagccctgatcatcgaccccaagatgccccgggagggcctgctgcacaatggagtgcccatccctgtgccccccctggatgtgctgaagctgggggagcagaagcaggccgaggccggggagaagctgttcctggtgctcttctttgacaacaagaggacctggcagtggctgccccgggacaaggtgctgcccctgggcgtggaggacacagtggacaagctgaagatgctggagggcaggaagaccagcatcaggaagtctgtgcaggtggcctatgaccgggccatgatccacctgagccgggtgcggggcccccacagctttgtgaccagcagctacctgtag

SEQ ID NO: 8032 - DNA, 2700 bp, synthetic construct; identical to SEQ ID NO: 7525
  misc_feature 1..2700: note = source = /note="Description of Artificial Sequence: Synthetic coding sequence"
  source 1..2700: mol_type = other DNA

SEQ ID NO: 8033 - DNA, 537 bp, synthetic construct
  misc_feature 1..537: note = source = /note="Description of Artificial Sequence: Synthetic coding sequence"
  source 1..537: mol_type = other DNA
atggagaccttccccctgctgctgctgagcctgggcctggtgctggccgaggccagcgagagcaccatgaagatcatcaaggaggagttcacagatgaggagatgcagtatgacatggccaagagcggccaggagaagcagaccatcgagatcctgatgaaccccatcctgctggtgaagaacaccagcctgtccatgagcaaggatgacatgagcagcaccctgctgaccttccgcagcctgcactacaatgaccccaagggcaacagcagtggaaatgacaaggagtgctgcaatgacatgacagtgtggaggaaggtgtctgaggccaacggcagctgcaagtggagcaacaacttcatccgcagcagcacagaggtgatgagaagagtgcaccgggcccccagctgcaagtttgtgcagaaccctggcatcagctgctgtgagagcctggagctggagaacacagtgtgccagttcaccaccgggaagcagttcccccgctgccagtaccacagcgtgaccagcctggagtag

SEQ ID NO: 8034 - DNA, 2184 bp, synthetic construct
  misc_feature 1..2184: note = source = /note="Description of Artificial Sequence: Synthetic coding sequence"
  source 1..2184: mol_type = other DNA
atgatcctgagcctgctcttcagcctgggcggccccctgggctggggcctgctgggcgcctgggcccaggccagcagcaccagcctgagtgacctgcagagcagcaggaccccaggagtgtggaaggccgaggccgaggacaccgggaaggaccctgtgggcaggaactggtgcccctaccccatgagcaagctggtgaccctgctggccctgtgcaagacagagaagttcctgatccacagccagcagccctgcccccagggcgccccagactgccagaaggtgaaggtgatgtacaggatggcccacaagcctgtgtaccaggtgaagcagaaggtgctgaccagcctggcctggcgctgctgccccggctacacaggccccaactgtgagcaccacggccccatggctgtgtggtgctggccagagccagacagcctgcaggcccggctgggccagctgcagaggaacctgtctgagctgcacatgaccacagcccggcgggaggaggagctgcagtacaccctggaggacatgagggccaccctgaccaggcatgtggatgagatcaaggagctgtacagcgagagtgatgagacctttgaccagatcagcaaggtggagcggcaggtggaggagctgcaggtgaaccacacagccctgcgggagctgcgggtcatcctgatggagaagagcctcatcatggaggagaacaaggaggaggtggagcggcagctgctggagctgaacctgaccctgcagcacctgcagggcggccatgctgacctgatcaagtatgtgaaggactgcaactgccagaagctgtacctggacctggatgtgatccgggagggccagagagatgccacccgggccctggaggagacccaggtgtccctggatgaaagacggcagctggatggcagcagcctgcaggccctgcagaatgctgtggatgctgtgtccctggccgtggatgcccacaaggccgagggggagcgggcccgggccgccaccagccggctgcggagccaggtgcaggccctggatgatgaggtgggcgccctgaaggctgctgctgctgaggcccggcatgaggtgcggcagctgcacagcgcctttgctgccctgctggaggatgccctgcggcatgaggccgtgctggccgccctgtttggagaggaggtgctggaggagatgtctgagcagaccccaggccccctgcccctgtcctatgagcagatccgggtggccctgcaggatgctgccagcggcctgcaggagcaggccctgggctgggatgagctggccgcccgggtgacagccctggagcaggccagcgagccccccaggcctgctgagcacctggagcccagccatgatgctggccgggaggaggccgccaccacagccctggccggcctggcccgggagctgcagagcctgagcaatgatgtgaagaatgtgggccgctgctgtgaggccgaggccggggccggggccgccagcctgaatgccagcctgcacggcctgcacaatgccctgtttgccacccagaggagcctggagcagcaccagaggctcttccacagcctgtttggaaacttccagggcctgatggaggccaacgtgtccctggacctgggcaagctgcagaccatgctgagcaggaagggcaagaagcagcagaaggacctggaggcccccaggaagagggacaagaaggaggccgagcccctggtggacatccgggtgacaggccctgtgcctggggccctgggcgccgccctgtgggaggccggcagccctgtggccttctacgccagcttcagcgagggcacagctgccctgcagacagtgaagttcaacaccacctacatcaacatcggcagcagctacttccctgagcacggctacttccgggcccctgagcggggcgtgtacctgtttgctgtgtctgtggagtttggacctggccctggcaccggccagctggtgtttggaggccaccacaggacccctgtgtgcaccaccggccagggcagcggcagcacagccaccgtgtttgccatggccgagctgcagaagggggagcgggtgtggtttgagctgacccagggcagcatcaccaagaggagcctgtctggaacagcctttggaggcttcctgatgttcaagacctag

SEQ ID NO: 8035 - DNA, 828 bp, synthetic construct
  misc_feature 1..828: note = source = /note="Description of Artificial Sequence: Synthetic coding sequence"
  source 1..828: mol_type = other DNA
atgggcagcgccccctgggcccctgtgctgctgctggccctgggcctgcggggcctgcaggccggcggggagtggaggcggcccccagcccacagccctgtgcctgccccacccctgcgctttgccagcccccacagcccccagggccctggcccccggctgcccggggccctgctgcctgctgccagcggccccctgcagctgcgggccctgcggcagcaggacctgcccagcgccctgcccggggtgggccaggtgctgggccctggccgcggggcccacctgctgctgcactgggagcggggcagaagagtgggcctgcggcagcagctgggcctgcggagaggagctgggggccgggccggcggcagcacaggcctgcggggggcccccctgctgcgggaggtggccgctgtgcgctgtgctgtgcatgctgcccgggcccatggagctgctgatggaggagctggccctggccgcctgcggcgggccgccccccgggccaccacccggccccggggccctggctgccccaggcaccggctgcgctggaagctgtggggagatgcccagtgcctgcctgaagatgaggtgagccccccaggcggcggcggggccggcggccagagggcccggagcagctgtggccggccccggcggctgcagcctgtgctgcccggcagacatggaggcagcctgcggcacggccccctgggcgtgcgccacctgcctgctgctgtgcggcgggagggccctgaccctgccctgcacgtgcggccagaatgtctgcaccgggccggccatgatggcctgcccctgccccactag

SEQ ID NO: 8036 - DNA, 351 bp, synthetic construct; identical to SEQ ID NO: 7504
  misc_feature 1..351: note = source = /note="Description of Artificial Sequence: Synthetic coding sequence"
  source 1..351: mol_type = other DNA

SEQ ID NO: 8037 - DNA, 522 bp, synthetic construct; identical to SEQ ID NO: 7221
  misc_feature 1..522: note = source = /note="Description of Artificial Sequence: Synthetic coding sequence"
  source 1..522: mol_type = other DNA

SEQ ID NO: 8038 - DNA, 1482 bp, synthetic construct
  misc_feature 1..1482: note = source = /note="Description of Artificial Sequence: Synthetic coding sequence"
  source 1..1482: mol_type = other DNA
tctgaggccgtgtacctgaatgacagcacctatgatggccacacagtgggcggcctgcagtatggaggcctgggccagctggctgatggagtggtgggcctggatgacttcaggaagagccaggagctgcgggtgtggccaggctatgactatgtgggctggagcaaccacagcttcagcagcggctacgtggagatggagtttgaatttgaccggctgcgggccttccaggccatgcaggtgcactgcaacaacatgcacaccctgggcgcccggctgcccggcggcgtggagtgccgcttccggcggggccctgccatggcctgggagggggagcccatgaggcacaacctgggcggcaacctgggggacccccgggcccgggctgtgtctgtgcccctgggcggccgggtggcccgcttcctgcagtgccgcttcctgtttgctggcccctggctgctcttcagcgagatctccttcatcagtgatgtggtgaacaacagcagccctgccctgggcggcaccttccccccagccccctggtggcccccaggccccccacccaccaacttcagcagcctggagctggagccccggggccagcagcctgtggccaaggccgagggcagccccacagccatcctgattggctgcctggtggccatcatcctgctgctgctgctgatcatcgccctgatgctgtggaggctgcactggaggcggctgctgagcaaggtgctggagagccaccccaggaccaggagccctggcctggtgggcatccggcccaccctgctgcctgtgagccccatggccctgcgctgctgcagccccatccagcccacagccagcttctggcccctgacccctgtgcccctggaggcccgggccccaccccaccccccaggccccaacccccccaccccccggggcgtgactggaggcaacacctatgctgtgcctgccctgcccccaggagctgtgggagatggccccccccgggtggacttccccaggagccggctgcgcttcaaggagaagctgggggagggccagtttggagaggtgcacctgtgtgaggtggacagcccccaggacctggtgtccctggacttccccctgaatgtgaggaagggccaccccctgctggtggccgtgaagatcctgcggccagatgccaccaagaatgccagaaatgacttcctgaaggaggtgaagatcatgagccggctgaaggaccccaacatcatccggctgctgggcgtgtgtgtgcaggatgaccccctgtgcatgatcacagactacatggagaatggagacctgaaccagttcctgagcgcccaccagctggaggacaaggctgctgagggcgcccctggagatggccaggccgcccagggccccaccatctcctaccccatgctgctgcacgtggccgcccagatcgccagcggcatgagatacctggccaccctgaactag

SEQ ID NO: 8039 - DNA, 639 bp, synthetic construct
  misc_feature 1..639: note = source = /note="Description of Artificial Sequence: Synthetic coding sequence"
  source 1..639: mol_type = other DNA
atgggcctgcacctgcggccctacagagtgggcctgctgcctgatggcctgctcttcctgctgctgctgctgatgctgctggccgaccctgccctgcctgctggccgccacccccctgtggtgctgggggacaacaaccgcatccctgtgattggccccctgaagatccgggagcagcagaggtctgctgtgtccacctcctggctgctgccctacaactacacctggagccctgagaaggtgtttgtgcagacccccaccatcaactacaccctgcgggactacaggaagttcttccaggacatcggctttgaagatggctggctgatgaggcaggacacagagggcctggtggaggccaccatgcctcctggggtgcagctgcactgcctgtatggcaccggggtgcccaccccagacagcttctactatgagagcttcccagaccgggaccccaagatctgctttggagatggagatggcaccgtgaacctgaagagcgccctgcagtgccaggcctggcagagccggcaggagcaccaggtgctgctgcaggagctgcccggcagcgagcacatcgagatgctggccaatgccaccaccctggcctacctgaagagggtgctgctgggcccctag

SEQ ID NO: 8040 - DNA, 654 bp, synthetic construct
  misc_feature 1..654: note = source = /note="Description of Artificial Sequence: Synthetic coding sequence"
  source 1..654: mol_type = other DNA
atgtctgacctgctgctgctgggcctcatcggcggcctgaccctgctgctgctgctgaccctgctggcctttgctggctacagcggcctgctggccggcgtggaggtgtctgctggcagcccccccatcagaaatgtgacagtggcctacaagttccacatgggcctgtatggagagaccggccgcctcttcacagagagctgcagcatcagccccaagctgcggagcattgctgtgtactatgacaacccccacatggtgcccccagacaagtgccgctgtgctgtgggcagcatcctgtctgagggggaggagagccccagccctgagctgattgacctgtaccagaagtttggcttcaaggtgttctccttccctgcccccagccacgtggtgacagccaccttcccctacaccaccatcctgagcatctggctggccaccaggagagtgcacccagccctggacacctacatcaaggagaggaagctgtgtgcctacccccggctggagatctaccaggaggaccagatccacttcatgtgccccctggcccggcagggcgacttctacgtgcctgagatgaaggagacagagtggaagtggaggggcctggtggaggccatcgacacccaggtggatggcaccggctag

SEQ ID NO: 8041 - DNA, 345 bp, synthetic construct
  misc_feature 1..345: note = source = /note="Description of Artificial Sequence: Synthetic coding sequence"
  source 1..345: mol_type = other DNA
atgaagaccttcacctggaccctgggcgtgctcttcttcctgctggtggacaccggccactgccggggcggccagttcaagatcaagaagatcaaccagaggcgctacccccgggccacagatggcaaggaggaggccaagaagtgtgcctacaccttcctggtgcctgagcagaggatcaccggccccatctgtgtgaacaccaagggccaggatgccagcaccatcaaggacatgatcaccaggatggacctggagaacctgaaggatgtgctgagccggcagaagcgggagattgatgtgctgcagctggtggtggatgtggatggcaacatcgtgaactag

SEQ ID NO: 8042 - DNA, 870 bp, synthetic construct; identical to SEQ ID NO: 7936
  misc_feature 1..870: note = source = /note="Description of Artificial Sequence: Synthetic coding sequence"
  source 1..870: mol_type = other DNA

SEQ ID NO: 8043 - DNA, 1002 bp, synthetic construct; identical to SEQ ID NO: 7654
  misc_feature 1..1002: note = source = /note="Description of Artificial Sequence: Synthetic coding sequence"
  source 1..1002: mol_type = other DNA

SEQ ID NO: 8044 - DNA, 531 bp, synthetic construct
  misc_feature 1..531: note = source = /note="Description of Artificial Sequence: Synthetic coding sequence"
  source 1..531: mol_type = other DNA
atgaggctgctgatcctgacctgcctggtggccgtggccctggcccggcccaagctgcccctgcgctacccagagcggctgcagaaccccagcgagagcagcgagcccatccccctggagagccgggaggagtacatgaatggcatgaacagaagaaacatcctgcgggagaagcagacagatgagatcaaggacaccagaaatgaaagcacccagaactgtgtggtggccgagcctgagaagatggagagcagcatcagcagcagcagcgaggagcagttctgccgcctgaatgagtacaaccagctgcagctgcaggccgcccacgcccaggagcagatccggaggatgaatgaaaacagccacgtgcaggtgcccttccagcagctgaaccagctggccgcctacccctatgctgtgtggtactacccccagatcatgcagtatgtgcccttcccccccttcagtgacatcagcaaccccacagcccatgaaaattatgagaagaacaacgtgatgctgcagtggtag

SEQ ID NO: 8045 - DNA, 279 bp, synthetic construct
  misc_feature 1..279: note = source = /note="Description of Artificial Sequence: Synthetic coding sequence"
  source 1..279: mol_type = other DNA
atgaagctgtgtgtgacagtgctgagcctgctggtgctggtggccgccttctgcagcctggccctgagcgcccccatgggcagtgaccccccaacagcctgctgcttctcctacacagccaggaagctgcccaggaactttgtggtggactactatgagaccagcagcctgtgcagccagcctgctgtggtgttccagaccaagaggggcaagcaggtgtgtgccgaccccagcgagagctgggtgcaggagtatgtgtatgacctggagctgaactag

SEQ ID NO: 8046 - DNA, 1656 bp, synthetic construct
  misc_feature 1..1656: note = source = /note="Description of Artificial Sequence: Synthetic coding sequence"
  source 1..1656: mol_type = other DNA
atgacctggaggatgggcccccgcttcaccatgctgctggccatgtggctggtgtgtggcagcgagccccacccccacgccaccatccggggcagccatggaggcaggaaggtgcccctggtgtccccagacagcagcaggcctgcccgcttcctgcggcacacaggccgcagccggggcatcgagaggagcaccctggaggagcccaacctgcagcccctgcagaggagaagatctgtgcctgtgctgcggctggcccggcccagccgcttccgggacaacaggatggaccggcgggagcacggccaccgggaccccaacgtggtgcccggcccccccaagccagccaaggagaagccacccaagaagaaggcccaggacaagatcctgagcaatgaatatgaggagaagtatgacctgagccggcccacagccagccagctggaggatgagctgcaggtgggcaatgtgcccctgaagaaggccaaggagagcaagaagcatgagaagctggagaagccagagaaggagaagaagaagaagatgaagaatgaaaatgctgacaagctgctgaagtctgagaagcagatgaagaagtctgagaagaagagcaagcaggagaaggagaagagcaagaagaagaagggcggcaagacagagcaggacggctaccagaagcccaccaacaagcacttcacccagagccccaagaagtctgtggccgacctgctgggcagctttgagggcaagaggcggctgctgctgatcacagcccccaaggccgagaacaacatgtatgtgcagcagagagatgagtacctggagagcttctgcaagatggccaccaggaagatcagcgtcatcaccatctttggacctgtgaacaacagcaccatgaagattgaccacttccagctggacaatgagaagcccatgagggtggtggatgatgaggacctggtggaccagaggctcatcagcgagctgaggaaggagtatggcatgacctacaatgacttcttcatggtgctgacagatgtggacctgcgggtgaagcagtactatgaggtgcccatcaccatgaagtctgtgtttgacctgattgacaccttccagagccgcatcaaggacatggagaagcagaagaaggagggcatcgtgtgcaaggaggacaagaagcagagcctggagaacttcctgagccgcttccgctggaggcggcggctgctggtgatcagcgccccaaatgatgaggactgggcctacagccagcagctgagcgccctgagcggccaggcctgcaactttggcagctctgtggtggagcgggaggatgtgcctgcccacctggtgaaggacatccggaactacttccaggtgtccccagagtacttctccatgctgctggtgggcaaggatggaaatgtgaagtcctggtaccccagccccatgtggagcatggtgattgtgtatgacctgattgacagcatgcagctgcggcggcaggagatggccatccagcagagcctgggcatgcgctgcccagaagatgaatatgccggctacggctaccacagctaccaccagggctaccaggacggctaccaggatgactaccgccaccacgagagctaccaccacggctacccctactag

SEQ ID NO: 8047 - DNA, 1245 bp, synthetic construct; identical to SEQ ID NO: 7745
  misc_feature 1..1245: note = source = /note="Description of Artificial Sequence: Synthetic coding sequence"
  source 1..1245: mol_type = other DNA

SEQ ID NO: 8048 - DNA, 300 bp, synthetic construct; identical to SEQ ID NO: 7886
  misc_feature 1..300: note = source = /note="Description of Artificial Sequence: Synthetic coding sequence"
  source 1..300: mol_type = other DNA

SEQ ID NO: 8049 - DNA, 912 bp, synthetic construct; identical to SEQ ID NO: 7035
  misc_feature 1..912: note = source = /note="Description of Artificial Sequence: Synthetic coding sequence"
  source 1..912: mol_type = other DNA

SEQ ID NO: 8050 - DNA, 444 bp, synthetic construct; identical to SEQ ID NO: 7701
  misc_feature 1..444: note = source = /note="Description of Artificial Sequence: Synthetic coding sequence"
  source 1..444: mol_type = other DNA

SEQ ID NO: 8051 - DNA, 1173 bp, synthetic construct; identical to SEQ ID NO: 7414
  misc_feature 1..1173: note = source = /note="Description of Artificial Sequence: Synthetic coding sequence"
  source 1..1173: mol_type = other DNA

SEQ ID NO: 8052 - DNA, 297 bp, synthetic construct
  misc_feature 1..297: note = source = /note="Description of Artificial Sequence: Synthetic coding sequence"
  source 1..297: mol_type = other DNA
atgaacaagcacttcctgttcctgttcctgctgtactgcctgattgtggccgtgaccagcctgcagtgcatcacctgccacctgcggaccaggacagaccgctgccggcggggctttggagtgtgcacagcccagaagggggaggcctgcatgctgctgcgcatctaccagaggaacaccctgcagatctcctacatggtgtgccagaagttctgccgggacatgacctttgacctgaggaacagaacctacgtgcacacctgctgcaactacaactactgcaacttcaagctgtag

SEQ ID NO: 8053 - DNA, 600 bp, synthetic construct
  misc_feature 1..600: note = source = /note="Description of Artificial Sequence: Synthetic coding sequence"
  source 1..600: mol_type = other DNA
atggcctggggcggcgtgcacacctgctgcttccacctgtgctgctgctgctcctggccccagggcgctgtgcctgaggagctgcacaagcaccctggccagaccctgctgctgcagtgccagtacagccccaagaggggcccctaccagcccaagtcctggtgccagcagaccagccccagccgctgcaccctgctggtgaccagcagcaagccctggacagctgtgcagaagagccactacaccatctgggacaagcccaatgccggcttcttcaacatcaccatgatccagctgacccagaatgacagcggcttctactggtgtggcatctacaatgccagcgagaacatcatcaccgtgctgaggaacatcagcctggtggtgtccccagcccccaccaccagccccatgtggaccctgccctggctgcccaccagcacagcctgggagccccagatccaggagatcaagttccgggcccccacagacagcaccctgtggaagagccgggccccagcctgcctgggcagcggcggcccccgcttcctggtgctggtgctgtgtggcctgctgctggccaagggcctgatgctgtag

SEQ ID NO: 8054 - DNA, 2025 bp, synthetic construct
  misc_feature 1..2025: note = source = /note="Description of Artificial Sequence: Synthetic coding sequence"
  source 1..2025: mol_type = other DNA
atgaccacagatgacacagaggtgcctgccatgaccctggcccctggccacgccgccctggagacccagaccctgtctgctgagaccagcagccgggccagcaccccagctggccccatccctgaggccgagaccaggggggccaagaggatcagccctgcccgggagaccaggagcttcaccaagaccagccccaacttcatggtgctgattgccacctctgtggagaccagcgctgccagcggcagccctgagggcgccggcatgaccaccgtgcagaccatcaccggcagtgacccccgggaggccatctttgacaccctgtgcacagatgacagcagcgaggaggccaagaccctgaccatggacatcctgaccctggcccacaccagcacagaggccaagggcctgagcagcgagagcagcgccagcagtgacagcccccaccctgtgatcacccccagccgggccagcgagagcagcgccagcagtgatggcccccaccctgtgatcacccccagccgggccagcgagagcagcgccagcagtgatggcccccaccctgtgatcacccccagccgggccagcgagagcagcgccagcagtgatggcccccaccctgtgatcacccccagccgggccagcgagagcagcgccagcagtgatggcccccaccctgtgatcacccccagccgggccagcgagagcagcgccagcagtgatggcccccaccctgtgatcacccccagccgggccagcgagagcagcgccagcagtgatggcccccaccctgtgatcacccccagccgggccagcgagagcagcgccagcagtgatggcccccaccctgtgatcacccccagccgggccagcgagagcagcgccagcagtgatggcccccaccctgtgatcacccccagccgggccagcgagagcagcgccagcagtgatggcctgcaccctgtgatcacccccagccgggccagcgagagcagcgccagcagtgatggcccccaccctgtgatcacccccagccgggccagcgagagcagcgccagcagtgatggcccccaccctgtgatcacccccagctggagccctggcagtgatgtgaccctgctggccgaggccctggtgacagtgaccaacatcgaggtgatcaactgcagcatcacagaaattgagaccaccaccagcagcatccctggggccagtgacacagacctgatccccacagagggcgtgaaggccagcagcaccagtgaccccccagccctgcctgacagcacagaggccaagccccacatcacagaggtgacagccagcgctgagaccctgagcacagctggcaccacagagagcgctgccccagatgccaccgtgggcacccccctgcccaccaacagcgccacagagcgggaggtgacagcccctggggccaccaccctgagcggggccctggtgacagtgtccaggaaccccctggaggagaccagcgccctgtctgtggagacccccagctatgtgaaggtgtctggggccgcccctgtgtccattgaagctggcagcgctgtgggcaagaccaccagctttgctggcagcagcgccagcagctacagccccagcgaggccgccctgaagaacttcacccccagcgagacccccaccatggacatcgccaccaagggccccttccccaccagccgggaccccctgcccagcgtgccccccaccaccaccaacagcagccggggcaccaacagcaccctggccaagatcaccaccagcgccaagaccaccatgaagcccccaacagccacccccaccacagcccggacccggcccaccacagatgtgtctgctggagaaaatggaggcttcctgctgctgcggctgtctgtggccagccctgaggacctgacagacccccgggtggccgagcggctgatgcagcagctgcaccgggagctgcacgcccacgccccccacttccaggtgtccctgctgcgggtgcggcggggctag

SEQ ID NO: 8055 - DNA, 738 bp, synthetic construct
  misc_feature 1..738: note = source = /note="Description of Artificial Sequence: Synthetic coding sequence"
  source 1..738: mol_type = other DNA
atgcaggccgcctggctgctgggcgccctggtggtgccccagctgctgggcttcggccacggggcccggggagctgagcgggagtgggagggcggctggggcggggcccaggaggaggagcgggagcgggaggccctgatgctgaagcacctgcaggaggccctgggcctgcctgctggaagaggagatgagaacccagctggcaccgtggagggcaaggaggactgggagatggaggaggaccagggcgaggaggaggaggaggaggccacccccacccccagcagcggccccagccccagccccaccccagaagatattgtgacctacatcctgggccgcctggccggcctggatgctggcctgcaccagctgcacgtgcggctgcacgccctggacaccagggtggtggagctgacccagggcctgcggcagctgagaaatgctgctggggacaccagagatgctgtgcaggccctgcaggaggcccagggccgggcagagcgggagcacggccgcctggagggctgcctgaagggcctgcggctgggccacaagtgcttcctgctgagccgggactttgaggcccagcccagcgccagcccccaccccctgagcccagaccagcccaatggaggcaccctggagaactgtgtggcccaggccagtgatgatggctcctggtgggaccatgactgccagaggcggctgtactacgtgtgtgagttccccttctag

SEQ ID NO: 8056 - DNA, 279 bp, synthetic construct
  misc_feature 1..279: note = source = /note="Description of Artificial Sequence: Synthetic coding sequence"
  source 1..279: mol_type = other DNA
atgatctggaggagcagagctggagctgagctgttcagcctgatggccctgtgggagtggatcgccctgagcctgcactgctgggtgctggccgtggccgctgtgtctgaccagcacgccaccagcccctttgactggctgctgagtgacaagggccccttccacaggagccaggagtacacagactttgtggacaggagccggcagggcttcagcacccgctacaagatctacagaaacatgggccacatcagctgctacctgctgctgtgggagtag

SEQ ID NO: 8057 - DNA, 177 bp, synthetic construct
  misc_feature 1..177: note = source = /note="Description of Artificial Sequence: Synthetic coding sequence"
  source 1..177: mol_type = other DNA
atggctgacatgcagaacctggtggagcggctggagagagctgtgggccgcctggaggccgtgagccacaccagtgacatgcaccggggctacgccgacagccccagcaaggccggggccgccccctacgtgcaggcctttgacagcctgctggccggccctgtggccgagtactag

SEQ ID NO: 8058 - DNA, 732 bp, synthetic construct
  misc_feature 1..732: note = source = /note="Description of Artificial Sequence: Synthetic coding sequence"
  source 1..732: mol_type = other DNA
atgggccctgaggccctgagcagcctgctgctgctgctgctggtggccagcggagatgctgacatgaagggccactttgatcctgccaagtgccgctatgccctgggcatgcaggacaggaccatcccagacagcgacatcagcgccagcagctcctggagcgacagcacagctgcccggcacagccggctggagagcagtgatggagatggagcctggtgcccagctggcagcgtcttccccaaggaggaggagtacctgcaggtggacctgcagaggctgcacctggtggccctggtgggcacccagggcagacatgctgggggcctgggcaaggagttcagccgcagctaccgcctgcgctacagcagagatggaagacgctggatgggctggaaggaccgctggggccaggaggtgatctctggaaatgaagatcctgagggcgtggtgctgaaggacctgggcccccccatggtggcccggctggtgcgcttctaccccagggctgacagagtgatgtctgtgtgcctgcgggtggagctgtatggctgcctgtggagggactgcagcatgggcgtgtgggcctcctggcagatggtgtggtggggctggatgaccctgggccgggtgcgcagctgtggcagcggccaggccatgaccatgtgggatggagccaccacagccagccctgtggccatgtggcgctggagcctgagcctgaccggctag

SEQ ID NO: 8059 - DNA, 2535 bp, synthetic construct; identical to SEQ ID NO: 7302
  misc_feature 1..2535: note = source = /note="Description of Artificial Sequence: Synthetic coding sequence"
  source 1..2535: mol_type = other DNA

SEQ ID NO: 8060 - DNA, 921 bp, synthetic construct
  misc_feature 1..921: note = source = /note="Description of Artificial Sequence: Synthetic coding sequence"
  source 1..921: mol_type = other DNA
agaaggacctgtgccggccctggccgggccggcggggcccggagcgcctcctggatgagccggctgcgggccctgctgggcctgggcctgctggtggccggcagccgggtgccccgcatcaagagccagaccatcgcctgccgcagcggccccacctggtggggcccccagaggctgaacagcggcggccgctgggacagcgaggtgatggccagcacagtggtgaagtacctgagccaggaggaggcccaggccgtggaccaggagctgttcaatgagtaccagttctctgtggaccagctgatggagctggccggcctgagctgtgccacagccatcgccaaggcctacccacccacctccatgagccgcagcccccccaccgtgctggtgatctgtggccctggcaacaatggaggagatggcctggtgtgtgcccggcacctgaagctgtttggctatgagcccaccatctactaccccaagaggcccaacaagcccctcttcaccgccctggtgacccagtgccagaagatggacatccccttcctgggggagatgcctgctgagcccatgaccattgatgagctgtatgagctggtggtggatgccatcttcggcttctccttcaagggagatgtgcgggagcccttccacagcatcctgtctgtgctgaagggcctgactgtgcccatcgccagcattgacatccccagcggctgggatgtggagaagggaaatgctgggggcatccagcctgacctgctgatcagcctgacagcccccaagaagagcgccacccagttcaccggccgctaccactacctgggcggccgctttgtgcccccagccctggagaagaagtaccagctgaacctgcccccctacccagacacagaatgtgtgtaccgcctgcagtag

SEQ ID NO: 8061 - DNA, 1137 bp, synthetic construct; identical to SEQ ID NO: 7841
  misc_feature 1..1137: note = source = /note="Description of Artificial Sequence: Synthetic coding sequence"
  source 1..1137: mol_type = other DNA

SEQ ID NO: 8062 - DNA, 762 bp, synthetic construct
  misc_feature 1..762: note = source = /note="Description of Artificial Sequence: Synthetic coding sequence"
  source 1..762: mol_type = other DNA
atggccccctggagccaccccagcgcccagctgcagcctgtgggcggagatgctgtgtccccagccctgatggtgctgctgtgcctgggcaacctgagcaaggccaccctgtgggccgagcccggcagcgtcatcagccggggcaacagcgtgaccatccgctgccagggcaccctggaggcccaggagtaccgcctggtgaaggagggcagccctgagccctgggacacccagaaccccctggagcccaagaacaaggcccgcttcagcatccccagcatgacagagcaccacgccggccgctaccgctgctactactacagccctgctggctggagcgagcccagcgaccccctggagctggtggtgacaggcttctacaacaagcccaccctgagcgccctgcccagccctgtggtgaccagcggggagaatgtgaccctgcagtgtggcagccggctgcgctttgaccgcttcatcctgacagaggagggggaccacaagctgtcctggaccctggacagccagctgacccccagcggccagttccaggccctcttccctgtgggccctgtgacccccagccaccgctggatgctgcgctgctacggcagccgccgccacatcctgcaggtgtggagcgagcccagcgacctgctggagatccctgtgtctggagaggaggccaccgtcttcagcagcaccatccagggcagccagacaggctgtggggagctgtaccggcagggcagcccctgctag

SEQ ID NO: 8063 - DNA, 288 bp, synthetic construct
  misc_feature 1..288: note = source = /note="Description of Artificial Sequence: Synthetic coding sequence"
  source 1..288: mol_type = other DNA
atgaggaagcccaggaggaagagccggcagaatgctgagggcagaagaagccccagcccctacagcctgaagtgcagccccacccgggagaccctgacctacgcccaggcccagagaattgtggaggtggacattgatggccgcctgcaccgcatcagcatctatgaccccctgaagatcatcacagaagatgagctgacagcccaggacatcacagagtgcaacagcaacaaggaaaattctgagcagccccagtttcctgggaagagcaagaagcccagcagctag

SEQ ID NO: 8064 - DNA, 1311 bp, synthetic construct
  misc_feature 1..1311: note = source = /note="Description of Artificial Sequence: Synthetic coding sequence"
  source 1..1311: mol_type = other DNA
atgaagttccagggccccctggcctgcctgctgctggccctgtgcctgggcagcggggaggccggccccctgcagagcggggaggagagcacaggcaccaacattggagaggccctgggccacggcctgggagatgccctgtctgagggcgtgggcaaggccatcggcaaggaggccggcggcgctgctggcagcaaggtgtctgaggccctgggccagggcacccgggaggccgtgggcactggagtgcggcaggtgcccggctttggagtggctgatgccctgggcaacagagtgggggaggccgcccacgccctgggcaacacaggccatgaaattggccggcaggccgaggatgtgatcagacatggagcagatgctgtgcggggctcctggcagggcgtgcccggccacaatggagcctgggagaccagcggcggccacggcatcttcggcagccagggcggcctgggcggccagggccagggcaaccctgggggcctgggcaccccctgggtgcacggctacccaggcaacagcgctggcagctttggcatgaacccccagggcgccccctggggccagggcggcaatggaggcccccccaactttggcaccaacacccagggcgctgtggcccagcccggctacggctctgtgcgggccagcaaccagaatgaaggctgcaccaaccccccaccttctggcagcggcggcggcagcagcaacagcggcggcggcagcggcagccagagcggcagcagcggcagcggcagcaatggagacaacaacaacggcagcagcagcggcggcagcagcagcggcagcagcagcggcggcagcagcggcggcagcagcggcggcagcagcggcaacagcggcggcagcagaggagacagcggcagcgagagctcctggggcagcagcacaggcagcagcagcggcaaccacggcggcagcggcggcggcaatggccacaagccaggctgtgagaagccaggaaatgaggcccggggcagcggggagagcggcatccagggcttccggggccagggcgtgagcagcaacatgagggagatcagcaaggagggcaaccggctgctgggcggcagcggggacaactaccggggccagggcagctcctggggcagcggcggcggagatgctgtgggcggcgtgaacacagtgaacagcgagaccagccctggcatgttcaactttgacaccttctggaagaacttcaagagcaagctgggcttcatcaactgggatgccatcaacaaggaccagaggagcagccgcatcccctag

SEQ ID NO: 8065 - DNA, 240 bp, synthetic construct
  misc_feature 1..240: note = source = /note="Description of Artificial Sequence: Synthetic coding sequence"
  source 1..240: mol_type = other DNA
atgcctgcctgccgcctgggccccctggccgccgccctgctgctgagcctgctgctgtttggcttcaccctggtgtctggcaccggggctgagaagacaggagtgtgcccagagctgcaggccgaccagaactgcacccaggagtgtgtgtctgattctgaatgtgccgacaacctgaagtgctgcagcgctggctgtgccaccttctgcagcctgcccaacggccagctggccgagtag

SEQ ID NO: 8066 - DNA, 2130 bp, synthetic construct
  misc_feature 1..2130: note = source = /note="Description of Artificial Sequence: Synthetic coding sequence"
  source 1..2130: mol_type = other DNA
atgggctgcctgtggggcctggccctgcccctcttcttcttctgctgggaggtgggcgtgtctggcagcagcgctggccccagcacccggcgggctgacacagccatgaccacagatgacacagaggtgcctgccatgaccctggcccctggccatgctgccctggagacccagaccctgtctgctgagaccagcagccgggccagcaccccagctggccccatccctgaggccgagaccaggggggccaagaggatcagccctgcccgggagaccaggagcttcaccaagaccagccccaacttcatggtgctgattgccacctctgtggagaccagcgctgccagcggcagccctgagggcgccggcatgaccaccgtgcagaccatcactggaagtgacccccgggaggccatctttgacaccctgtgcacagatgacagcagcgaggaggccaagaccctgaccatggacatcctgaccctggcccacaccagcacagaggccaagggcctgagcagcgagagcagcgccagcagtgacagcccccaccctgtgatcacccccagccgggccagcgagagcagcgccagcagtgatggcccccaccctgtgatcacccccagccgggccagcgagagcagcgccagcagtgatggcccccaccctgtgatcacccccagccgggccagcgagagcagcgccagcagtgatggcccccaccctgtgatcacccccagccgggccagcgagagcagcgccagcagtgatggcccccaccctgtgatcacccccagccgggccagcgagagcagcgccagcagtgatggcccccaccctgtgatcacccccagccgggccagcgagagcagcgccagcagtgatggcccccaccctgtgatcacccccagccgggccagcgagagcagcgccagcagtgatggcccccaccctgtgatcacccccagccgggccagcgagagcagcgccagcagtgatggcccccaccctgtgatcacccccagccgggccagcgagagcagcgccagcagtgatggcctgcaccctgtgatcacccccagccgggccagcgagagcagcgccagcagtgatggcccccaccctgtgatcacccccagccgggccagcgagagcagcgccagcagtgatggcccccaccctgtgatcacccccagctggagccctggcagtgatgtgaccctgctggccgaggccctggtgacagtgaccaacattgaagtcatcaactgcagcatcacagaaattgagaccaccaccagcagcatccctggggccagtgacacagacctgatccccacagaaggagtgaaggccagcagcaccagtgaccccccagccctgcctgacagcacagaggccaagccccacatcacagaggtgacagccagcgctgagaccctgagcacagctggcaccacagaatctgctgccccagatgccaccgtgggcacccccctgcccaccaacagcgccacagagcgggaggtgacagcccctggggccaccaccctgagcggggccctggtgacagtgtccaggaaccccctggaggagaccagcgccctgtctgtggagacccccagctatgtgaaggtgtctggagctgcccctgtgtccattgaggccggcagcgctgtgggcaagaccaccagctttgctggcagcagcgccagcagctacagccccagcgaggccgccctgaagaacttcaccccatctgagacccccaccatggacatcgccaccaagggccccttccccaccagccgggaccccctgcccagcgtgccccccaccaccaccaacagcagccggggcaccaacagcaccctggccaagatcaccaccagcgccaagaccaccatgaagccacccacagccacccccaccacagcccggacccggcccaccacagatgtgtctgctggggagaatggaggcttcctgctgctgcggctgtctgtggccagccctgaggacctgacagacccccgggtggccgagcggctgatgcagcagctgcaccgggagctgcacgcccacgccccccacttccaggtgtccctgctgcgggtgagaagaggatag

SEQ ID NO: 8067 - DNA, 2067 bp, synthetic construct
  misc_feature 1..2067: note = source = /note="Description of Artificial Sequence: Synthetic coding sequence"
  source 1..2067: mol_type = other DNA
atgctgcccacagaggtgccccagagccaccctggccccagcgccctgctgctgctgcagctgctgctgccccccaccagcgccttcttccccaacatctggagcctgctggccgcccctggcagcatcacccaccaggacctgacagaggaggccgccctgaatgtgaccctgcagctgttcctggagcagcccccacctggccggccccccctgcggctggaggacttcctgggccgcaccctgctggctgatgacctgtttgctgcctacttcggccctggcagcagccgccgcttccgggccgccctgggggaggtgtcccgggccaatgctgcccaggacttcctgcccaccagcagaaatgaccctgacctgcactttgatgctgagcggctgggccagggccgggcccggctggtgggcgccctgcgggagaccgtggtggccgcccgggccctggaccacaccctggcccggcagaggctgggcgccgccctgcacgccctgcaggacttctacagccacagcaactgggtggagctgggggagcagcagccccacccccacctgctgtggccccggcaggagctgcagaacctggcccaggtggccgaccccacctgcagcgactgtgaggagctgagctgccccaggaactggctgggcttcaccctgctgaccagcggctacttcggcacccacccccccaagcccccaggcaagtgcagccatggaggccactttgacaggagcagcagccagcccccccggggcggcatcaacaaggacagcaccagccctggcttcagcccccaccacatgctgcacctgcaggccgccaagctggccctgctggccagcatccaggccttcagcctgctgcggagccggctgggggaccgggacttcagccggctgctggacatcaccccagccagcagcctgagctttgtgctggacaccaccggctccatgggagaggagatcaatgctgccaagatccaggcccggcacctggtggagcagaggcggggcagccccatggagcctgtgcactacgtgctggtgcccttccatgaccccggcttcggccctgtgttcaccaccagtgaccctgacagcttctggcagcagctgaatgagatccacgccctgggcggcggagatgagcctgagatgtgcctgagcgccctgcagctggccctgctgcacaccccacccctgagtgacatctttgtgttcacagatgccagccccaaggatgccttcctgaccaaccaggtggagagcctgacccaggagcggcgctgccgggtgaccttcctggtgacagaggacaccagccgggtgcagggccgggcccggcgggagatcctgagccccctgcgctttgagccctacaaggctgtggccctggccagcggcggggaggtgatcttcaccaaggaccagcacatcagagatgtggccgccatcgtgggggagagcatggccgccctggtgaccctgcccctggacccccctgtggtggtgcccggccagcccctggtgttttctgtggatggcctgctgcagaagatcaccgtgcgcatccatggagacatcagcagcttctggatcaagaacccagctggggtgtcccagggccaggaggagggcggcggccccctgggccacacccggcgcttcggccagttctggatggtgaccatggatgatcctccccagacaggcacctgggagatccaggtgacagctgaggacaccccaggagtgcgggtgcaggcccagaccagcctggacttcctgttccacttcggcatccccatggaggatggcccccaccctggcctgtaccccctgacccagcctgtggccggcctgcagacccagctgctggtggagagccagagctggggcagcagcgctgccttcctgcccaggcaccccagccggggcccccggggctgcaggaccaggcctggggccctgggcgcccggggcaccagcggggcccggagccccaggagcctggccgtggcccacgccgctgtgcacccctag

SEQ ID NO: 8068 - DNA, 1257 bp, synthetic construct
  misc_feature 1..1257: note = source = /note="Description of Artificial Sequence: Synthetic coding sequence"
  source 1..1257: mol_type = other DNA
aacaacctgaatgtgggcagtgacaccaccagcgagaccagcttcagcctgagcaaggaggccccccgggagcacctggaccaccaggccgcccaccagcccttcccccggccccgcttccggcaggagaccggccaccccagcctgcagagggacttccccaggagcttcctgctggacctgcccaacttcccagacctgagcaaggctgacatcaatggccagaaccccaacatccaggtgaccatcgaggtggtggatggcccagattctgaggccgacaaggaccagcaccctgagaacaagcccagctggagcgtgcccagcccagactggagggcctggtggcagaggagcctgagcctggcccgggccaacagcggggaccaggactacaagtatgacagcaccagtgatgacagcaacttcctgaaccccccccggggctgggaccacacagcccctggccacaggacctttgagaccaaggaccagccagaatatgacagcacagatggagagggggactggagcctgtggagcgtgtgcagcgtgacctgtggaaatggaaaccagaagaggaccaggagctgtggctacgcctgcacagccacagagagcaggacctgtgaccggcccaactgccccggcatcgaggacaccttcagaacagctgccacagaggtgtccctgctggccggcagcgaggagttcaatgccaccaagctgtttgaggtggacacagacagctgtgagcgctggatgagctgcaagtctgagttcctgaagaagtacatgcacaaggtgatgaatgacctgcccagctgcccctgcagctaccccacagaggtggcctacagcacagctgacatctttgaccgcatcaagaggaaggacttccgctggaaggatgccagcggccccaaggagaagctggagatctacaagcccacagcccgctactgcatccgctccatgctgagcctggagagcaccaccctggccgcccagcactgctgctatggagacaacatgcagctgatcacccggggcaagggggccggcacccccaacctgatcagcacagagttctctgctgagctgcactacaaggtggatgtgctgccctggatcatctgcaagggggactggagccgctacaatgaggcccggccccccaacaacggccagaagtgcacagagagccccagtgatgaggactacatcaagcagttccaggaggcccgggagtactag

SEQ ID NO: 8069 - DNA, 693 bp, synthetic construct; identical to SEQ ID NO: 7341
  misc_feature 1..693: note = source = /note="Description of Artificial Sequence: Synthetic coding sequence"
  source 1..693: mol_type = other DNA

SEQ ID NO: 8070 - DNA, 192 bp, synthetic construct; identical to SEQ ID NO: 7947
  misc_feature 1..192: note = source = /note="Description of Artificial Sequence: Synthetic coding sequence"
  source 1..192: mol_type = other DNA

SEQ ID NO: 8071 - DNA, 1014 bp, synthetic construct
  misc_feature 1..1014: note = source = /note="Description of Artificial Sequence: Synthetic coding sequence"
  source 1..1014: mol_type = other DNA
atgctgagcctgggcgcccacagcgtgaccaagacccagatcctgcagggcctgggcttcaacctgacccacaccccagagagcgccatccaccagggcttccagcacctggtgcacagcctgactgtgcccagcaaggacctgaccctgaagatgggcagcgccctgtttgtgaagaaggagctgcagctgcaggccaacttcctgggcaatgtgaagaggctgtatgaggccgaggtgttcagcacagacttcagcaaccccagcatcgcccaggcccgcatcaacagccacgtgaagaagaagacccagggcaaggtggtggacatcatccagggcctggacctgctgacagccatggtgctggtgaaccacatcttcttcaaggccaagtgggagaagcccttccaccctgagtacaccaggaagaacttccccttcctggtgggggagcaggtgacagtgcacgtgcccatgatgcaccagaaggagcagtttgccttcggcgtggacacagagctgaactgctttgtgctgcagatggactacaagggagatgctgtggccttctttgtgctgcccagcaagggcaagatgaggcagctggagcaggccctgagcgcccggaccctgaggaagtggagccacagcctgcagaagcgctggattgaggtgttcatcccccgcttcagcatcagcgccagctacaacctggagaccatcctgcccaagatgggcatccagaatgtgtttgacaagaatgctgacttcagcggcatcgccaagagggacagcctgcaggtgtccaaggccacccacaaggctgtgctggatgtgtctgaggagggcacagaggccacagctgccaccaccaccaagttcatcgtgcgcagcaaggatggccccagctacttcaccgtgtccttcaacagaaccttcctgatgatgatcaccaacaaggccacagatggcatcctcttcctgggcaaggtggagaaccccaccaagagctag

SEQ ID NO: 8072 - DNA, 336 bp, synthetic construct
  misc_feature 1..336: note = source = /note="Description of Artificial Sequence: Synthetic coding sequence"
  source 1..336: mol_type = other DNA
atgttcttcaccatcagcaggaagaacatgagccagaagctgagcctgctgctgctggtgtttggcctcatctggggcctgatgctgctgcactacaccttccagcagcccaggcaccagagctctgtgaagctgcgggagcagatcctggacctgagcaagcgctacgtgaaggccctggccgaggagaacaagaacacagtggatgtggagaatggagcctccatggccggctacgccgacctgaagaggaccatcgctgtgctgctggatgacatcctgcagaggctggtgaagctggagaacaaggtggactacatcgtggtgaatggatag

SEQ ID NO: 8073 - DNA, 498 bp, synthetic construct; identical to SEQ ID NO: 7058
  misc_feature 1..498: note = source = /note="Description of Artificial Sequence: Synthetic coding sequence"
  source 1..498: mol_type = other DNA

SEQ ID NO: 8074 - DNA, 699 bp, synthetic construct
  misc_feature 1..699: note = source = /note="Description of Artificial Sequence: Synthetic coding sequence"
  source 1..699: mol_type = other DNA
atggtgctgctgctggtgatcctgatccctgtgctggtgtcctctgctggcaccagcgcccactatgagatgctgggcacctgcaggatggtgtgtgacccctatggaggcaccaaggcccccagcacagctgccaccccagaccggggcctgatgcagagcctgcccaccttcatccagggcccccccatgggccccccaggagagaagggggagcccggccggcagggcctgcccggccccccaggggcccctggcctgaatgctgctggggccatctctgctgccacctacagcacagtgcccaagatcgccttctacgccggcctgaagaggcagcacgagggctatgaggtgctgaagtttgatgatgtggtgaccaacctgggcaaccactatgaccccaccaccgggaagttcacctgcagcatccctggcatctacttcttcacctaccacgtgctgatgagaggaggagatggcacctccatgtgggccgacctgtgcaagaacaaccaggtgcgggccagcgccatcgcccaggatgctgaccagaactatgactatgccagcaacagcgtggtgctgcacctggagcctggagatgaggtgtacatcaagctggatggcggcaaggcccacggcggcaacaacaacaagtacagcaccttcagcggcttcatcatctatgctgactag

SEQ ID NO: 8075 - DNA, 501 bp, synthetic construct; identical to SEQ ID NO: 7976
  misc_feature 1..501: note = source = /note="Description of Artificial Sequence: Synthetic coding sequence"
  source 1..501: mol_type = other DNA

SEQ ID NO: 8076 - DNA, 627 bp, synthetic construct
  misc_feature 1..627: note = source = /note="Description of Artificial Sequence: Synthetic coding sequence"
  source 1..627: mol_type = other DNA
atgatcatcaagcacttctttggaacagtgctggtgctgctggccagcaccaccatcttcagcctggacctgaagctgatcatcttccagcagaggcaggtgaaccaggagagcctgaagctgctgaacaagctgcagaccctgagcatccagcagtgcctgccccacaggaagaacttcctgctgccccagaagagcctgagcccccagcagtaccagaagggccacaccctggccatcctgcacgagatgctgcagcagatcttcagcctcttccgggccaacatcagcctggatggctgggaggagaaccacacagagaagttcctgatccagctgcaccagcagctggagtacctggaggccctgatgggcctggaggccgagaagctgagcggcaccctgggcagtgacaacctgcggctgcaggtgaagatgtacttccgccgcatccatgactacctggagaaccaggactacagcacctgtgcctgggccatcgtgcaggtggagatcagccgctgcctcttctttgtgttcagcctgacagagaagctgagcaagcagggccggcccctgaatgacatgaagcaggagctgaccacagagttccgcagccccaggtag

SEQ ID NO: 8077 - DNA, 2241 bp, synthetic construct
  misc_feature 1..2241: note = source = /note="Description of Artificial Sequence: Synthetic coding sequence"
  source 1..2241: mol_type = other DNA
atgcccttccgccacaagccaggctctgtgttttctgtggagggggagaacctggacctggccatgagcaaggaggaggtggtggccatgattggagatggcccctgtgtggtgaagaccctgaccaggcaccacctgtactgtgagccccctgtggagcagcccctgcccaggcaccacgccctgcgggaggccccagacagcctgcctgagttcaccgtgcagatgggcaacctgcgcttcagcctgggccacgtgcagtatgatggagagagccctggggccttccctgtggccgcccaggtgggcctgggcgtgggcaccagcctgctggccctgggcgtcatcatcatcgtgctgatgtacagaaggaagagcaagcaggccctgcgggactacaagaaggtgcagatccagctggagaacctggagagctctgtgcgggaccgctgcaagaaggagttcacagacctgatgacagagatgacagacctgaccagtgacctgctgggcagcggcatccccttcctggactacaaggtgtatgcagagcgcatcttcttccctggccaccgggagagccccctgcaccgggacctgggcgtgcctgagagccggcggcccaccgtggagcagggcctgggccagctgagcaacctgctgaacagcaagctgttcctgaccaagttcatccacaccctggagagccagaggaccttcagcgcccgggaccgggcctacgtggccagcctgctgactgtggccctgcacggcaagctggagtacttcacagacatcctgcggaccctgctgagtgacctggtggcccagtatgtggccaagaaccccaagctgatgctgcggaggacagagaccgtggtggagaagctgctgaccaactggatgagcatctgcctgtacacctttgtgcgggacagcgtgggggagcccctgtacatgctgttccggggcatcaagcaccaggtggacaagggccctgtggacagcgtgacaggcaaggccaagtacaccctgaatgacaaccggctgctgagagaagatgtggagtaccggcccctgaccctgaatgccctgctggccgtgggccctggggccggggaggcccagggcgtgcctgtgaaggtgctggactgtgacaccatcagccaggccaaggagaagatgctggaccagctgtacaagggcgtgcccctgacccagaggccagaccccaggaccctggatgtggagtggaggtctggagtggccggccacctgatcctgagtgatgaagatgtgaccagcgaggtgcagggcctgtggaggcggctgaacaccctgcagcactacaaggtgcctgatggagccaccgtggccctggtgccctgcctgaccaagcacgtgctgcgggagaaccaggactatgtgcctggagagaggacccccatgctggaggatgtggatgagggcggcatccggccctggcacctggtgaagcccagtgatgagcctgagcccccccggccccggcggggcagcctgcggggcggggagcgggagcgggccaaggccatccctgagatctacctgacccggctgctgtccatgaagggcaccctgcagaagtttgtggatgacctcttccaggtgatcctgagcaccagcaggcctgtgcccctggccgtgaagtacttctttgacctgctggatgagcaggcccagcagcacggcatcagtgaccaggacaccatccacatctggaagaccaacagcctgcccctgcgcttctggatcaacatcatcaagaacccccagtttgtgtttgatgtgcagaccagtgacaacatggatgctgtgctgctggtgattgcccagaccttcatggatgcctgcaccctggccgaccacaagctgggccgggacagccccatcaacaagctgctgtatgcccgggacatcccccgctacaagaggatggtggagcgctactatgctgacatccggcagacagtgcctgccagtgaccaggagatgaacagcgtgctggccgagctgtcctggaactacagcggggacctgggcgcccgggtggccctgcacgagctgtacaagtacatcaacaagtactatgaccagatcatcacagccctggaggaggatggaacagcccagaagatgcagctgggctaccgcctgcagcagattgctgctgctgtggagaacaaggtgacagacctgtag

SEQ ID NO: 8078 - DNA, 603 bp, synthetic construct; identical to SEQ ID NO: 7249
  misc_feature 1..603: note = source = /note="Description of Artificial Sequence: Synthetic coding sequence"
  source 1..603: mol_type = other DNA

SEQ ID NO: 8079 - DNA, 114 bp, synthetic construct
  misc_feature 1..114: note = source = /note="Description of Artificial Sequence: Synthetic coding sequence"
  source 1..114: mol_type = other DNA
atgggctggctgaccagaattgtgtgcctcttctggggcgtgctgctgacagcccgggccaactaccagaatggcaagaacaacgtgccccggctgaagctgagctacaagtag

SEQ ID NO: 8080 - DNA, 525 bp, synthetic construct
  misc_feature 1..525: note = source = /note="Description of Artificial Sequence: Synthetic coding sequence"
  source 1..525: mol_type = other DNA
atgaggctgctggccttcctgagcctgctggccctggtgctgcaggagactggaacagccagcctgcccaggaaggagaggaagagaagagaggagcagatgccccgggagggggacagctttgaggtgctgcccctgagaaatgatgtgctgaacccagacaactacggggaggtgattgacctgagcaactatgaggagctgacagattatggagaccagctgcctgaggtgaaggtgaccagcctggccccagccaccagcatcagccctgccaagagcaccacagcccctggcacccccagcagcaaccccaccatgacccggcccaccacagctggcctgctgctgagcagccagcccaaccacgaggacatcccccccctgcccaggagaacagcctacctgtatgcccgcttcaaccgcatcagccgcatccgggcagaggacttcaagggcctgaccaagctgaagagaattgacctgagcaacaacctgatcagcagcattgacaatgatgcctag

SEQ ID NO: 8081 - DNA, 657 bp, synthetic construct; identical to SEQ ID NO: 7550
  misc_feature 1..657: note = source = /note="Description of Artificial Sequence: Synthetic coding sequence"
  source 1..657: mol_type = other DNA

SEQ ID NO: 8082 - DNA, 2535 bp, synthetic construct; identical to SEQ ID NO: 7302
  misc_feature 1..2535: note = source = /note="Description of Artificial Sequence: Synthetic coding sequence"
  source 1..2535: mol_type = other DNA

SEQ ID NO: 8083 - DNA, 2007 bp, synthetic construct
  misc_feature 1..2007: note = source = /note="Description of Artificial Sequence: Synthetic coding sequence"
  source 1..2007: mol_type = other DNA
atggacctggtgctgaagcgctgcctgctgcacctggccgtgattggagccctgctggccgtgggcgccaccaaggtgcccaggaaccaggactggctgggcgtgtcccggcagctgcggaccaaggcctggaaccggcagctgtacccagagtggacagaggcccagaggctggactgctggaggggcggccaggtgtccctgaaggtgtccaatgatggccccaccctcatcggggccaatgccagcttcagcatcgccctgaacttccctggcagccagaaggtgctgcctgatggccaggtgatctgggtgaacaacaccatcatcaatggcagccaggtgtggggcggccagcctgtgtacccccaggagacagatgatgcctgcatcttcccagatggcggcccctgccccagcggctcctggagccagaagaggagctttgtgtatgtgtggaagacctggggccagtactggcaggtgctgggcggccctgtgtctggcctgagcatcggcaccggccgggccatgctgggcacccacaccatggaggtgacagtgtaccacagaagaggcagccgctcctatgtgcccctggcccacagcagcagcgccttcaccatcacagaccaggtgcccttctctgtgtctgtgtcccagctgcgggccctggatggcggcaacaagcacttcctgaggaaccagcccctgacctttgccctgcagctgcatgaccccagcggctacctggccgaggccgacctgagctacacctgggactttggagacagcagcggcaccctcatcagccgggccctggtggtgacccacacctacctggagcccggccctgtgacagcccaggtggtgctgcaggccgccatccccctgaccagctgtggcagcagccctgtgcccggcaccacagatggccaccggcccacagctgaggcccccaacaccacagctggccaggtgcccaccacagaggtggtgggcaccaccccaggccaggcccccacagctgagcccagcggcaccacctctgtgcaggtgcccaccacagaggtgatcagcacagcccctgtgcagatgcccacagctgagagcacaggcatgaccccagagaaggtgcctgtgtctgaggtgatgggcaccaccctggccgagatgagcaccccagaggccaccggcatgaccccagctgaggtgtccatcgtggtgctgagcggcaccacagctgcccaggtgaccaccacagagtgggtggagaccacagcccgggagctgcccatccctgagcctgagggcccagatgccagcagcatcatgagcacagagagcatcaccggcagcctgggccccctgctggatggaacagccaccctgcggctggtgaagaggcaggtgcccctggactgtgtgctgtaccgctatggcagcttctctgtgaccctggacatcgtgcagggcattgaatctgctgagatcctgcaggccgtgcccagcggggagggagatgcctttgagctgactgtgtcctgccagggcggcctgcccaaggaggcctgcatggagatcagcagccctggctgccagcccccagcccagaggctgtgccagcctgtgctgcccagccctgcctgccagctggtgctgcaccagatcctgaagggcggcagcggcacctactgcctgaatgtgtccctggccgacaccaacagcctggccgtggtgtccacccagctgatcatgcctgtgcccggcatcctgctgaccggccaggaggccggcctgggccaggtgcccctcatcgtgggcatcctgctggtgctgatggctgtggtgctggccagcctcatctacagaagaaggctgatgaagcaggacttctctgtgccccagctgccccacagcagcagccactggctgcggctgccccgcatcttctgcagctgccccatcggggagaacagccccctgctgagcggccagcaggtgtag

SEQ ID NO: 8084 - DNA, 525 bp, synthetic construct
  misc_feature 1..525: note = source = /note="Description of Artificial Sequence: Synthetic coding sequence"
  source 1..525: mol_type = other DNA
atggctgacatgcagaacctggtggagcggctggagagagctgtgggccgcctggaggccgtgagccacaccagtgacatgcaccggggctacgccgacagccccagcaaggccggggccgccccctacgtgcaggcctttgacagcctgctggccggccctgtggccgagtacctgaagatcagcaaggagattggaggagatgtgcagaagcatgctgagatggtgcacacaggcctgaagctggagcgggccctgctggtgacagccagccagtgccagcagcctgctgagaacaagctgagtgacctgctggcccccatcagcgagcagatcaaggaggtgatcaccttccgggagaagaacagaggcagcaagctgttcaaccacctgtctgctgtgtctgagagcatccaggccctgggctgggtggccatggcccccaagccaggcccctacgtgaaggagatgaatgatgctgccatgttctacaccaacagagtgctgaaggagtacaaggactag

SEQ ID NO: 8085 - DNA, 1368 bp, synthetic construct
  misc_feature 1..1368: note = source = /note="Description of Artificial Sequence: Synthetic coding sequence"
  source 1..1368: mol_type = other DNA
atgctgcaccctgagaccagccctggccggggccacctgctggccgtgctgctggccctgctgggcacagcctgggccgaggtgtggccaccccagctgcaggagcaggcccccatggccggggccctgaacaggaaggagagcttcctgctgctgagcctgcacaaccggctgcgctcctgggtgcagcccccagctgctgacatgaggcggctggactggagcgacagcctggcccagctggcccaggcccgggccgccctgtgtggcacccccacccccagcctggccagcggcctgtggaggaccctgcaggtgggctggaacatgcagctgctgcctgctggcctggtgtcctttgtggaggtggtgtccctgtggtttgctgagggccagcgctacagccatgctgctggggagtgtgccagaaatgccacctgcacccactacacccagctggtgtgggccaccagcagccagctgggctgcggccgccacctgtgcagcgctggccaggccgccatcgaggcctttgtgtgtgcctacagcccccggggcaactgggaggtgaatggcaagaccatcgtgccctacaagaagggggcctggtgcagcctgtgcacagcctctgtgtctggctgcttcaaggcctgggaccatgctgggggcctgtgtgaggtgcccaggaacccctgcaggatgagctgccagaaccacggccgcctgaacatcagcacctgccactgccactgccccccaggctacacaggccgctactgccaggtgcgctgcagcctgcagtgtgtgcacggccgcttccgggaggaggagtgcagctgtgtgtgtgacatcggctacggcggggcccagtgtgccaccaaggtgcacttccccttccacacctgtgacctgagaattgatggagactgcttcatggtgtcctctgaggccgacacctactaccgggccaggatgaagtgccagaggaagggcggcgtgctggcccagatcaagagccagaaggtgcaggacatcctggccttctacctgggccgcctggagaccaccaatgaagtcatcgacagcgactttgagaccaggaacttctggattggcctgacctacaagacagccaaggacagcttccgctgggccaccggggagcaccaggccttcaccagctttgccttcggccagcctgacaaccacggcctggtgtggctgtctgctgccatgggcttcggcaactgtgtggagctgcaggccagcgctgccttcaactggaatgaccagcgctgcaagaccaggaaccgctacatctgccagtttgcccaggagcacatcagccgctggggccctggcagctag

SEQ ID NO: 8086 - DNA, 297 bp, synthetic construct
  misc_feature 1..297: note = source = /note="Description of Artificial Sequence: Synthetic coding sequence"
  source 1..297: mol_type = other DNA
atggtgctggccatgctgggcgccctgcaccccagggctggcctgagcctcttcctgcacctgatcctggccgtggccctgctgcggagccagcccctgcggagccagaggtctgtgcctgaggccttcagcgcccccctggagctgagccagcccctgagcggcctggtggatgattatggcatcctgcccaagcacccccggccccggggcccccggcccctgctgagccgggcccagcagaggaagagagatggccctgacctggccgagtactactatgatgcccacctgtag

SEQ ID NO: 8087 - DNA, 2742 bp, synthetic construct; identical to SEQ ID NO: 7141
  misc_feature 1..2742: note = source = /note="Description of Artificial Sequence: Synthetic coding sequence"
  source 1..2742: mol_type = other DNA

SEQ ID NO: 8088 - DNA, 678 bp, synthetic construct; identical to SEQ ID NO: 7810
  misc_feature 1..678: note = source = /note="Description of Artificial Sequence: Synthetic coding sequence"
  source 1..678: mol_type = other DNA

SEQ ID NO: 8089 - DNA, 405 bp, synthetic construct
  misc_feature 1..405: note = source = /note="Description of Artificial Sequence: Synthetic coding sequence"
  source 1..405: mol_type = other DNA
atgccccgctgccgctggctgagcctcatcctgctgaccatccccctggccctggtggccaggaaggaccccaagaagaatgaaacaggagtgctgaggaagctgaagcctgtgaatgccagcaatgccaacgtgaagcagtgcctgtggtttgccatgcaggagtacaacaaggagagcgaggacaagtatgtgttcctggtggtgaagaccctgcaggcccagctgcaggtgaccaacctgctggagtacctgattgatgtggagatcgcccggagtgactgcaggaagcccctgagcaccaatgagatctgtgccatccaggagaacagcaagctgaagaggaagctgagctgcagcttcctggtgggcgccctgccctggaatggagagttcaccgtgtag

SEQ ID NO: 8090 - DNA, 1182 bp, synthetic construct; identical to SEQ ID NO: 7135
  misc_feature 1..1182: note = source = /note="Description of Artificial Sequence: Synthetic coding sequence"
  source 1..1182: mol_type = other DNA

SEQ ID NO: 8091 - DNA, 678 bp, synthetic construct; identical to SEQ ID NO: 7810
  misc_feature 1..678: note = source = /note="Description of Artificial Sequence: Synthetic coding sequence"
  source 1..678: mol_type = other DNA

SEQ ID NO: 8092 - DNA, 1410 bp, synthetic construct
  misc_feature 1..1410: note = source = /note="Description of Artificial Sequence: Synthetic coding sequence"
  source 1..1410: mol_type = other DNA
atgatgaggctgggcggccgcctggtgctgaacaccaaggaggagctggccaatgaaaggctgatgaccctgaagattgctgagatgaaggaggccatgaggaccctcatcttccccccatccatgcacttcttccaggccaagcacctgattgaaagaagccaggtgttcaacatcctgaggatgatgcccaagggagctgccctgcacctgcatgacatcggcatcgtgaccatggactggctggtgagaaatgtgacctaccggccccactgccacatctgcttcaccccccggggcatcatgcagttccgctttgcccaccccaccccccggcccagcgagaagtgcagcaagtggatcctgctggaggactacaggaagagggtgcagaatgtgacagaatttgatgacagcctgctgaggaacttcaccctggtgacccagcaccctgaggtgatctacaccaaccagaatgtggtgtggagcaagtttgagaccatcttcttcaccatcagcggcctcatccactacgcccctgtgttccgggactatgtgttccgctccatgcaggagttctatgaagataatgtgctgtacatggagatccgggcccggctgctgcctgtgtatgagctgagcggggagcaccatgatgaggagtggagcgtgaagacctaccaggaggtggcccagaagtttgtggagacccaccctgagttcatcggcatcaagatcatctacagcgaccacaggagcaaggatgtggccgtgattgctgagagcatccgcatggccatgggcctgcgcatcaagttccccaccgtggtggccggctttgacctggtgggccacgaggacaccggccacagcctgcatgactacaaggaggccctgatgatcccagccaaggatggagtgaagctgccctacttcttccacgccggggagacagactggcagggcaccagcattgacaggaacatcctggatgccctgatgctgaacaccacccgcatcggccacggctttgccctgagcaagcaccctgctgtgaggacctacagctggaagaaggacatccccatcgaggtgtgccccatcagcaaccaggtgctgaagctggtgtctgacctgaggaaccaccctgtggccaccctgatggccaccggccaccccatggtgatcagcagtgatgatcctgccatgtttggagccaagggcctgtcctatgacttctatgaggtgttcatgggcatcggcggcatgaaggctgacctgcggaccctgaagcagctggccatgaacagcatcaagtacagcaccctgctggagagcgagaagaacaccttcatggagatctggaagaagcgctgggacaagttcatcgcagatgtggccaccaagtag

SEQ ID NO: 8093 - DNA, 1137 bp, synthetic construct; identical to SEQ ID NO: 7841
  misc_feature 1..1137: note = source = /note="Description of Artificial Sequence: Synthetic coding sequence"
  source 1..1137: mol_type = other DNA

SEQ ID NO: 8094 - DNA, 678 bp, synthetic construct; identical to SEQ ID NO: 7810
  misc_feature 1..678: note = source = /note="Description of Artificial Sequence: Synthetic coding sequence"
  source 1..678: mol_type = other DNA

SEQ ID NO: 8095 - DNA, 846 bp, synthetic construct; identical to SEQ ID NO: 7244
  misc_feature 1..846: note = source = /note="Description of Artificial Sequence: Synthetic coding sequence"
  source 1..846: mol_type = other DNA

SEQ ID NO: 8096 - DNA, 1110 bp, synthetic construct
  misc_feature 1..1110: note = source = /note="Description of Artificial Sequence: Synthetic coding sequence"
  source 1..1110: mol_type = other DNA
atgaagttccagggccccctggcctgcctgctgctggccctgtgcctgggcagcggggaggccggccccctgcagagcggggaggagagcacaggcaccaacattggagaggccctgggccacggcctgggagatgccctgtctgagggcgtgggcaaggccatcggcaaggaggccggcggcgctgctggcagcaaggtgtctgaggccctgggccagggcacccgggaggccgtgggcactggagtgcggcaggtgcccggctttggagtggctgatgccctgggcaacagagtgggggaggccgcccacgccctgggcaacacaggccatgaaattggccggcaggccgaggatgtgatcagacatggagcagatgctgtgcggggctcctggcagggcgtgcccggccacaatggagcctgggagaccagcggcggccacggcatcttcggcagccagggcggcctgggcggccagggccagggcaaccctgggggcctgggcaccccctgggtgcacggctacccaggcaacagcgctggcagctttggcatgaacccccagggcgccccctggggccagggcggcaatggaggcccccccaactttggcaccaacacccagggcgctgtggcccagcccggctacggctctgtgcgggccagcaaccagaatgaaggctgcaccaaccccccaccttctggcagcggcggcggcagcagcaacagcggcggcggcagcggcagccagagcggcagcagcggcagcggcagcaatggagacaacaacaacggcagcagcagcggcggcagcagcagcggcagcagcagcggcggcagcagcggcggcagcagcggcggcagcagcggcaacagcggcggcagcagaggagacagcggcagcgagagctcctggggcagcagcacaggcagcagcagcggcaaccacggcggcagcggcggcggcaatggccacaagccaggcaacagcgagaccagccctggcatgttcaactttgacaccttctggaagaacttcaagagcaagctgggcttcatcaactgggatgccatcaacaaggaccagaggagcagccgcatcccctag

SEQ ID NO: 8097 - DNA, 420 bp, synthetic construct; identical to SEQ ID NO: 7830
  misc_feature 1..420: note = source = /note="Description of Artificial Sequence: Synthetic coding sequence"
  source 1..420: mol_type = other DNA

SEQ ID NO: 8098 - DNA, 516 bp, synthetic construct
  misc_feature 1..516: note = source = /note="Description of Artificial Sequence: Synthetic coding sequence"
  source 1..516: mol_type = other DNA
atgaggcacaacctgggcggcaacctgggggacccccgggcccgggctgtgtctgtgcccctgggcggccgggtggcccgcttcctgcagtgccgcttcctgtttgctggcccctggctgctcttcagcgagatctccttcatcagtgatgtggtgaacaacagcagccctgccctgggcggcaccttccccccagccccctggtggcccccaggccccccacccaccaacttcagcagcctggagctggagccccggggccagcagcctgtggccaaggccgagggcagccccacagccatcctgattggctgcctggtggccatcatcctgctgctgctgctgatcatcgccctgatgctgtggaggctgcactggaggcggctgctgagcaaggtgctggagagccaccccaggaccaggagccctggcctggtgggcatccggcccacccccctgcctgtgagccccatggccctggtgcacctgtgtgaggtggacagcccccaggactag

SEQ ID NO: 8099 - DNA, 192 bp, synthetic construct; identical to SEQ ID NO: 7947
  misc_feature 1..192: note = source = /note="Description of Artificial Sequence: Synthetic coding sequence"
  source 1..192: mol_type = other DNA

SEQ ID NO: 8100 - DNA, 1137 bp, synthetic construct; identical to SEQ ID NO: 7841
  misc_feature 1..1137: note = source = /note="Description of Artificial Sequence: Synthetic coding sequence"
  source 1..1137: mol_type = other DNA

SEQ ID NO: 8101 - DNA, 2535 bp, synthetic construct; identical to SEQ ID NO: 7302
  misc_feature 1..2535: note = source = /note="Description of Artificial Sequence: Synthetic coding sequence"
  source 1..2535: mol_type = other DNA

SEQ ID NO: 8102 - DNA, 339 bp, synthetic construct
  misc_feature 1..339: note = source = /note="Description of Artificial Sequence: Synthetic coding sequence"
  source 1..339: mol_type = other DNA
atgctgacagctgccctggcccctggggccgccaacagccccaccaccaaccctgtgatcctgattgtggacaaggtgctggagacccaggacctgaatggagatggcctgatgaccccagctgagctgatcaacttccctggggtggccctgcggccctacccaccctacatcggcgtgggccccaacagcaacatgtgcagcagaagtgacctgcctgaggacagcaacaccctgtacccaggcagccacctgtggctgcggcatgccctgaacagcaagggcaacctggatgcccggctggatggaggagagaaggccatgcagccccagtggtag

SEQ ID NO: 8103 - DNA, 2676 bp, synthetic construct; identical to SEQ ID NO: 7495
  misc_feature 1..2676: note = source = /note="Description of Artificial Sequence: Synthetic coding sequence"
  source 1..2676: mol_type = other DNA

SEQ ID NO: 8104 - DNA, 2742 bp, synthetic construct; identical to SEQ ID NO: 7141
  misc_feature 1..2742: note = source = /note="Description of Artificial Sequence: Synthetic coding sequence"
  source 1..2742: mol_type = other DNA

SEQ ID NO: 8105 - DNA, 390 bp, synthetic construct; identical to SEQ ID NO: 7503
  misc_feature 1..390: note = source = /note="Description of Artificial Sequence: Synthetic coding sequence"
  source 1..390: mol_type = other DNA

SEQ ID NO: 8106 - DNA, 846 bp, synthetic construct; identical to SEQ ID NO: 7244
  misc_feature 1..846: note = source = /note="Description of Artificial Sequence: Synthetic coding sequence"
  source 1..846: mol_type = other DNA

SEQ ID NO: 8107 - DNA, 444 bp, synthetic construct; identical to SEQ ID NO: 7701
  misc_feature 1..444: note = source = /note="Description of Artificial Sequence: Synthetic coding sequence"
  source 1..444: mol_type = other DNA

SEQ ID NO: 8108 - DNA, 2631 bp, synthetic construct; identical to SEQ ID NO: 6925
  misc_feature 1..2631: note = source = /note="Description of Artificial Sequence: Synthetic coding sequence"
  source 1..2631: mol_type = other DNA

SEQ ID NO: 8109 - DNA, 1749 bp, synthetic construct
  misc_feature 1..1749: note = source = /note="Description of Artificial Sequence: Synthetic coding sequence"
  source 1..1749: mol_type = other DNA
atggacttcctgctggccctggtgctggtgagcagcctgtacctgcaggccgctgctgagtttgatggccgctggccccggcagatcgtgagcagcatcggcctgtgccgctatggaggaagaattgactgctgctggggctgggcccggcagagctggggccagtgccagcccttctacgtgctgcggcagagaattgcccgcatccgctgccagctgaaggctgtgtgccagccccgctgcaagcatggagaatgtattggccccaacaagtgcaagtgccaccctggctacgccggcaagacctgcaaccaggacctgaatgaatgtggcctgaagccccggccctgcaagcaccgctgcatgaacacctacggcagctacaagtgctactgcctgaatggctacatgctgatgccagatggcagctgcagcagcgccctgacctgcagcatggccaactgccagtatggctgtgatgtggtgaagggccagatccgctgccagtgccccagccctggcctgcagctggccccagatggccgcacctgtgtggatgtggatgaatgtgccaccggccgggccagctgcccccgcttccggcagtgtgtgaacaccttcggcagctacatctgcaagtgccacaagggctttgacctgatgtacatcggcggcaagtaccagtgccacgacattgatgagtgcagcctgggccagtaccagtgcagcagctttgcccgctgctacaacatccggggcagctacaagtgcaagtgcaaggagggctaccagggagatggcctgacctgtgtgtacatccccaaggtgatgattgagcccagcggccccatccacgtgcccaagggaaatggcaccatcctgaagggggacaccggcaacaacaactggatcccagatgtgggcagcacctggtggccacccaagaccccctacatcccccccatcatcaccaaccggcccaccagcaagcccaccacccggcccacccccaagcccacccccatccccaccccacctcctcctccacccctgcccacagagctgcggacccccctgccccccaccaccccagagcggcccaccaccggcctgaccaccatcgccccagctgccagcaccccacctgggggcatcaccgtggacaacagagtgcagacagacccccagaagcccagaggagatgtgttcatcccccggcagcccagcaatgacctgtttgagatctttgaaattgaaagaggagtgtctgcagatgatgaggccaaggatgaccccggggtgctggtgcacagctgcaactttgaccacggcctgtgtggctggatccgggagaaggacaatgacctgcactgggagcccatccgggaccctgctgggggccagtacctgactgtgtctgctgccaaggcccctgggggcaaggccgcccggctggtgctgcccctgggccgcctgatgcacagcggggacctgtgcctgtccttccgccacaaggtgacaggcctgcacagcggcaccctgcaggtgtttgtgaggaagcatggagcccacggggccgccctgtggggcagaaatggaggccacggctggaggcagacccagatcaccctgcggggagctgacatcaagtctgtggtgttcaagggggagaagagaagaggccacactggagagatcggcctggatgatgtgtccctgaagaagggccactgcagcgaggagaggtag

SEQ ID NO: 8110 - DNA, 1602 bp, synthetic construct
  misc_feature 1..1602: note = source = /note="Description of Artificial Sequence: Synthetic coding sequence"
  source 1..1602: mol_type = other DNA
atgggcagcagccggctggccgccctgctgctgcccctgctgctgattgtcatcgacctgagtgacagcgctggcatcggcttccgccacctgccccactggaacacccgctgccccctggccagccacacagatgacagcttcaccggcagcagcgcctacatcccctgcaggacctggtgggccctcttcagcaccaagccctggtgtgtgcgggtgtggcactgcagccgctgcctgtgccagcacctgctgagcggcggcagcggcctgcagaggggcctcttccacctgctggtgcagaagagcaagaagagcagcaccttcaagttctacagaagacacaagatgcctgccccagcccagaggaagctgctgccccggcggcacctgtctgagaagagccaccacatcagcatccccagcccagacatcagccacaagggcctgcggagcaagaggacccagcccagcgaccctgagacctgggagagcctgccccggctggacagccagagacatggaggccctgagttctcctttgacctgctgcctgaggcccgggccatccgggtgaccatcagcagcggccctgaggtgtctgtgcggctgtgccaccagtgggccctggagtgtgaggagctgagcagcccctatgatgtgcagaagatcgtgtctgggggccacacagtggagctgccctatgagttcctgctgccctgcctgtgcatcgaggccagctacctgcaggaggacacagtgcggaggaagaagtgccccttccagagctggccagaggcctacggcagtgacttctggaagtctgtgcacttcacagactacagccagcacacccagatggtgatggccctgaccctgcgctgccccctgaagctggaggccgccctgtgccagagacatgactggcacaccctgtgcaaggacctgcccaatgccacagcccgggagagtgatggctggtacgtgctggagaaggtggacctgcacccccagctgtgcttcaagttctcctttggaaacagcagccacgtggagtgcccccaccagacaggcagcctgacctcctggaatgtgtccatggacacccaggcccagcagctgatcctgcacttcagcagcaggatgcacgccaccttctctgctgcctggagcctgcccggcctgggccaggacaccctggtgccccctgtgtacacagtgtcccaggcccggggcagcagccctgtgtccctggacctgatcatccccttcctgcggcccggctgctgcgtgctgctgcacgccagcctgagcagccctggaggagaagatgcctggctgattggagtgggcggctctgtgcccagcggcgtggccgtgcgctgccctgtgtgcctggaggcccccctggtgtctggctgcctgctgcagacccctggggccctggaccccggcacagctggccccccccaccccaccggctgctgcagcggcccccacctgcctgcccccaccgtgcggcccggccccagcgctgccagcgcccccccagcccggggcggcctgggcggggccgccgcccctgggggcagcgctggatag

SEQ ID NO: 8111 - DNA, 1293 bp, synthetic construct
  misc_feature 1..1293: note = source = /note="Description of Artificial Sequence: Synthetic coding sequence"
  source 1..1293: mol_type = other DNA
atgggcgtgtccaagctggacatcctgtacagaaggctgctgctgaccaagctgttcatccggggctggggccggcctgaggacctgaagaggctgtttgagttcaggaagatgattggcaaccgggagcgctgccagaacctggtgtccagtgactaccctgtgcacatcgacaagattgaggagcagagcgactgcaagatcctggatggccactttgtgagccccatggcccactacgtgcctgacatcatgcccattgaatctgtgattgcccgcttccagttcatcgtgcccaaggagtggaacagcaagtacagacctgtgtgcatccacctggccggcaccggggaccaccactactggaggaggaggaccctgatggcccggcccatgatcaaggaggccaggatggccagcctgctgctggagaacccctactacggctgcaggaagcccaaggaccaggtgcgcagcagcctgaagaatgtgtctgacctgtttgtgatgggcggggccctggtgctggagagcgctgccctgctgcactggctggagcgggagggctacggccccctgggcatgacaggcatctccatgggcggccacatggccagcctggccgtgagcaactggcccaagcccatgcccctcatcccctgcctgtcctggagcacagccagcggggtcttcaccaccacagacagcttcaagatgggccaggagtttgtgaagcacttcaccagcagcgctgacaagctgaccaacctgaacctggtgtccaggaccctgaacctggacatcagcaaccaggtggtgtcccagaagccagctgactgccacaacagcagcaagacctctgtgtctgccaccagcgagggcctgctgctgcaggacaccagcaagatgaagcgcttcaaccagaccctgagcaccaacaagagcggctacaccagcaggaacccccagagctaccacctgctgagcaaggagcagagcaggaacagcctgaggaaggagagcctcatcttcatgaagggcgtgatggatgaatgtacccacgtggccaacttctctgtgcctgtggaccccagcctcatcatcgtggtgcaggccaaggaggatgcctacatccccaggactggagtgcgcagcctgcaggagatctggccaggctgtgagatccgctacctggagggcggccacatcagcgcctacctgttcaagcagggcctcttccggcaggccatctatgatgcctttgaccgcttcctgcacaagtatgccaactag

SEQ ID NO: 8112 - DNA, 2631 bp, synthetic construct; identical to SEQ ID NO: 6925
  misc_feature 1..2631: note = source = /note="Description of Artificial Sequence: Synthetic coding sequence"
  source 1..2631: mol_type = other DNA

SEQ ID NO: 8113 - DNA, 237 bp, synthetic construct; identical to SEQ ID NO: 7333
  misc_feature 1..237: note = source = /note="Description of Artificial Sequence: Synthetic coding sequence"
  source 1..237: mol_type = other DNA

SEQ ID NO: 8114 - DNA, 2631 bp, synthetic construct; identical to SEQ ID NO: 6925
  misc_feature 1..2631: note = source = /note="Description of Artificial Sequence: Synthetic coding sequence"
  source 1..2631: mol_type = other DNA

SEQ ID NO: 8115 - DNA, 1257 bp, synthetic construct; identical to SEQ ID NO: 7212
  misc_feature 1..1257: note = source = /note="Description of Artificial Sequence: Synthetic coding sequence"
  source 1..1257: mol_type = other DNA

SEQ ID NO: 8116 - DNA, 390 bp, synthetic construct
  misc_feature 1..390: note = source = /note="Description of Artificial Sequence: Synthetic coding sequence"
  source 1..390: mol_type = other DNA
atgaggaagcccaggaggaagagccggcagaatgctgagggcagaagaagccccagcccctacagcctgaagtgcagccccacccgggagaccctgacctacgcccaggcccagagaattgtggaggtggacattgatggccgcctgcaccgcatcagcatctatgaccccctgaagatcatcacagaagatgagctgacagcccaggacatcacagagtgcaacagcaacaaggaaaattctgagcagccccagtttcctgggaagagcaagaagcccagcagcaagggcaagaagaaggagagctgcagcaagcacgccagcggcaccagcttccacctgccccagcccagcttcaggatggtggacagcggcatccagcctgagtag

SEQ ID NO: 8117 - DNA, 315 bp, synthetic construct
  misc_feature 1..315: note = source = /note="Description of Artificial Sequence: Synthetic coding sequence"
  source 1..315: mol_type = other DNA
atgagggtggtgaccatcgtcatcctgctgtgcttctgcaaggctgctgagctgaggaaggccagccctggctctgtgcgcagccgggtgaaccacggccgggccggcggcggcagaagaggcagcaaccctgtgaagagatatgcccctggcctgccctgtgatgtgtacacctacctgcacgagaagtacctggactgccaggagaggaagctggtgtatgtgctgcccggctggccccaggacctgctgcacatgctgctggccaggaacaagatccgcaccctgaagaacaacatgttcagcaagttctag

SEQ ID NO: 8118 - DNA, 639 bp, synthetic construct; identical to SEQ ID NO: 7993
  misc_feature 1..639: note = source = /note="Description of Artificial Sequence: Synthetic coding sequence"
  source 1..639: mol_type = other DNA

SEQ ID NO: 8119 - DNA, 1005 bp, synthetic construct
  misc_feature 1..1005: note = source = /note="Description of Artificial Sequence: Synthetic coding sequence"
  source 1..1005: mol_type = other DNA
atgctggccctggccaagatcctgctgatcagcaccctcttctacagcctgctgagcggcagccacggcaaggagaaccaggacatcaacaccacccagaacattgctgaggtgttcaagaccatggagaacaagcccatcagcctggagagcgaggccaacctgaacagcgacaaggagaacatcaccaccagcaacctgaaggccagccacagcccccccctgaacctgcccaacaacagccacggcatcacagacttcagcagcaacagcagcgctgagcacagcctgggcagcctgaagcccaccagcaccatcagcaccagccccccactcatccacagctttgtgtccaaggtgccctggaatgcccccatcgcagatgaggacctgctgcccatcagcgcccaccccaatgccaccccagccctgagcagcgagaacttcacctggagcctggtgaatgacacagtgaagaccccagacaacagcagcatcaccgtgtccatcctgagcagcgagcccaccagccccagcgtgacccccctcatcgtggagcccagcggctggctgaccaccaacagcgacagcttcaccggcttcaccccctaccaggagaagaccaccctgcagcccaccctgaagttcaccaacaacagcaagctgttccccaacaccagtgacccccagaaggagaacagaaacacaggcatcgtgtttggagccatcctgggcgccatcctgggcgtgtccctgctgaccctggtgggctacctgctgtgtgggaagaggaagacagacagcttcagccaccggcggctgtatgatgacagaaatgaacctgtgctgcggctggacaatgcccctgagccctatgatgtgtcctttggaaacagcagctactacaaccccaccctgaatgattctgccatgcctgagagcgaggagaatgccagagatggcatccccatggatgacatcccccccctgcggacctctgtgtag

SEQ ID NO: 8120 - DNA, 987 bp, synthetic construct
  misc_feature 1..987: note = source = /note="Description of Artificial Sequence: Synthetic coding sequence"
  source 1..987: mol_type = other DNA
atgggccctgctggctgtgccttcaccctgctgctgctgctgggcatctctgtgtgtggccagcctgtgtacagcagccgggtggtgggcggccaggatgctgctgctggccgctggccctggcaggtgtccctgcactttgaccacaacttcatctgtggcggcagcctggtgtctgagcggctcatcctgacagctgcccactgcatccagcccacctggaccaccttctcctacacagtgtggctgggcagcatcaccgtgggggacagcaggaagagggtgaagtactacgtgtccaagatcgtcatccaccccaagtaccaggacaccacagcagatgtggccctgctgaagctgagcagccaggtgaccttcaccagcgccatcctgcccatctgcctgcccagcgtgaccaagcagctggccatcccccccttctgctgggtgacaggctggggcaaggtgaaggagagcagtgaccgggactaccacagcgccctgcaggaggccgaggtgcccatcatcgaccggcaggcctgtgagcagctgtacaaccccatcggcatcttcctgcctgccctggagcctgtgatcaaggaggacaagatctgtgccggggacacccagaacatgaaggacagctgcaagggggacagcggcggccccctgagctgccacattgatggagtgtggatccagacaggagtggtgtcctggggcctggagtgtgggaagagcctgcccggggtgtacaccaacgtcatctactaccagaagtggatcaatgccaccatcagccgggccaacaacctggacttcagtgacttcctgttccccatcgtgctgctgagcctggccctgctgcggcccagctgtgccttcggccccaacaccatccaccgggtgggcaccgtggccgaggccgtggcctgcatccagggctgggaggagaatgcctggaggttcagcccccggggccgctag

SEQ ID NO: 8121 - DNA, 453 bp, synthetic construct; identical to SEQ ID NO: 7139
  misc_feature 1..453: note = source = /note="Description of Artificial Sequence: Synthetic coding sequence"
  source 1..453: mol_type = other DNA

SEQ ID NO: 8122 - DNA, 234 bp, synthetic construct
  misc_feature 1..234: note = source = /note="Description of Artificial Sequence: Synthetic coding sequence"
  source 1..234: mol_type = other DNA
atgagggtggccggggccgccaagctggtggtggccgtggccgtgttcctgctgaccttctacgtgatcagccaggtgtttgagatcaagatggatgccagcctgggcaacctgtttgcccggagcgccctggacacagctgcccggagcaccaagcccccacgctacaagtgtggcatcagcaaggcctgcccagagaagcactttgccttcaagatggccagcggggcctag

SEQ ID NO: 8123 - DNA, 1143 bp, synthetic construct; identical to SEQ ID NO: 7426
  misc_feature 1..1143: note = source = /note="Description of Artificial Sequence: Synthetic coding sequence"
  source 1..1143: mol_type = other DNA

SEQ ID NO: 8124 - DNA, 558 bp, synthetic construct
  misc_feature 1..558: note = source = /note="Description of Artificial Sequence: Synthetic coding sequence"
  source 1..558: mol_type = other DNA
atgcctggctggctgaccctgcccaccctgtgccgcttcctgctgtgggccttcaccatcttccacaaggcccagggcgaccctgccagccaccctggcccccactacctgctgccccccatccacgaggtgatccacagccacagaggagccacagccaccctgccctgtgtgctgggcaccaccccacccagctacaaggtgcgctggagcaaggtggagcctggagagctgcgggagaccctcatcctgatcaccaacggcctgcacgcccggggctacggccccctgggcggccgggccaggatgaggcggggccaccggctggatgccagcctggtgattgctggggtgcggctggaggatgagggccgctaccgctgtgagctgatcaatggaattgaagatgagagcgtggccctgaccctgagcctggagggcgtggtgttcccctaccagcccagccggggccgctaccagttcaactactatgaggccaagcaggcctgtgaggagcaggacggccgcctggccacctacagccagctgtaccagtag

SEQ ID NO: 8125 - DNA, 375 bp, synthetic construct
  misc_feature 1..375: note = source = /note="Description of Artificial Sequence: Synthetic coding sequence"
  source 1..375: mol_type = other DNA
atgctgatgctgtttgtgtttggagtgctgctgcacgaggtgtccctgagcggccagaatgaggccccacccaacacccacagcatccctggagagcccctgtacaactatgccagcatccggctgcctgaggagcacatccccttcttcctgcacaacaacagacacatcgccaccgtgtgcaggaaggacagcctgtgcccctacaagaagcacctggagaagctgaagtactgctggggctatgagaagagctgcaagccagagttccgcttcggctaccctgtgtgcagctatgtggacatgggctggacagacaccctggagagcgctgaggacatcttctggaagcaggccgactttggctacgcctag

SEQ ID NO: 8126 - DNA, 5859 bp, synthetic construct; identical to SEQ ID NO: 7324
  misc_feature 1..5859: note = source = /note="Description of Artificial Sequence: Synthetic coding sequence"
  source 1..5859: mol_type = other DNA

SEQ ID NO: 8127 - DNA, 612 bp, synthetic construct
  misc_feature 1..612: note = source = /note="Description of Artificial Sequence: Synthetic coding sequence"
  source 1..612: mol_type = other DNA
atgaggacagtggtgctgaccatgaaggcctctgtgattgagatgttcctggtgctgctggtgactggagtgcacagcaacaaggagacagccaagaagatcaagaggcccaagttcaccgtgccccagatcaactgtgatgtgaaggccggcaagatcatcgaccctgagttcatcgtgaagtgcccagctggctgccaggaccccaagtaccacgtgtatggaacagatgtgtatgccagctacagctctgtgtgtggggctgctgtgcacagcggcgtgctggacaacagcggcggcaagatcctggtgaggaaggtggccggccagagcggctacaagggcagctacagcaatggagtgcagagcctgagcctgccccgctggagggagagcttcatcgtgctggagagcaagcccaagaagggcgtgacctaccccagcgccctgacctacagcagcagcaagagccctgctgcccaggccggcaagtgcagccgggtgattgagagcaagcccagcgagagcatgaacacccggcgggtgctgggggacagcggggagatcaacatcctgaccggccaggcccccctggccctggccatcttctag

SEQ ID NO: 8128 - DNA, 2511 bp, synthetic construct
  misc_feature 1..2511: note = source = /note="Description of Artificial Sequence: Synthetic coding sequence"
  source 1..2511: mol_type = other DNA
atggagacccaggagctgcggggggccctggccctgctgctgctgtgcttcttcaccagcgccagccaggacctgcaggtgattgacctgctgactgtgggggagagccggcagatggtggccgtggccgagaagatcagaacagccctgctgacagctggggacatctacctgctgagcaccttccggctgccccccaagcagggcggcgtgctgtttggcctgtacagccggcaggacaacacccgctggctggaggcctctgtggtgggcaagatcaacaaggtgaccaatgccctgcacagcatcctgggggagcagaccaaggccctggtgacccagctgaccctcttcaaccagatcctggtggagctgagagatgacatccgggaccaggtgaaggagatgagcctcatccggaacaccatcatggagtgccaggtgtgtggcttccacgagcagaggagccactgcagccccaacccctgcttccggggcgtggactgcatggaggtgtatgagtacccaggctaccgctgtggcccctgccccccaggcctgcagggcaatggcacccactgcagcgacatcaatgaatgtgcccatgctgacccctgcttccctggcagcagctgcatcaacaccatgcctggcttccactgtgaggcctgcccccggggctacaagggcacccaggtgtctggagtgggcatcgactatgcccgggccagcaagcaggtgtgcaatgacattgatgaatgtaatgatggcaacaatggaggctgtgaccccaacagcatctgcaccaacacagtgggcagcttcaagtgtggcccctgccgcctgggcttcctgggcaaccagagccagggctgcctgcctgcccggacctgccacagccctgcccacagcccctgccacatccacgcccactgcctgtttgaaagaaatggagctgtgtcctgccagtgcaatgtgggctgggccggaaatggaaatgtgtgtggcacagacacagacattgatggctacccagaccaggccctgccctgcatggacaacaacaagcactgcaagcaggacaactgcctgctgacccccaacagcggccaggaggatgctgacaatgatggagtgggggaccagtgtgatgatgatgctgatggagatggcatcaagaatgtggaggacaactgccgcctcttccccaacaaggaccagcagaacagcgacacagacagctttggagatgcctgtgacaactgccccaacgtgcccaacaatgaccagaaggacacagatggaaatggagaaggagatgcctgtgacaatgatgtggatggagatggcatccccaacggcctggacaactgccccaaggtgcccaaccccctgcagacagacagagatgaagatggagtgggagatgcctgtgacagctgcccagagatgagcaaccccacccagacagatgctgacagcgacctggtgggagatgtgtgtgacaccaatgaagattctgatggagatggccaccaggacaccaaggacaactgcccccagctgcccaacagcagccagctggacagcgacaatgatggcctgggagatgaatgtgatggagatgatgacaatgatggcatcccagactatgtgcccccaggccctgacaactgccgcctggtgcccaaccccaaccagaaggacagtgatggaaatggagtgggagatgtgtgtgaagatgactttgacaatgatgctgtggtggaccccctggatgtgtgcccagagagcgctgaggtgaccctgacagacttccgggcctaccagacagtggtgctggaccctgaaggagatgcccagattgaccccaactgggtggtgctgaaccagggcatggagatcgtgcagaccatgaacagcgaccccggcctggccgtgggctacacagccttcaatggagtggactttgagggcaccttccacgtgaacacagtgacagatgatgattatgccggcttcctgttctcctaccaggacagcggccgcttctacgtggtgatgtggaagcagacagagcagacctactggcaggccacccccttccgggctgtggcccagcccggcctgcagctgaaggctgtgacctctgtgtctggccctggagagcacctgagaaatgccctgtggcacacaggccacaccccagaccaggtgcggctgctgtggacagaccccagaaatgtgggctggagggacaagaccagctaccgctggcagctgctgcaccggccccaggtgggctacatccgggtgaagctgtatgagggcccccagctggtggccgacagcggggtcatcatcgacacctccatgaggggcggccgcctgggcgtcttctgcttcagccaggagaacatcatctggagcaacctgcagtaccgctgcaatgacacagtgcctgaggactttgagcccttccggcggcagctgctgcagggccgggtgtag

SEQ ID NO: 8129 - DNA, 1311 bp, synthetic construct
  misc_feature 1..1311: note = source = /note="Description of Artificial Sequence: Synthetic coding sequence"
  source 1..1311: mol_type = other DNA
atgtggcgctgccccctgggcctgctgctgctgctgcccctggccggccacctggccctgggcgcccagcagggccggggccggcgggagctggcccctggcctgcacctgcggggcatcagagatgctgggggccgctactgccaggagcaggacctgtgctgccggggccgggcagatgactgtgccctgccctacctgggcgccatctgctactgtgacctcttctgcaacagaacagtgtctgactgctgcccagacttctgggacttctgcctgggcgtgcccccacccttcccccccatccagggctgcatgcatggaggccgcatctaccctgtgctgggcacctactgggacaactgcaaccgctgctggcaggccggcaaccacagcgccttctggggcatgaccctggatgagggcatccgctaccgcctgggcaccatccggcccagcagctctgtgatgaacatgcatgagatctacacagtgctgaaccctggagaggtgctgcccacagcctttgaggccagcgagaagtggcccaacctgattcatgagcccctggaccagggcaactgtgccggctcctgggccttcagcacagctgctgtggccagtgacagagtgtccatccacagcctgggccacatgacccctgtgctgagcccccagaacctgctgagctgtgacacccaccagcagcagggctgccggggcggccgcctggatggagcctggtggttcctgcggaggagaggagtggtgtctgaccactgctaccccttcagcggccgggagagagatgaggccggccctgccccaccctgcatgatgcacagccgggccatgggccggggcaagaggcaggccacagcccactgccccaacagctatgtgaacaacaatgacatctaccaggtgacccctgtgtaccgcctgggcagcaatgacaaggagatcatgaaggagctgatggagaatggacctgtgcaggccctgatggaggtgcatgaggacttcttcctgtacaagggcggcatctacagccacacccctgtgtccctgggccggcctgagcgctaccgccgccacggcacccacagcgtgaagatcaccggctggggcgaggagaccctgcctgatggccgcaccctgaagtactggacagctgccaacagctggggccctgcctggggcgagcggggccacttccgcatcgtgcggggcgtgaatgaatgtgacatcgagagctttgtgctgggcgtgtggggccgggtgggcatggaggacatgggccaccactag

SEQ ID NO: 8130 - DNA, 942 bp, synthetic construct; identical to SEQ ID NO: 7248
  misc_feature 1..942: note = source = /note="Description of Artificial Sequence: Synthetic coding sequence"
  source 1..942: mol_type = other DNA

SEQ ID NO: 8131 - DNA, 213 bp, synthetic construct
  misc_feature 1..213: note = source = /note="Description of Artificial Sequence: Synthetic coding sequence"
  source 1..213: mol_type = other DNA
atggtggccccagctgcccgggtcttcctgcgggctgtgcgggccgccctgaccagcacagtgcctgacctgctgtgcctgctggcccggggcagcccccggggcctggccagcggccgcctgcccctggccgtgcacagcgcccagcacggccctggcagcggggccccctggctgagaattgcccggcgggccctgagccagaggatctag

SEQ ID NO: 8132 - DNA, 642 bp, synthetic construct
  misc_feature 1..642: note = source = /note="Description of Artificial Sequence: Synthetic coding sequence"
  source 1..642: mol_type = other DNA
atggcccagctgttcctgcccctgctggccgccctggtgctggcccaggccccagctgccctggctgatgtgctggagggggacagcagtgaagatcgggccttccgggtgagaattgctggagatgcccccctgcagggcgtgctgggcggggccctgaccatcccctgccacgtgcactacctgcggcccccacccagccggcgggctgtgctgggcagcccccgggtgaagtggaccttcctgagccggggccgggaggccgaggtgctggtggcccggggcgtgcgggtgaaggtgaatgaggcctaccgcttccgggtggccctgcctgcctacccagccagcctgacagatgtgtccctggccctgtctgagctgcggcccaatgacagcggcatctaccgctgtgaggtgcagcacggcattgatgacagcagtgatgctgtggaggtgaaggtgaagggcgtggtgttcctgtaccgggagggcagcgcccgctatgccttctccttcagcggggcccaggaggcctgtgcccgcatcggggcccacatcgccaccccagagcagctgtatgctgcctacctgggcggctatgagcagtgtgatgctggctggctgagtgaccagacagtgtag

SEQ ID NO: 8133 - DNA, 237 bp, synthetic construct; identical to SEQ ID NO: 7333
  misc_feature 1..237: note = source = /note="Description of Artificial Sequence: Synthetic coding sequence"
  source 1..237: mol_type = other DNA

SEQ ID NO: 8134 - DNA, 651 bp, synthetic construct
  misc_feature 1..651: note = source = /note="Description of Artificial Sequence: Synthetic coding sequence"
  source 1..651: mol_type = other DNA
atgtctgacctgctgctgctgggcctcatcggcggcctgaccctgctgctgctgctgaccctgctggcctttgctggctacagcggcctgctggccggcgtggaggtgtctgctggcagcccccccatcagaaatgtgacagtggcctacaagttccacatgggcctgtatggagagaccggccgcctcttcacagagagctgcagcatcagccccaagctgcggagcattgctgtgtactatgacaacccccacatggtgcccccagacaagtgccgctgtgctgtgggcagcatcctgtctgagggggaggagagccccagccctgagctgattgacctgtaccagaagtttggcttcaaggtgttctccttccctgcccccagccacgtggtgacagccaccttcccctacaccaccatcctgagcatctggctggccaccaggagagtgcacccagccctggacacctacatcaaggagaggaagctgtgtgcctacccccggctggagatctaccaggaggaccagatccacttcatgtgccccctggcccggcagggcgacttctacgtgcctgagatgaaggagacagagtggaagtggaggggcctggtggaggccatcgacacccaggtggatggcacctag

SEQ ID NO: 8135 - DNA, 453 bp, synthetic construct; identical to SEQ ID NO: 7139
  misc_feature 1..453: note = source = /note="Description of Artificial Sequence: Synthetic coding sequence"
  source 1..453: mol_type = other DNA

SEQ ID NO: 8136 - DNA, 171 bp, synthetic construct
  misc_feature 1..171: note = source = /note="Description of Artificial Sequence: Synthetic coding sequence"
  source 1..171: mol_type = other DNA
atgaagacaggcctcttcttcctgtgcctgctgggcacagctgctgccatccccaccaatgcccggctgctgagtgaccacagcaagcccacagctgagaccgtggccccagacaacacagccatccccagcctgcgggcagaggccgaggagaatgagaaggagacctag

SEQ ID NO: 8137 - DNA, 2346 bp, synthetic construct
  misc_feature 1..2346: note = source = /note="Description of Artificial Sequence: Synthetic coding sequence"
  source 1..2346: mol_type = other DNA
atggctgtggccgaggtgtccaggacctgcctgctgactgtgcgggtgctgcaggcccaccggctgcccagcaaggacctggtgacccccagcgactgctacgtgaccctgtggctgcccacagcctgcagccaccggctgcagaccaggacagtgaagaacagcagcagccctgtgtggaaccagagcttccacttccgcatccaccggcagctgaagaatgtgatggagctgaaggtgtttgaccaggacctggtgactggagatgatcctgtgctgtctgtgctgtttgatgctggcaccctgcgggccggggagttccggcgggagagcttcagcctgagcccccagggcgagggccgcctggaggtggagttccggctgcagagcctggccgacagaggagagtggctggtgtccaatggagtgctggtggcccgggagctgagctgcctgcacgtgcagctggaggagactggagaccagaagagcagcgagcaccgggtgcagctggtggtgcccggcagctgtgagggcccccaggaggcctctgtgggcaccggcaccttccgcttccactgcccagcctgctgggagcaggagctgagcatccggctgcaggatgcccctgaggagcagctgaaggcccccctgagcgccctgcccagcggccaggtggtgcggctggtgttccccaccagccaggagcccctgatgagggtggagctgaagaaggaggccggcctgcgggagctggccgtgcggctgggcttcggcccctgtgccgaggagcaggccttcctgagcaggaggaagcaggtggtggccgccgccctgcggcaggccctgcagctggatggagacctgcaggaggatgagatccctgtggtggccatcatggccaccggcggcggcatccgggccatgaccagcctgtatggccagctggccggcctgaaggagctgggcctgctggactgtgtgtcctacatcaccggggccagcggcagcacctgggccctggccaacctgtatgaggaccctgagtggagccagaaggacctggccggccccacagagctgctgaagacccaggtgaccaagaacaagctgggcgtgctggcccccagccagctgcagcgctaccggcaggagctggccgagcgggcccggctgggctaccccagctgcttcaccaacctgtgggccctgatcaatgaggccctgctgcatgatgagccccatgaccacaagctgagtgaccagcgggaggccctgagccacggccagaaccccctgcccatctactgtgccctgaacaccaagggccagagcctgaccacctttgaatttggagagtggtgtgagttcagcccctatgaggtgggcttccccaagtatggagccttcatccccagcgagctgtttggcagcgagttcttcatgggccagctgatgaagaggctgcctgagagccgcatctgcttcctggagggcatctggagcaacctgtatgctgccaacctgcaggacagcctgtactgggccagcgagcccagccagttctgggaccgctgggtgaggaaccaggccaacctggacaaggagcaggtgcccctgctgaagattgaggagccccccagcacagctggaagaattgctgagttcttcacagacctgctgacctggaggcccctggcccaggccacccacaacttcctgcggggcctgcacttccacaaggactacttccagcacccccacttcagcacctggaaggccaccaccctggatggcctgcccaaccagctgaccccatctgagccccacctgtgcctgctggatgtgggctacctgatcaacaccagctgcctgcccctgctgcagcccaccagagatgtggacctgatcctgagcctggactacaacctgcatggagccttccagcagctgcagctgctgggccgcttctgccaggagcagggcatccccttcccccccatcagccccagccctgaggagcagctgcagccccgggagtgccacaccttcagtgaccccacctgccctggggccccagctgtgctgcacttccccctggtgtctgacagcttccgggagtacagcgcccctggggtgcggaggaccccagaggaggccgccgccggggaggtgaacctgagcagcagtgacagcccctaccactacaccaaggtgacctacagccaggaggatgtggacaagctgctgcacctgacccactacaacgtgtgcaacaaccaggagcagctgctggaggccctgcggcaggccgtgcagaggcggcggcagaggcggccccactag

SEQ ID NO: 8138 - DNA, 219 bp, synthetic construct
  misc_feature 1..219: note = source = /note="Description of Artificial Sequence: Synthetic coding sequence"
  source 1..219: mol_type = other DNA
atggctgctgccacccggggctgccggccctggggcagcctgctgggcctgctgggcctggtgtctgctgctgctgctgcctgggacctggccagcctgcgctgcaccctgggcgccttctgtgaatgtgacttccggccagacctgcctgagggcagcgaggagctgggcccccgggagccccactgcctgtggcccctgcccctgcccctgaggtag

SEQ ID NO: 8139 - DNA, 243 bp, synthetic construct
  misc_feature 1..243: note = source = /note="Description of Artificial Sequence: Synthetic coding sequence"
  source 1..243: mol_type = other DNA
atgaaggtgttcttcctgtttgctgtgctcttctgcctggtgcagaccaacagcggagatgtgcccccaggcatccggaacaccatctgccacatgcagcagggcatctgccgcctcttcttctgccacagcggggagaagaagagggacatctgcagcgacccctggaaccgctgctgcgtgagcaacacagatgaggagggcaaggagaagccagagatggatggccgcagcggcatctag

SEQ ID NO: 8140 - DNA, 861 bp, synthetic construct
  misc_feature 1..861: note = source = /note="Description of Artificial Sequence: Synthetic coding sequence"
  source 1..861: mol_type = other DNA
atgggccctgaggccctgagcagcctgctgctgctgctgctggtggccagcggagatgctgacatgaagggccactttgatcctgccaagtgccgctatgccctgggcatgcaggacaggaccatcccagacagcgacatcagcgccagcagctcctggagcgacagcacagctgcccggcacagccggctggagagcagtgatggagatggagcctggtgcccagctggcagcgtcttccccaaggaggaggagtacctgcaggtggacctgcagaggctgcacctggtggccctggtgggcacccagggcagacatgctgggggcctgggcaaggagttcagccgcagctaccgcctgcgctacagcagagatggaagacgctggatgggctggaaggaccgctggggccaggaggtgatctctggaaatgaagatcctgagggcgtggtgctgaaggacctgggcccccccatggtggcccggctggtgcgcttctaccccagggctgacagagtgatgtctgtgtgcctgcgggtggagctgtatggctgcctgtggagagatggcctgctgagctacacagcccctgtgggccagaccatgtacctgtctgaggccgtgtacctgaatgacagcacctatgatggccacacagtgggcggcctgcagtatggaggcctgggccagctggctgatggagtggtgggcctggatgacttcaggaagagccaggagctgcgggtgtggccaggctatgactatgtgggctggagcaaccacagcttcagcagcggctacgtggagatggagtttgaatttgaccggctgcgggccttccaggccatgcaggtgcactag

SEQ ID NO: 8141 - DNA, 858 bp, synthetic construct
  misc_feature 1..858: note = source = /note="Description of Artificial Sequence: Synthetic coding sequence"
  source 1..858: mol_type = other DNA
atgaggggccagggcaggaaggagagcctgagtgacagccgggacctggatggcagctatgaccagctgaccggccaccccccaggccccaccaagaaggccctgaagcagcgcttcctgaagctgctgccctgctgcggcccccaggccctgcccagcgtgtctgaaattggccgggtcttccgcttcctgggggacagcagcctgcccagcgccctggccgccccagccagcctgcggccccaccggccccggctgctggaccctgattctgtggatgatgaatttgagctgagcacagtgtgccacaggcctgagggcctggagcagctgcaggagcagaccaagttcaccaggaaggagctgcaggtgctgtaccggggcttcaagaatgaatgtccttctggaattgtgaatgaggagaacttcaagcagatctacagccagttcttcccccagggcgacagcagcacctacgccaccttcctgttcaatgcctttgacaccaaccatgatggctctgtgtcctttgaggactttgtggccggcctgagcgtcatcctgcggggcaccgtggatgaccggctgaactgggccttcaacctgtatgacctgaacaaggatggctgcatcaccaaggaggagatgctggacatcatgaagagcatctatgacatgatgggcaagtacacctacccagccctgcgggaggaggccccccgggagcacgtggagagcttcttccagaagatggacaggaacaaggatggagtggtgaccatcgaggagttcatcgagagctgccagaaggatgagaacatcatgaggtccatgcagctgtttgacaacgtcatctag

SEQ ID NO: 8142 - DNA, 1311 bp, synthetic construct; identical to SEQ ID NO: 7298
  misc_feature 1..1311: note = source = /note="Description of Artificial Sequence: Synthetic coding sequence"
  source 1..1311: mol_type = other DNA

SEQ ID NO: 8143 - DNA, 1218 bp, synthetic construct; identical to SEQ ID NO: 6943
  misc_feature 1..1218: note = source = /note="Description of Artificial Sequence: Synthetic coding sequence"
  source 1..1218: mol_type = other DNA

SEQ ID NO: 8144 - DNA, 300 bp, synthetic construct
  misc_feature 1..300: note = source = /note="Description of Artificial Sequence: Synthetic coding sequence"
  source 1..300: mol_type = other DNA
atgctggccctgctggtgctggtgacagtggccctggccagcgcccaccacggcggggagcactttgaaggagagaaggtgttccgggtgaatgtggaggatgagaaccacatcaacatcatccgggagctggccagcaccacccagattgacttctggaagccagattctgtgacccagatcaagccccacagcacagtggacttccgggtgaaggccgaggacacagtgacagtggagaatgtgctgaagcagaatgagctgcagtacaaggtgctgatcagcaacctgaggaactag

SEQ ID NO: 8145 - DNA, 471 bp, synthetic construct
  misc_feature 1..471: note = source = /note="Description of Artificial Sequence: Synthetic coding sequence"
  source 1..471: mol_type = other DNA
atgctgctgctgctgctgctggcccccctcttcctgcggcccccaggagctggaggagcccagaccccaaatgccaccagcgagggctgccagatcatccaccccccctgggagggcggcatccgctaccggggcctgacccgggaccaggtgaaggccatcaacttcctgcctgtggactatgaaattgaatatgtgtgccgcggggagcgggaggtggtgggccccaaggtgaggaagtgcctggccaacggctcctggacagacatggacacccccagccgctgtgtgcgcatctgcagcaagagctacctgaccctggagaatggcaaggtgttcctgactggaggagacctgcctgccctggatggagcccgggtggacttccgctgtgaccctgacttccacctggtgggcagcagccgcagcatctgcagccagggccagtggagcacccccaagccccactag

SEQ ID NO: 8146 - DNA, 249 bp, synthetic construct
  misc_feature 1..249: note = source = /note="Description of Artificial Sequence: Synthetic coding sequence"
  source 1..249: mol_type = other DNA
atgggccgggtcttcctgactggagagaaggccaacagcatcctgaagcgctacccccgggccaacggcttctttgaggagatccggcagggcaacatcgagcgggagtgcaaggaggagttctgcacctttgaggaggcccgggaggcctttgagaacaatgagaagacaggcctggtgctgctgccccggctggagtgcagctgtgaacatggcagcctgcagccccagctgcctgtgcccaagtag

SEQ ID NO: 8147 - DNA, 372 bp, synthetic construct
  misc_feature 1..372: note = source = /note="Description of Artificial Sequence: Synthetic coding sequence"
  source 1..372: mol_type = other DNA
atgcagggcaccccaggcggcggcaccaggcctggccccagccctgtggacaggaggaccctgctggtgttctccttcatcctggccgccgccctgggccagatgaacttcaccggggaccaggtgctgcgggtgctggccaaggatgagaagcagctgagcctgctgggggacctggagggcctgaagccccagaaggtggacttctggaggggccctgcccggcccagcctgcctgtggacatgagggtgcccttcagcgagctgaaggacatcaaggcctacctggagagccacggcctggcctacagcatcatgatcaaggacatccaggtgctgctggatgaggagcggcaggccatggccaagtag

SEQ ID NO: 8148 - DNA, 840 bp, synthetic construct
  misc_feature 1..840: note = source = /note="Description of Artificial Sequence: Synthetic coding sequence"
  source 1..840: mol_type = other DNA
atgggccgggtcttcctgactggagagaaggccaacagcatcctgaagcgctacccccgggccaacggcttctttgaggagatccggcagggcaacatcgagcgggagtgcaaggaggagttctgcacctttgaggaggcccgggaggcctttgagaacaatgagaagaccatcactggagtcatcctgctggccgtgggcgtgtggggcaagctgaccctgggcacctacatcagcctgattgctgagaacagcaccaatgccccctacgtgctgattggaacaggcaccaccatcgtggtgtttggcctgtttggctgctttgccacctgccggggcagcccctggatgctgaagctgtatgccatgttcctgagcctggtgttcctggccgagctggtggccggcatcagcggctttgtgttcagacatgagatcaaggacaccttcctgcggacctacacagatgccatgcagacctacaatggaaatgatgagaggagcagagctgtggaccacgtgcagaggagcctgagctgctgcggcgtgcagaactacaccaactggagcaccagcccctacttcctggagcacggcatcccccccagctgctgcatgaatgaaacagactgcaacccccaggacctgcacaacctgactgtggccgccaccaaggtgaaccagaagggctgctatgacctggtgaccagcttcatggagaccaacatgggcatcatcgccggcgtggcctttggaattgccttcagccagctgattggcatgctgctggcctgctgcctgagccgcttcatcacagccaaccagtatgagatggtgtag

SEQ ID NO: 8149 - DNA, 564 bp, synthetic construct
  misc_feature 1..564: note = source = /note="Description of Artificial Sequence: Synthetic coding sequence"
  source 1..564: mol_type = other DNA
atgtggtgtgccagccctgtggccgtggtggccttctgtgccggcctgctggtgagccaccctgtgctgacccagggccaggaggccggcggccggcctggagctgactgtgaggtgtgcaaggagttcctgaaccgcttctacaagagcctgattgacagaggagtgaacttcagcctggacaccatcgagaaggagctgatctccttctgcctggacaccaagggcaaggagaaccggctgtgctactacctgggcgccaccaaggatgctgccaccaagatcctgtctgaggtgacccggcccatgtctgtgcacatgcctgccatgaagatctgtgagaagctgaagaagctggacagccagatctgtgagctgaagtatgagaagaccctggacctggcctctgtggacctgaggaagatgagggtggccgagctgaagcagatcctgcacagctggggcgaggagtgccgggcctgtgccgagaagacagattatgtgaacctgatccaggagctggcccccaagtatgctgccacccaccccaagacagagctgtag

SEQ ID NO: 8150 - DNA, 1311 bp, synthetic construct; identical to SEQ ID NO: 7298
  misc_feature 1..1311: note = source = /note="Description of Artificial Sequence: Synthetic coding sequence"
  source 1..1311: mol_type = other DNA

SEQ ID NO: 8151 - DNA, 450 bp, synthetic construct
  misc_feature 1..450: note = source = /note="Description of Artificial Sequence: Synthetic coding sequence"
  source 1..450: mol_type = other DNA
atgggccgggtcttcctgactggagagaaggccaacagcatcctgaagcgctacccccgggccaacggcttctttgaggagatccggcagggcaacatcgagcgggagtgcaaggaggagttctgcacctttgaggaggcccgggaggcctttgagaacaatgagaagaccaaggagttctggagcacctacaccaaggcccagcagggcgagagcaacagaggaagtgactggttccagttctacctgaccttccccctcatcttcggcctcttcatcatcctgctggtgatcttcctgatctggcgctgcttcctgaggaacaagacccggcggcagacagtgacagagggccacatccccttcccccagcacctgaacatcatcaccccacctcctcctccagatgaggtgtttgacagcagcggcctgagccctggcttcctgtag

SEQ ID NO: 8152 - DNA, 936 bp, synthetic construct
  misc_feature 1..936: note = source = /note="Description of Artificial Sequence: Synthetic coding sequence"
  source 1..936: mol_type = other DNA
atgctgtaccagaccatcaacagcctgaagaccaagaaccccaagctgaagatcctgctgagcatcggcggctacctgtttggcagcaagggcttccaccccatggtggacagcagcaccagccggctggagttcatcaacagcatcatcctcttcctgaggaaccacaactttgatggcctggatgtgtcctggatctacccagaccagaaggagaacacccacttcaccgtgctgattcatgagctggccgaggccttccagaaggacttcaccaagagcaccaaggagcggctgctgctgacagctggggtgtctgctggccggcagatgattgacaacagctaccaggtggagaagctggccaaggacctggacttcatcaacctgctgagctttgacttccacggctcctgggagaagcccctcatcaccggccacaacagccccctgagcaagggctggcaggaccggggccccagcagctactacaacgtggagtatgctgtgggctactggatccacaagggcatgcccagcgagaaggtggtgatgggcatccccacctacggccacagcttcaccctggccagcgctgagaccaccgtgggcgccccagccagcggccctggagctgctggccccatcacagagagcagcggcttcctggcctactatgagatctgccagttcctgaagggggccaagatcacccggctgcaggaccagcaggtgccctatgctgtgaagggcaaccagtgggtgggctatgatgatgtgaagtccatggagaccaaggtgcagttcctgaagaacctgaacctgggcggggccatgatctggagcattgacatggatgacttcaccgggaagagctgcaaccagggcccctaccccctggtgcaggccgtgaagaggagcctgggcagcctgtag

SEQ ID NO: 8153 - DNA, 621 bp, synthetic construct
  misc_feature 1..621: note = source = /note="Description of Artificial Sequence: Synthetic coding sequence"
  source 1..621: mol_type = other DNA
atggacaccatcttcctgtggagcctgctgctgctcttcttcggcagccaggccagccgctgcagcgcccagaagaacacagaatttgctgtggacctgtaccaggaggtgtccctgagccacaaggacaacatcatcttcagccccctgggcatcaccctggtgctggagatggtgcagctgggcgccaagggcaaggcccagcagcagatccggcagaccctgaagcagcaggagaccagcgctggggaggagttctttgtgctgaagagcttcttcagcgccatcagcgagaagaagcaggagttcaccttcaacctggccaatgccctgtacctgcaggagggcttcaccgtgaaggagcagtacctgcacggcaacaaggagttcttccagagcgccatcaagctggtggacttccaggatgccaaggcctgtgccgagatgatcagcacctgggtggagaggaagacagatggcaagatcaaggacatgttttctggagaggagtttggccccctgacccggctggtgctggtgaatgccatctacttcaagggggactggaagcagaagttcaggaaggaggacacccagctgatcaacttcaccaagaagtag

SEQ ID NO: 8154 - DNA, 1218 bp, synthetic construct; identical to SEQ ID NO: 6943
  misc_feature 1..1218: note = source = /note="Description of Artificial Sequence: Synthetic coding sequence"
  source 1..1218: mol_type = other DNA

SEQ ID NO: 8155 - DNA, 399 bp, synthetic construct
  misc_feature 1..399: note = source = /note="Description of Artificial Sequence: Synthetic coding sequence"
  source 1..399: mol_type = other DNA
atgctgatcttctggaccatcaccctcttcctgctgggcgccgccaagggcaaggaggtgtgctatgaggacctgggctgcttcagtgacacagagccctggggcggcacagccatccggcccctgaagatcctgccctggagccctgagaagattggcacccgcttcctgctgtacaccaatgaaaaccccaacaacttccagatcctgctgctgagtgaccccagcaccatcgaggccagcaacttccagatggacaggaagacccgcttcatcatccacggcttcatcgacaagggagatgagagctgggtgacagacatgtgcaagaagctgtttgaggtggaggaggtgaactgcatctgtgtggactggaagaagggcagccaggccacctag

SEQ ID NO: 8156 - DNA, 606 bp, synthetic construct; identical to SEQ ID NO: 7499
  misc_feature 1..606: note = source = /note="Description of Artificial Sequence: Synthetic coding sequence"
  source 1..606: mol_type = other DNA

SEQ ID NO: 8157 - DNA, 1086 bp, synthetic construct
  misc_feature 1..1086: note = source = /note="Description of Artificial Sequence: Synthetic coding sequence"
  source 1..1086: mol_type = other DNA
atggccagcctgggcctgctgctgctgctgctgctgacagccctgccccccctgtggagcagcagcctgcccggcctggacacagctgagagcaaggccaccatcgctgacctgatcctgagcgccctggagcgggccaccgtcttcctggagcagaggctgcctgagatcaacctggatggcatggtgggcgtgcgggtgctggaggagcagctgaagtctgtgcgggagaagtgggcccaggagcccctgctgcagcccctgagcctgcgggtgggcatgctgggggagaagctggaggccgccatccagaggagcctgcactacctgaagctgagtgaccccaagtacctgcgggagttccagctgaccctgcagcccggcttctggaagctgccccacgcctggatccacacagatgccagcctggtgtaccccaccttcggcccccaggacagcttcagcgaggagaggagtgatgtgtgcctggtgcagctgctgggcactggaacagacagcagcgagccctgtggcctgagtgacctgtgccgcagcctgatgaccaagccaggctgcagcggctactgcctgagccaccagctgctcttcttcctgtgggccaggatgaggggctgcacccagggccccctgcagcagagccaggactacatcaacctcttctgtgccaacatgatggacctgaacagaagagctgaggccatcggctacgcctaccccacccgggacatcttcatggagaacatcatgttctgtggcatgggcggcttcagtgacttctacaagctgcgctggctggaggccatcctgtcctggcagaagcagcaggagggctgcttcggggagccagatgctgaagatgaggagctgagcaaggccatccagtaccagcagcacttcagccggcgggtgaagaggcgggagaagcagttcccagatggctgcagcagccacaacacagccacagctgtggccgccctgggcggcttcctgtacatcctggccgagtaccccccagccaaccgggagccccaccccagcaccccacctccacccagcagcaggtag

SEQ ID NO: 8158 - DNA, 162 bp, synthetic construct
  misc_feature 1..162: note = source = /note="Description of Artificial Sequence: Synthetic coding sequence"
  source 1..162: mol_type = other DNA
atgtggaccaacttcttcaagctgcggctcttctgctgcctgctggccgtgctgatggtggtggtgctggtgatcaacgtgacccaggtggagtacctggaccatgaaacagtgtctgccaccttcatcgacagcagcggccagtttgtgagcagccagtag

SEQ ID NO: 8159 - DNA, 1305 bp, synthetic construct
  misc_feature 1..1305: note = source = /note="Description of Artificial Sequence: Synthetic coding sequence"
  source 1..1305: mol_type = other DNA
atggccagcctgggcctgctgctgctgctgctgctgacagccctgccccccctgtggagcagcagcctgcccggcctggacacagctgagagcaaggccaccatcgctgacctgatcctgagcgccctggagcgggccaccgtcttcctggagcagaggctgcctgagatcaacctggatggcatggtgggcgtgcgggtgctggaggagcagctgaagtctgtgcgggagaagtgggcccaggagcccctgctgcagcccctgagcctgcgggtgggcatgctgggggagaagctggaggccgccatccagaggagcctgcactacctgaagctgagtgaccccaagtacctgcgggagttccagctgaccctgcagcccggcttctggaagctgccccacgcctggatccacacagatgccagcctggtgtaccccaccttcggcccccaggacagcttcagcgaggagaggagtgatgtgtgcctggtgcagctgctgggcactggaacagacagcagcgagccctgtggcctgagtgacctgtgccgcagcctgatgaccaagccaggctgcagcggctactgcctgagccaccagctgctcttcttcctgtgggccaggatgaggggctgcacccagggccccctgcagcagagccaggactacatcaacctcttctgtgccaacatgatggacctgaacagaagagctgaggccatcggctacgcctaccccacccgggacatcttcatggagaacagcgtgacaggccaccctgtgttctacctgcccctgtgtgacagcttcctgccccccaaggccgcccctgtgacagagctgtacacagatggccctgtgatgttctgtggcatgggcggcttcagtgacttctacaagctgcgctggctggaggccatcctgtcctggcagaagcagcaggagggctgcttcggggagccagatgctgaagatgaggagctgagcaaggccatccagtaccagcagcacttcagccggcgggtgaagaggcgggagaagcagttcccagacagccgctctgtggcccaggccggcgtgcagtggaggaacctgggcagcctgcagcccctgcccccaggcttcaagcagttcagctgcctgatcctgcccagctcctgggactacagatctgtgcccccctacctggccaacttctacatcttcctggtggagaccggcttccaccacgtggcccacgccggcctggagctgctgatcagccgggacccccccaccagcggcagccagagcgtgggcctgtag

SEQ ID NO: 8160 - DNA, 1311 bp, synthetic construct; identical to SEQ ID NO: 7298
  misc_feature 1..1311: note = source = /note="Description of Artificial Sequence: Synthetic coding sequence"
  source 1..1311: mol_type = other DNA

SEQ ID NO: 8161 - DNA, 1218 bp, synthetic construct; identical to SEQ ID NO: 6943
  misc_feature 1..1218: note = source = /note="Description of Artificial Sequence: Synthetic coding sequence"
  source 1..1218: mol_type = other DNA

SEQ ID NO: 8162 - DNA, 510 bp, synthetic construct
  misc_feature 1..510: note = source = /note="Description of Artificial Sequence: Synthetic coding sequence"
  source 1..510: mol_type = other DNA
atgctgtaccagaccatcaacagcctgaagaccaagaaccccaagctgaagatcctgctgagcatcggcggctacctgtttggcagcaagggcttccaccccatggtggacagcagcaccagccggctggagttcatcaacagcatcatcctcttcctgaggaaccacaactttgatggcctggatgtgtcctggatctacccagaccagaaggagaacacccacttcaccgtgctgattcatgagctggccgaggccttccagaaggacttcaccaagagcaccaaggagcggctgctgctgacagctggggtgtctgctggccggcagatgattgacaacagctaccaggtggagaagctggccaaggacctggacttcatcaacctgctgagctttgacttccacggctcctgggagaagcccctcatcaccggccacaacagccccctgagcaagggctggcaggaccggggccccagcagctactacaacgtggagtatgcctag

SEQ ID NO: 8163 - DNA, 1209 bp, synthetic construct
  misc_feature 1..1209: note = source = /note="Description of Artificial Sequence: Synthetic coding sequence"
  source 1..1209: mol_type = other DNA
atggccagcctgggcctgctgctgctgctgctgctgacagccctgccccccctgtggagcagcagcctgcccggcctggacacagctgagagcaaggccaccatcgctgacctgatcctgagcgccctggagcgggccaccgtcttcctggagcagaggctgcctgagatcaacctggatggcatggtgggcgtgcgggtgctggaggagcagctgaagtctgtgcgggagaagtgggcccaggagcccctgctgcagcccctgagcctgcgggtgggcatgctgggggagaagctggaggccgccatccagaggagcctgcactacctgaagctgagtgaccccaagtacctgcgggagttccagctgaccctgcagcccggcttctggaagctgccccacgcctggatccacacagatgccagcctggtgtaccccaccttcggcccccaggacagcttcagcgaggagaggagtgatgtgtgcctggtgcagctgctgggcactggaacagacagcagcgagccctgtggcctgagtgacctgtgccgcagcctgatgaccaagccaggctgcagcggctactgcctgagccaccagctgctcttcttcctgtgggccaggatgaggggctgcacccagggccccctgcagcagagccaggactacatcaacctcttctgtgccaacatgatggacctgaacagaagagctgaggccatcggctacgcctaccccacccgggacatcttcatggagaacatcatgttctgtggcatgggcggcttcagtgacttctacaagctgcgctggctggaggccatcctgtcctggcagaagcagcaggagggctgcttcggggagccagatgctgaagatgaggagctgagcaaggccatccagtaccagcagcacttcagccggcgggtgaagaggcgggagaagcagttcccagacagccgctctgtggcccaggccggcgtgcagtggaggaacctgggcagcctgcagcccctgcccccaggcttcaagcagttcagctgcctgatcctgcccagctcctgggactacagatctgtgcccccctacctggccaacttctacatcttcctggtggagaccggcttccaccacgtggcccacgccggcctggagctgctgatcagccgggacccccccaccagcggcagccagagcgtgggcctgtag

SEQ ID NO: 8164 - DNA, 1680 bp, synthetic construct; identical to SEQ ID NO: 6964
  misc_feature 1..1680: note = source = /note="Description of Artificial Sequence: Synthetic coding sequence"
  source 1..1680: mol_type = other DNA

SEQ ID NO: 8165 - DNA, 402 bp, synthetic construct
  misc_feature 1..402: note = source = /note="Description of Artificial Sequence: Synthetic coding sequence"
  source 1..402: mol_type = other DNA
atggccatggtgtctgccatgtcctgggtgctgtacctgtggatcagcgcctgtgccatgctgctgtgccacggcagcctgcagcacaccttccagcagcaccacctgcacaggcctgagggcggcacctgtgaggtgattgctgcccaccgctgctgcaacaagaaccgcatcgaggagaggagccagacagtgaagtgcagctgcctgcccgggaaggtggccggcaccaccaggaaccggcccagctgtgtggatgccagcatcgtgattggcaagtggtggtgtgagatggagccctgcctggagggggaggagtgcaagaccctgcctgacaacagcggctggatgtgtgccaccggcaacaagatcaagaccacccgcatccaccccaggacatag

SEQ ID NO: 8166 - DNA, 606 bp, synthetic construct; identical to SEQ ID NO: 7499
  misc_feature 1..606: note = source = /note="Description of Artificial Sequence: Synthetic coding sequence"
  source 1..606: mol_type = other DNA

SEQ ID NO: 8167 - DNA, 606 bp, synthetic construct; identical to SEQ ID NO: 7499
  misc_feature 1..606: note = source = /note="Description of Artificial Sequence: Synthetic coding sequence"
  source 1..606: mol_type = other DNA

SEQ ID NO: 8168 - DNA, 732 bp, synthetic construct; identical to SEQ ID NO: 8058
  misc_feature 1..732: note = source = /note="Description of Artificial Sequence: Synthetic coding sequence"
  source 1..732: mol_type = other DNA

SEQ ID NO: 8169 - DNA, 258 bp, synthetic construct
  misc_feature 1..258: note = source = /note="Description of Artificial Sequence: Synthetic coding sequence"
  source 1..258: mol_type = other DNA
atgaagatccctgtgctgcctgctgtggtgctgctgagcctgctggtgctgcacagcgcccagggcgccaccctgggcggccctgaggaggagagcaccattgaaaattatgccagcaggcctgaggccttcaaggcagatgagttcctgaactggcacgccctgtttgagagcatcaagaggaagctgcccttcctgaactgggatgccttccccaagctgaagggcctgcggagcgccaccccagatgcccagtag

SEQ ID NO: 8170 - DNA, 348 bp, synthetic construct
  misc_feature 1..348: note = source = /note="Description of Artificial Sequence: Synthetic coding sequence"
  source 1..348: mol_type = other DNA
atgggccgggtcttcctgactggagagaaggccaacagcatcctgaagcgctacccccgggccaacggcttctttgaggagatccggcagggcaacatcgagcgggagtgcaaggaggagttctgcacctttgaggaggcccgggaggcctttgagaacaatgagaagaccaaggagttctggagcacctacaccaaggcccagcagggcgagagcaacagaggaagtgactggttccagttctacctgaccttccccctcatcttcggcctcttcatcatcctgctggtgatcttcctgatctggcgctgcttcctgaggaacaagacccggcggcagacagtgtag

SEQ ID NO: 8171 - DNA, 606 bp, synthetic construct; identical to SEQ ID NO: 7499
  misc_feature 1..606: note = source = /note="Description of Artificial Sequence: Synthetic coding sequence"
  source 1..606: mol_type = other DNA

SEQ ID NO: 8172 - DNA, 1311 bp, synthetic construct; identical to SEQ ID NO: 7298
  misc_feature 1..1311: note = source = /note="Description of Artificial Sequence: Synthetic coding sequence"
  source 1..1311: mol_type = other DNA

SEQ ID NO: 8173 - DNA, 606 bp, synthetic construct
  misc_feature 1..606: note = source = /note="Description of Artificial Sequence: Synthetic coding sequence"
  source 1..606: mol_type = other DNA
atgggcgccaccaccatggaccagaagagcctgtgggccggcgtggtggtgctgctgctgctgcagggcggcagcgcctacaagctggtgtgctacttcaccaactggagccaggaccggcaggagcccgggaagttcaccccagaaaatattgaccccttcctgtgcagccacctgatctacagctttgccagcattgagaacaacaaggtgatcatcaaggacaagtctgaggtgatgctgtaccagaccatcaacagcctgaagaccaagaaccccaagctgaagatcctgctgagcattggaggctacctgtttggcagcaagggcttccaccccatggtggacagcagcaccagccggctggagttcatcaacagcatcatcctcttcctgaggaaccacaactttgatggcctggatgtgtcctggatctacccagaccagaaggagaacacccacttcaccgtgctgatccacgagctggccgaggccttccagaaggacttcaccaagagcaccaaggagcggctgctgctgacagctggggtgtctgctggccggcagatgattgacaacagctaccaggtggagaagctggcctag

SEQ ID NO: 8174 - DNA, 75 bp, synthetic construct; identical to SEQ ID NO: 7364
  misc_feature 1..75: note = source = /note="Description of Artificial Sequence: Synthetic coding sequence"
  source 1..75: mol_type = other DNA

SEQ ID NO: 8175 - DNA, 252 bp, synthetic construct
  misc_feature 1..252: note = source = /note="Description of Artificial Sequence: Synthetic coding sequence"
  source 1..252: mol_type = other DNA
atgaggccccggggcctgccccccctgctggtggtgctgctgggctgctgggcctctgtgtctgcccagacagatgccaccccagctgtgaccacagagggcctgaacagcacagaggccgccctggccaccttcggcaccttccccagcaccaggcctcctggcaccccccgggcccctggccccagcagcggcccccggcccacccctgtgacagatggcagccacagcgtgacccaggccggcgtgtag

SEQ ID NO: 8176 - DNA, 1254 bp, synthetic construct; identical to SEQ ID NO: 6986
  misc_feature 1..1254: note = source = /note="Description of Artificial Sequence: Synthetic coding sequence"
  source 1..1254: mol_type = other DNA

SEQ ID NO: 8177 - DNA, 1680 bp, synthetic construct; identical to SEQ ID NO: 6964
  misc_feature 1..1680: note = source = /note="Description of Artificial Sequence: Synthetic coding sequence"
  source 1..1680: mol_type = other DNA

SEQ ID NO: 8178 - DNA, 99 bp, synthetic construct
  misc_feature 1..99: note = source = /note="Description of Artificial Sequence: Synthetic coding sequence"
  source 1..99: mol_type = other DNA
atgcagggcaccccaggcggcggcaccaggcctggccccagccctgtggacaggaggaccctgctggtgttctccttcatcctggccgccgccctgtag

SEQ ID NO: 8179 - DNA, 180 bp, synthetic construct
  misc_feature 1..180: note = source = /note="Description of Artificial Sequence: Synthetic coding sequence"
  source 1..180: mol_type = other DNA
atgctggccctgctggtgctggtgacagtggccctggccagcgcccaccacggcggggagcactttgaaggagagaaggtgttccgggtgaatgtggaggatgagaaccacatcaacatcatccgggagctggccagcaccacccagattgacttctggaagccagattctgtgacctag

SEQ ID NO: 8180 - DNA, 303 bp, synthetic construct
  misc_feature 1..303: note = source = /note="Description of Artificial Sequence: Synthetic coding sequence"
  source 1..303: mol_type = other DNA
atgaggccccggggcctgccccccctgctggtggtgctgctgggctgctgggcctctgtgtctgcccagacagatgccaccccagctgtgaccacagagggcctgaacagcacagaggccgccctggccaccttcggcaccttccccagcaccaggcctcctggcaccccccgggcccctggccccagcagcggcccccggcccacccctgtgacagatggcggctaccacgtgcctgcccctggggtgcacagcgaccccaccagccggggccagccccgctgctgcagcctgtgcctgtag

SEQ ID NO: 8181 - DNA, 234 bp, synthetic construct
  misc_feature 1..234: note = source = /note="Description of Artificial Sequence: Synthetic coding sequence"
  source 1..234: mol_type = other DNA
atgaggagccccaggatgagggtgtgtgccaagtctgtgctgctgagccactggctgttcctggcctacgtgctgatggtgtgctgcaagctgatgtctgccagcagccagcacctgcggggccatgctggccaccaccagatcaagcagggcacctgtgaggtggtggccgtgcaccgctgctgcaacaagaacagaattgaggagaggagccagacagtgaagtgcagctag

SEQ ID NO: 8182 - DNA, 12 bp, synthetic construct
  misc_feature 1..12: note = source = /note="Description of Artificial Sequence: Synthetic coding sequence"
  source 1..12: mol_type = other DNA
atgtggacctag

SEQ ID NO: 8183 - DNA, 402 bp, synthetic construct; identical to SEQ ID NO: 8165
  misc_feature 1..402: note = source = /note="Description of Artificial Sequence: Synthetic coding sequence"
  source 1..402: mol_type = other DNA

SEQ ID NO: 8184 - DNA, 600 bp, synthetic construct
  misc_feature 1..600: note = source = /note="Description of Artificial Sequence: Synthetic coding sequence"
  source 1..600: mol_type = other DNA
atgaccatgaggcacaactggaccccagacctgagccccctgtgggtgctgctgctgtgtgcccacgtggtgaccctgctggtgcgggccacccctgtgtcccagaccaccacagctgccacagcctctgtgcgcagcaccaaggacccctgccccagccagccccctgtgtttcctgctgccaagcagtgcccagccctggaggtgacctggccagaggtggaggtgcccctgaatggcaccctgagcctgagctgtgtggcctgcagccgcttccccaacttcagcatcctgtactggctgggcaatggcagcttcatcgagcacctgcccggccgcctgtgggagggcagcaccagccgggagcggggcagcacaggcacccagctgtgcaaggccctggtgctggagcagctgaccccagccctgcacagcaccaacttcagctgtgtgctggtggaccctgagcaggtggtgcagagacatgtggtgctggcccagctgtgggtgcgcagcccccggcggggcctgcaggagcaggaggagctgtgcttccacatgtggggcggcaaaggaggcctgtgccagagcagcctgtag

SEQ ID NO: 8185 - DNA, 1044 bp, synthetic construct
  misc_feature 1..1044: note = source = /note="Description of Artificial Sequence: Synthetic coding sequence"
  source 1..1044: mol_type = other DNA
atgggcgtggtgcagtacggggacaacccagccacccacttcaacctgaagacccacaccaacagccgggacctgaagacagccatcgagaagatcacccagaggggcggcctgagcaatgtgggccgggccatcagctttgtgaccaagaacttcttcagcaaggccaatggaaacagaagtggggccccaaatgtggtggtggtgatggtggatggctggcccacagacaaggtggaggaggccagccggctggcccgggagagcggcatcaacatcttcttcatcaccatcgagggcgctgctgaaaatgagaagcagtatgtggtggagcccaactttgccaacaaggctgtgtgcaggaccaacggcttctacagcctgcacgtgcagagctggtttggcctgcacaagaccctgcagcccctggtgaagagggtgtgtgacacagaccggctggcctgcagcaagacctgcctgaacagcgctgacattggatttgtgattgatggcagcagctctgtgggcactggaaacttcagaacagtgctgcagtttgtgaccaacctgaccaaggagtttgagatcagtgacacagacaccagaattggagctgtgcagtacacctatgagcagaggctggagtttggatttgacaagtacagcagcaagccagacatcctgaatgccatcaagagggtgggctactggagcggcggcaccagcactggagctgccatcaactttgccctggagcagctgttcaagaagagcaagcccaacaagaggaagctgatgatcctgatcacagatggccgctcctatgatgatgtgcgcatcccagccatggccgcccacctgaagggcgtcatcacctacgccatcggcgtggcctgggccgcccaggaggagctggaggtgattgccacccacccagcccgggaccacagcttctttgtggatgaatttgacaacctgcaccagtatgtgccccgcatcatccagaacatctgcacagagttcaacagccagcccaggaactag

SEQ ID NO: 8186 - DNA, 27 bp, synthetic construct
  misc_feature 1..27: note = source = /note="Description of Artificial Sequence: Synthetic coding sequence"
  source 1..27: mol_type = other DNA
atgcagggcaccccaggcggcggctag

SEQ ID NO: 8187 - DNA, 369 bp, synthetic construct
  misc_feature 1..369: note = source = /note="Description of Artificial Sequence: Synthetic coding sequence"
  source 1..369: mol_type = other DNA
atgctgtaccagaccatcaacagcctgaagaccaagaaccccaagctgaagatcctgctgagcatcggcggctacctgtttggcagcaagggcttccaccccatggtggacagcagcaccagccggctggagttcatcaacagcatcatcctcttcctgaggaaccacaactttgatggcctggatgtgtcctggatctacccagaccagaaggagaacacccacttcaccgtgctgattcatgagctggccgaggccttccagaaggacttcaccaagagcaccaaggagcggctgctgctgacagctggggtgtctgctggccggcagatgattgacaacagctaccaggtggagaagctggcctag

SEQ ID NO: 8188 - DNA, 309 bp, synthetic construct
  misc_feature 1..309: note = source = /note="Description of Artificial Sequence: Synthetic coding sequence"
  source 1..309: mol_type = other DNA
atgagggtgtctggagtgctgcggctgctggccctgatctttgccatcgtgaccacctggatgttcatccgcagctacatgtccttctccatgaagaccatccggctgccccgctggctggccgccagccccaccaaggagatccaggtgaagaagtacaagtgtggcctcatcaagccctgcccagccaactactttgccttcaagatctgcagcggggccgccaacgtggtgggccccaccatgtgctttgaggacaggatgatcatgagccctgtgaagaacaacgtgggccggggcctgaactag

SEQ ID NO: 8189 - DNA, 660 bp, synthetic construct; identical to SEQ ID NO: 7265
  misc_feature 1..660: note = source = /note="Description of Artificial Sequence: Synthetic coding sequence"
  source 1..660: mol_type = other DNA

SEQ ID NO: 8190 - DNA, 1869 bp, synthetic construct
  misc_feature 1..1869: note = source = /note="Description of Artificial Sequence: Synthetic coding sequence"
  source 1..1869: mol_type = other DNA
atgggcaagtctgagggccctgtgggcatggtggagagcgctggccgggccggccagaagaggcctggcttcctggagggcggcctgctgctgctgctgctgctggtgacagctgccctggtggccctgggcgtgctgtatgctgaccggcggggcaagcagctgccccggctggccagccggctgtgcttcctgcaggaggagaggacctttgtgaagaggaagccccggggcatccctgaggcccaggaggtgtctgaggtgtgcaccaccccaggctgtgtgattgctgctgcccgcatcctgcagaacatggaccccaccacagagccctgtgatgacttctaccagtttgcctgtggcggctggctgcggagacatgtgattcctgagaccaacagccgctacagcatctttgatgtgctgagagatgagctggaggtgatcctgaaggctgtgctggagaacagcacagccaaggccaccgtgccccaggaggagagacatgatgtgattgccctgtaccacaggatgggcctggaggagctgcagagccagtttggcctgaagggcttcaactggaccctcttcatccagacagtgctgagctctgtgaagatcaagctgctgcctgatgaggaggtggtggtgtatggcatcccctacctgcagaacctggagaacatcatcgacacctacagcgcccggaccatccagaactacctggtgtggaggctggtgctggacagaattggcagcctgagccagcgcttcaaggacaccagggtgaactacaggaaggccctgtttggcaccatggtggaggaggtgcgctggagagaatgtgtgggctacgtgaacagcaacatggagaatgctgtgggcagcctgtatgtgcgggaggccttccctggggacagcaagtccatggtgcgggagctgattgacaaggtgaggacagtgtttgtggagaccctggatgagctgggctggatggatgaggagagcaagaagaaggcccaggagaaggccatgagcatccgggagcagatcggccacccagactacatcctggaggagatgaacagaaggctggatgaggagtacagcaacctgaacttcagcgaggacctgtactttgagaacagcctgcagaacctgaaggtgggcgcccagaggagcctgaggaagctgcgggagaaggtggaccccaacctgtggatcattggagctgctgtggtgaatgccttctacagccccaacagaaaccagatcgtgtttcctgctggcatcctgcagccccccttcttcagcaaggagcagccccaggccctgaactttggaggcatcggcatggtgattggccacgagatcacccacggctttgatgacaatggaagaaactttgacaagaatggaaacatgatggactggtggagcaacttcagcacccagcacttccgggagcagagcgagtgcatgatctaccagtatggcaactacagctgggacctggctgatgagcagaatgtgaatggcttcaacaccctgggagaaaatattgctgacaatggaggagtgcggcaggcctacaaggcctacctgaagtggatggccgagggcggcaaggaccagcagctgcccggcctggacctgacccatgagcagctgttcttcatcaactatgcccaggtgtggtgtggcagctacagacctgagtttgccatccagagcatcaagacagatgtgcacagccccctgaagtacagagtgctgggcagcctgcagaacctggccgcctttgctgacaccttccactgtgcccggggcacccccatgcaccccaaggagcgctgccgggtgtggtag

SEQ ID NO: 8191 - DNA, 168 bp, synthetic construct
  misc_feature 1..168: note = source = /note="Description of Artificial Sequence: Synthetic coding sequence"
  source 1..168: mol_type = other DNA
atgggccctgaggccctgagcagcctgctgctgctgctgctggtggccagcggagatgctgacatgaagggccactttgatcctgccaagtgccgctatgccctgggcatgcaggacaggaccatcccagacagcgacatcagcgccagcagctcctggagcgactag

SEQ ID NO: 8192 - DNA, 156 bp, synthetic construct
  misc_feature 1..156: note = source = /note="Description of Artificial Sequence: Synthetic coding sequence"
  source 1..156: mol_type = other DNA
atgggccctgaggccctgagcagcctgctgctgctgctgctggtggccagcggagatgctgacatgaagggccactttgatcctgccaagtgccgctatgccctgggcatgcaggacaggaccatcccagacagcgacatcagcgccagcagctag

SEQ ID NO: 8193 - DNA, 1620 bp, synthetic construct; identical to SEQ ID NO: 7995
  misc_feature 1..1620: note = source = /note="Description of Artificial Sequence: Synthetic coding sequence"
  source 1..1620: mol_type = other DNA

SEQ ID NO: 8194 - DNA, 591 bp, synthetic construct
  misc_feature 1..591: note = source = /note="Description of Artificial Sequence: Synthetic coding sequence"
  source 1..591: mol_type = other DNA
atgccccacctggccagcctcttcaccgccagcagccgctgctgcccccaccccctgcggcctgagggcagcggggccatgggccctgaggccctgagcagcctgctgctgctgctgctggtggccagcggagatgctgacatgaagggccactttgatcctgccaagtgccgctatgccctgggcatgcaggacaggaccatcccagacagcgacatcagcgccagcagctcctggagcgacagcacagctgcccggcacagccggctggagagcagtgatggagatggagcctggtgcccagctggcagcgtcttccccaaggaggaggagtacctgcaggtggacctgcagaggctgcacctggtggccctggtgggcacccagggcagacatgctgggggcctgggcaaggagttcagccgcagctaccgcctgcgctacagcagagatggaagacgctggatgggctggaaggaccgctggggccaggaggtgatctctggaaatgaagatcctgagggcgtggtgctgaaggacctgggcccccccatggtggcccggctggtgcgcttctacccccgggcctag

SEQ ID NO: 8195 - DNA, 162 bp, synthetic construct
  misc_feature 1..162: note = source = /note="Description of Artificial Sequence: Synthetic coding sequence"
  source 1..162: mol_type = other DNA
atgctgccctgcctggccctgctgctgctgatggagctgtctgtgtgcaccgtggccggagatggaggagaggagcagaccctgagcacagaggccgagacctgggtgattgtggccctggaggtgctgctgggccggggcagtgatgagggccggggctag

SEQ ID NO: 8196 - DNA, 126 bp, synthetic construct
  misc_feature 1..126: note = source = /note="Description of Artificial Sequence: Synthetic coding sequence"
  source 1..126: mol_type = other DNA
atgggccctgaggccctgagcagcctgctgctgctgctgctggtggccagcggagatgctgacatgaagggccactttgatcctgccaagtgccgctatgccctgggcatgcaggacagaacatag

SEQ ID NO: 8197 - DNA, 222 bp, synthetic construct
  misc_feature 1..222: note = source = /note="Description of Artificial Sequence: Synthetic coding sequence"
  source 1..222: mol_type = other DNA
atgggccctgaggccctgagcagcctgctgctgctgctgctggtggccagcggagatgctgacatgaagggccactttgatcctgccaagtgccgctatgccctgggcatgcaggacaggaccatcccagacagcgacatcagcgccagcagctcctggagcgacagcacagctgcccggcacagccggctggagagcagtgatggagatggagcctggtag

SEQ ID NO: 8198 - DNA, 369 bp, synthetic construct
  misc_feature 1..369: note = source = /note="Description of Artificial Sequence: Synthetic coding sequence"
  source 1..369: mol_type = other DNA
atgggccctgaggccctgagcagcctgctgctgctgctgctggtggccagcggagatgctgacatgaagggccactttgatcctgccaagtgccgctatgccctgggcatgcaggacaggaccatcccagacagcgacatcagcgccagcagctcctggagcgacagcacagctgcccggcacagccggctggagagcagtgatggagatggagcctggtgcccagctggcagcgtcttccccaaggaggaggagtacctgcaggtggacctgcagaggctgcacctggtggccctggtgggcacccagggcagacatgctgggggcctgggcaaggagttcagccgcagctaccgcctgcgctactag

SEQ ID NO: 8199 - DNA, 483 bp, synthetic construct
  misc_feature 1..483: note = source = /note="Description of Artificial Sequence: Synthetic coding sequence"
  source 1..483: mol_type = other DNA
atgggccctgaggccctgagcagcctgctgctgctgctgctggtggccagcggagatgctgacatgaagggccactttgatcctgccaagtgccgctatgccctgggcatgcaggacaggaccatcccagacagcgacatcagcgccagcagctcctggagcgacagcacagctgcccggcacagccggctggagagcagtgatggagatggagcctggtgcccagctggcagcgtcttccccaaggaggaggagtacctgcaggtggacctgcagaggctgcacctggtggccctggtgggcacccagggcagacatgctgggggcctgggcaaggagttcagccgcagctaccgcctgcgctacagcagagatggaagacgctggatgggctggaaggaccgctggggccaggaggtgatctctggaaatgaagatcctgagggcgtggtgctgaaggacctgggcccccccatggtgtag

SEQ ID NO: 8200 - DNA, 540 bp, synthetic construct
  misc_feature 1..540: note = source = /note="Description of Artificial Sequence: Synthetic coding sequence"
  source 1..540: mol_type = other DNA
atgggcagcagcggcctgctgagcctgctggtgctgtttgtgctgctggccaacgtgcagggccctggcctgacagactggctgttcccccggcgctgccccaagatccgggaggagtgtgagttccaggagagagatgtgtgcaccaaggaccggcagtgccaggacaacaagaagtgctgcgtgttcagctgtgggaagaagtgcctggacctgaagcaggatgtgtgtgagatgcccaaggagaccggcccctgcctggcctacttcctgcactggtggtatgacaagaaggacaacacctgcagcatgtttgtgtatggaggctgccagggcaacaacaacaacttccagagcaaggccaactgcctgaacacctgcaagaacaagcagccctgccccaagatcaaggtggagtgtgaggtggaggagattgaccagtgcaccaagccccgggactgcccagagaacatgaagtgctgccccttcagccggggcaagaagtgcctggacttcaggaaggccagcctgagcacctag

SEQ ID NO: 8201 - DNA, 438 bp, synthetic construct
  misc_feature 1..438: note = source = /note="Description of Artificial Sequence: Synthetic coding sequence"
  source 1..438: mol_type = other DNA
atgctgttcaggaaccgcttcctgctgctgctggccctggccgccctgctggcctttgtgtccctgagcctgcagttcttccacctgatccctgtgtccacccccaagaatggcatgagcagcaagagcaggaagaggatcatgccagaccctgtgacagagccccctgtgacagatcctgtgtatgaggccctgctgtactgcaacatccccagcgtggccgagaggtccatggagggccacgccccccaccacttcaagctggtgtctgtgcacgtgttcatcagacatggagaccgctaccccctgtatgtgatccccaagaccaagaggcctgagattgactgcaccctggtggccaacaggaagccctaccaccccaagctggaggccttcatcagccacatgagcaagggcagcggggccagctttgaatag

SEQ ID NO: 8202 - DNA, 399 bp, synthetic construct
  misc_feature 1..399: note = source = /note="Description of Artificial Sequence: Synthetic coding sequence"
  source 1..399: mol_type = other DNA
atgggccctgaggccctgagcagcctgctgctgctgctgctggtggccagcggagatgctgacatgaagggccactttgatcctgccaagtgccgctatgccctgggcatgcaggacaggaccatcccagacagcgacatcagcgccagcagctcctggagcgacagcacagctgcccggcacagccggctggagagcagtgatggagatggagcctggtgcccagctggcagcgtcttccccaaggaggaggagtacctgcaggtggacctgcagaggctgcacctggtggccctggtgggcacccagggcagacatgctgggggcctgggcaaggagttcagccgcagctaccgcctgcgctacagcagagatggaagacgctggatgggctggtag

SEQ ID NO: 8203 - DNA, 306 bp, synthetic construct
  misc_feature 1..306: note = source = /note="Description of Artificial Sequence: Synthetic coding sequence"
  source 1..306: mol_type = other DNA
atgggccctgaggccctgagcagcctgctgctgctgctgctggtggccagcggagatgctgacatgaagggccactttgatcctgccaagtgccgctatgccctgggcatgcaggacaggaccatcccagacagcgacatcagcgccagcagctcctggagcgacagcacagctgcccggcacagccggctggagagcagtgatggagatggagcctggtgcccagctggcagcgtcttccccaaggaggaggagtacctgcaggtggacctgcagaggctgcacctggtggccctggtgggctag

SEQ ID NO: 8204 - DNA, 393 bp, synthetic construct; identical to SEQ ID NO: 7095
  misc_feature 1..393: note = source = /note="Description of Artificial Sequence: Synthetic coding sequence"
  source 1..393: mol_type = other DNA

SEQ ID NO: 8205 - DNA, 420 bp, synthetic construct
  misc_feature 1..420: note = source = /note="Description of Artificial Sequence: Synthetic coding sequence"
  source 1..420: mol_type = other DNA
atgcctgccatcgctgtgctggccgctgctgctgctgcctggtgcttcctgcaggtggagagccgccacctggatgccctggccggcggggccggccccaaccacggcaacttcctggacaatgaccagtggctgagcacagtgtcccagtatgaccgggacaagtactggaaccgcttcagagatgatgactacttcaggaactggaaccccaacaagccctttgaccaggccctggaccccagcaaggacccctgcctgaaggtgaagtgcagcccccacaaggtgtgtgtgacccaggactaccagacagccctgtgtgtgtccaggaagcacctgctgccccggcagaagaagggaaatgtggcccagaagcactgggtgggccccagcaacctggtgaagtgcaagccctgctag

SEQ ID NO: 8206 - DNA, 510 bp, synthetic construct
  misc_feature 1..510: note = source = /note="Description of Artificial Sequence: Synthetic coding sequence"
  source 1..510: mol_type = other DNA
atgaggctgctgatcctgacctgcctggtggccgtggccctggcccggcccaagctgcccctgcgctacccagagcggctgcagaaccccagcgagagcagcgagcccatccccctggagagccgggaggagtacatgaatggcatgaaccggcagaggaacatcctgcgggagaagcagacagatgagatcaagaactgtgtggtggccgagcctgagaagatggagagcagcatcagcagcagcagcgaggagcagttctgccgcctgaatgagtacaaccagctgcagctgcaggccgcccacgcccaggagcagatccggaggatgaatgaaaacagccacgtgcaggtgcccttccagcagctgaaccagctggccgcctacccctatgctgtgtggtactacccccagatcatgcagtatgtgcccttcccccccttcagtgacatcagcaaccccacagcccacgagaactatgagaagaacaacgtgatgctgcagtggtag

SEQ ID NO: 8207 - DNA, 921 bp, synthetic construct
  misc_feature 1..921: note = source = /note="Description of Artificial Sequence: Synthetic coding sequence"
  source 1..921: mol_type = other DNA
atgaagaaggatgagccccccctggacttcccagacaccctggagggctttgaatatgccttcaatgagaagggccagctgcggcacatcaagacaggagagccctttgtgttcaactaccgggaggacctgcaccgctggaaccagaagagatatgaggccctgggggagatcatcaccaagtatgtgtatgagctgctggagaaggactgcaacctgaagaaggtgtccatccctgagggctacggcgtgattgtgctgaaccccaatgaaaactacatcgaggtggagaagcccaagatccacgtgcagagcagcagtgacagcagtgatgagcctgctgagaagcgggagaggaaggacaaggtgtccaaggagaccaagaagaggcgggacttctatgagaagtacagaaacccccagcgggagaaggagatgatgcagctgtacatcagagaaaatggcagccctgaggagcacgccatctacgtgtgggaccacttcatcgcccaggccgctgctgaaaatgtgttctttgtggcccacagctatggaggcctggcctttgtggagctgatgatccagcgggaggctgatgtgaagaacaaggtgacagctgtggccctgacagacagcgtgcacaacgtgtggcaccaggaggccggcaagaccatccgggagtggatgagggagaactgctgcaactgggtgagcagcagcgagcccctggacacctctgtggagagcatgctgcctgactgcccccgggtgtctgctggaacagacagacatgagctgacctcctggaagagcttccccagcatcttcaagttcttcacagaggccagcgaggccaagaccagcagcctgaagccagctgtgacccggcgcagccaccgcatcaagcatgaggagctgtag

SEQ ID NO: 8208 - DNA, 2862 bp, synthetic construct
  misc_feature 1..2862: note = source = /note="Description of Artificial Sequence: Synthetic coding sequence"
  source 1..2862: mol_type = other DNA
tgacagctgtgctggctgcccctgctggcccccctgctgctgctgcggcccccaggagtgcagagcgctggccccatccgggcctttgtggtgccccacagccacatggatgtgggctgggtgtacacagtgcaggagagcatgagggcctatgctgccaacgtgtacacctctgtggtggaggagctggcccggggccagcagaggcgcttcatcgctgtggagcaggagttcttccggctgtggtgggatggagtggccagtgaccagcagaagtaccaggtgcggcagctgctggaggagggccgcctggagtttgtgattggaggccaggtgatgcatgatgaagctgtgacccacctggatgaccagatcctgcagctgacagagggccacggcttcctgtatgagaccttcggcatccggccccagttctcctggcacgtggacccctttggagccagcgccaccacccccaccctgtttgccctggccggcttcaatgcccacctgggcagcagaattgattatgacctgaaggccgccatgcaggaggcccggggcctgcagtttgtgtggaggggcagccccagcctgtctgagcggcaggagatcttcacccacatcatggaccagtacagctactgcacccccagccacatccccttcagcaacagaagtggcttctactggaatggagtggccgtgttccccaagccaccccaggatggagtgtaccccaacatgtctgagcctgtgaccccagccaacatcaacctgtatgcagaggccctggtggccaacgtgaagcagagagctgcctggttccgcaccccccacgtgctgtggccctggggctgtgacaagcagttcttcaatgcctctgtgcagtttgccaacatggaccccctgctggaccacatcaacagccacgccgctgagctgggcgtgtctgtgcagtatgccaccctgggggactacttccgggccctgcacgccctgaatgtgacctggagggtgcgggaccaccacgacttcctgccctacagcacagagcccttccaggcctggacaggcttctacaccagccgcagcagcctgaagggcctggcccggcgggccagcgccctgctgtatgctggggagagcatgttcacccgctacctgtggccagccccccggggccacctggaccccacctgggccctgcagcagctgcagcagctgcgctgggccgtgtctgaggtgcagcaccatgatgccatcactggaacagagagccccaaggtgcgggacatgtatgccacccacctggccagcggcatgctgggcatgaggaagctgatggccagcatcgtgctggatgagctgcagccccaggcccccatggccgccagcagtgatgctggccctgctggccactttgcctctgtgtacaaccccctggcctggacagtgaccaccatcgtgaccctgactgtgggcttccctggggtgcgggtgacagatgaagctggccaccctgtgcccagccagatccagaacagcacagagaccccatctgcctatgacctgctgatcctgaccaccatccctggcctgagctaccgccactacaacatccggcccacagctggggcccaggagggcacccaggagcctgctgccaccgtggccagcaccctgcagtttggccggcggctgcggcggaggaccagccatgctggccgctacctggtgcctgtggccaatgactgctacatcgtgctgctggaccaggacaccaacctgatgcacagcatctgggagcggcagagcaacagaacagtgcgggtgacccaggagttcctggagtaccacgtgaatggagatgtgaagcagggccccatcagtgacaactacctgttcacccctgggaaggctgctgtgcctgcctgggaggccgtggagatggagatcgtggccggccagctggtgacagagatccggcagtacttctacagaaacatgacagcccagaactacacctacgccatccgcagccggctgacccacgtgccccagggccatgatggagagctgctgtgccacagaattgagcaggagtaccaggccggccccctggagctgaaccgggaggccgtgctgcggaccagcaccaacctgaacagccagcaggtgatctacagcgacaacaacggctaccagatgcagaggcggccctacgtgtcctatgtgaacaacagcatcgccaggaactactaccccatggtgcagagcgccttcatggaggatggcaagagccggctggtgctgctgtctgagcgggcccacggcatcagcagccagggcaatggccaggtggaggtgatgctgcaccggcggctgtggaacaactttgactgggacctgggctacaacctgaccctgaatgacacctctgtggtgcaccctgtgctgtggctgctgctgggctcctggagcctgaccacagccctgcggcagaggtctgccctggccctgcagcacaggcctgtggtgctgtttggagacctggccggcacagcccccaagctgcccggcccccagcagcaggaggccgtgaccctgccccccaacctgcacctgcagatcctgagcatccctggctggagatacagcagcaaccacacagagcacagccagaacctgaggaagggccacagaggagaggcccaggccgacctgcggcgggtgctgctgcggctgtaccacctgtatgaggtgggggaggaccctgtgctgagccagcctgtgacagtgaacctggaggtgaacttccccacccccatccagaccatcagccagggcagcaagccctag

SEQ ID NO: 8209 - DNA, 459 bp, synthetic construct; identical to SEQ ID NO: 7709
  misc_feature 1..459: note = source = /note="Description of Artificial Sequence: Synthetic coding sequence"
  source 1..459: mol_type = other DNA

SEQ ID NO: 8210 - DNA, 1701 bp, synthetic construct
  misc_feature 1..1701: note = source = /note="Description of Artificial Sequence: Synthetic coding sequence"
  source 1..1701: mol_type = other DNA
atggacttcctgctggccctggtgctggtgagcagcctgtacctgcaggccgctgctgagtttgatggccgctggccccggcagatcgtgagcagcatcggcctgtgccgctatggaggaagaattgactgctgctggggctgggcccggcagagctggggccagtgccagcctgtgtgccagccccgctgcaagcacggggagtgcatcggccccaacaagtgcaagtgccaccctggctacgccggcaagacctgcaaccaggatgagcacatcccagcccccctggaccagggcagcgagcagcccctcttccagcccctggaccaccaggccaccagcctgcccagccgggacctgaatgaatgtggcctgaagccccggccctgcaagcaccgctgcatgaacacctacggcagctacaagtgctactgcctgaatggctacatgctgatgccagatggcagctgcagcagcgccctgacctgcagcatggccaactgccagtatggctgtgatgtggtgaagggccagatccgctgccagtgccccagccctggcctgcagctggccccagatggccgcacctgtgtggatgtggatgaatgtgccaccggccgggccagctgcccccgcttccggcagtgtgtgaacaccttcggcagctacatctgcaagtgccacaagggctttgacctgatgtacatcggcggcaagtaccagtgccacgacattgatgaatgttccctgggccagtaccagtgcagcagctttgcccgctgctacaacatccggggcagctacaagtgcaagtgcaaggagggctaccagggagatggcctgacctgtgtgtacatccccaaggtgatgattgagcccagcggccccatccacgtgcccaagggaaatggcaccatcctgaagggggacaccggcaacaacaactggatcccagatgtgggcagcacctggtggccacccaagaccccctacatcccccccatcatcaccaaccggcccaccagcaagcccaccacccggcccacccccaagcccacccccatccccaccccacctcctcctccacccctgcccacagagctgcggacccccctgccccccaccaccccagagcggcccaccaccggcctgaccaccatcgccccagctgccagcaccccacctgggggcatcaccgtggacaacagagtgcagacagacccccagaagcccagaggagatgtgttttctgtgctggtgcacagctgcaactttgaccacggcctgtgtggctggatccgggagaaggacaatgacctgcactgggagcccatccgggaccctgctgggggccagtacctgactgtgtctgctgccaaggcccctgggggcaaggccgcccggctggtgctgcccctgggccgcctgatgcacagcggggacctgtgcctgtccttccgccacaaggtgacaggcctgcacagcggcaccctgcaggtgtttgtgaggaagcatggagcccacggggccgccctgtggggcagaaatggaggccacggctggaggcagacccagatcaccctgcggggagctgacatcaagtctgtggtgttcaagggggagaagagaagaggccacactggagagatcggcctggatgatgtgtccctgaagaagggccactgcagcgaggagaggtag

SEQ ID NO: 8211 - DNA, 213 bp, synthetic construct
  misc_feature 1..213: note = source = /note="Description of Artificial Sequence: Synthetic coding sequence"
  source 1..213: mol_type = other DNA
atgggccctgaggccctgagcagcctgctgctgctgctgctggtggccagcggagatgctgacatgaagggccactttgatcctgccaagtgccgctatgccctgggcatgcaggacaggaccatcccagacagcgacatcagcgccagcagctcctggagcgacagcacagctgcccggcacagccggctggagagcagtgatggagactag

SEQ ID NO: 8212 - DNA, 237 bp, synthetic construct
  misc_feature 1..237: note = source = /note="Description of Artificial Sequence: Synthetic coding sequence"
  source 1..237: mol_type = other DNA
atgggccctgaggccctgagcagcctgctgctgctgctgctggtggccagcggagatgctgacatgaagggccactttgatcctgccaagtgccgctatgccctgggcatgcaggacaggaccatcccagacagcgacatcagcgccagcagctcctggagcgacagcacagctgcccggcacagccggctggagagcagtgatggagatggagcctggtgcccagctggcagctag

SEQ ID NO: 8213 - DNA, 339 bp, synthetic construct
  misc_feature 1..339: note = source = /note="Description of Artificial Sequence: Synthetic coding sequence"
  source 1..339: mol_type = other DNA
atgaggttcaagaccacagccaaggatggcctgctgctgtggaggggggacagccccatgaggcccaacagcgacttcatcagcctgggcctgagagatggagccctggtgttctcctacaacctgggcagcggcgtggccagcatcatggtgaatggcagcttcaatgatggccgctggcaccgggtgaaggctgtgagagatggccagagcggcaagatcaccgtggatgattatggagccaggacaggcaagagccctggcatgatgaggcagctgaacatcaacggggccctgtatgtgggcggcatgaaggagatcgccctgcacaccaactag

SEQ ID NO: 8214 - DNA, 2685 bp, synthetic construct
  misc_feature 1..2685: note = source = /note="Description of Artificial Sequence: Synthetic coding sequence"
  source 1..2685: mol_type = other DNA
atgagcctgccccgctgctgcccccaccccctgcggcctgagggcagcggggccatgggccctgaggccctgagcagcctgctgctgctgctgctggtggccagcggagatgctgacatgaagggccactttgatcctgccaagtgccgctatgccctgggcatgcaggacaggaccatcccagacagcgacatcagcgccagcagctcctggagcgacagcacagctgcccggcacagccggctggagagcagtgatggagatggagcctggtgcccagctggcagcgtcttccccaaggaggaggagtacctgcaggtggacctgcagaggctgcacctggtggccctggtgggcacccagggcagacatgctgggggcctgggcaaggagttcagccgcagctaccgcctgcgctacagcagagatggaagacgctggatgggctggaaggaccgctggggccaggaggtgatctctggaaatgaagatcctgagggcgtggtgctgaaggacctgggcccccccatggtggcccggctggtgcgcttctaccccagggctgacagagtgatgtctgtgtgcctgcgggtggagctgtatggctgcctgtggagagatggcctgctgagctacacagcccctgtgggccagaccatgtacctgtctgaggccgtgtacctgaatgacagcacctatgatggccacacagtgggcggcctgcagtatggaggcctgggccagctggctgatggagtggtgggcctggatgacttcaggaagagccaggagctgcgggtgtggccaggctatgactatgtgggctggagcaaccacagcttcagcagcggctacgtggagatggagtttgaatttgaccggctgcgggccttccaggccatgcaggtgcactgcaacaacatgcacaccctgggcgcccggctgcccggcggcgtggagtgccgcttccggcggggccctgccatggcctgggagggggagcccatgaggcacaacctgggcggcaacctgggggacccccgggcccgggctgtgtctgtgcccctgggcggccgggtggcccgcttcctgcagtgccgcttcctgtttgctggcccctggctgctcttcagcgagatctccttcatcagtgatgtggtgaacaacagcagccctgccctgggcggcaccttccccccagccccctggtggcccccaggccccccacccaccaacttcagcagcctggagctggagccccggggccagcagcctgtggccaaggccgagggcagccccacagccatcctgattggctgcctggtggccatcatcctgctgctgctgctgatcatcgccctgatgctgtggaggctgcactggaggcggctgctgagcaaggccgagcggcgggtgctggaggaggagctgactgtgcacctgtctgtgcctggggacaccatcctgatcaacaaccggcccggcccccgggagcccccaccctaccaggagccccggccccggggcaaccccccccacagcgccccctgtgtgcccaacggcagcgcctacagcggggactacatggagcctgagaagccaggggcccccctgctgcccccaccaccccagaacagcgtgccccactatgcagaggccgacatcgtgaccctgcagggcgtgactggaggcaacacctatgctgtgcctgccctgcccccaggagctgtgggagatggccccccccgggtggacttccccaggagccggctgcgcttcaaggagaagctgggggagggccagtttggagaggtgcacctgtgtgaggtggacagcccccaggacctggtgtccctggacttccccctgaatgtgaggaagggccaccccctgctggtggccgtgaagatcctgcggccagatgccaccaagaatgccagaaatgacttcctgaaggaggtgaagatcatgagccggctgaaggaccccaacatcatccggctgctgggcgtgtgtgtgcaggatgaccccctgtgcatgatcacagactacatggagaatggagacctgaaccagttcctgagcgcccaccagctggaggacaaggctgctgagggcgcccctggagatggccaggccgcccagggccccaccatctcctaccccatgctgctgcacgtggccgcccagatcgccagcggcatgagatacctggccaccctgaactttgtgcaccgggacctggccaccaggaactgcctggtgggggagaacttcaccatcaagattgctgactttggcatgagcaggaacctgtatgctggggactactacagagtgcagggccgggctgtgctgcccatccgctggatggcctgggagtgcatcctgatgggcaagttcaccacagccagtgatgtgtgggccttcggcgtgaccctgtgggaggtgctgatgctgtgccgggcccagcccttcggccagctgacagatgagcaggtgattgaaaatgctggggagttcttccgggaccagggccggcaggtgtacctgagccggcccccagcctgcccccagggcctgtatgagctgatgctgcgctgctggagccgggagagcgagcagaggcctcccttcagccagctgcaccgcttcctggccgaggatgccctgaacacagtgtag

SEQ ID NO: 8215 - DNA, 384 bp, synthetic construct
  misc_feature 1..384: note = source = /note="Description of Artificial Sequence: Synthetic coding sequence"
  source 1..384: mol_type = other DNA
atgggccctgaggccctgagcagcctgctgctgctgctgctggtggccagcggagatgctgacatgaagggccactttgatcctgccaagtgccgctatgccctgggcatgcaggacaggaccatcccagacagcgacatcagcgccagcagctcctggagcgacagcacagctgcccggcacagccggctggagagcagtgatggagatggagcctggtgcccagctggcagcgtcttccccaaggaggaggagtacctgcaggtggacctgcagaggctgcacctggtggccctggtgggcacccagggcagacatgctgggggcctgggcaaggagttcagccgcagctaccgcctgcgctacagcagagatggaagatag

SEQ ID NO: 8216 - DNA, 1113 bp, synthetic construct
  misc_feature 1..1113: note = source = /note="Description of Artificial Sequence: Synthetic coding sequence"
  source 1..1113: mol_type = other DNA
atgaagaaggatgagccccccctggacttcccagacaccctggagggctttgaatatgccttcaatgagaagggccagctgcggcacatcaagacaggagagccctttgtgttcaactaccgggaggacctgcaccgctggaaccagaagagatatgaggccctgggggagatcatcaccaagtatgtgtatgagctgctggagaaggactgcaacctgaagaaggtgtccatccctgtggatgccacagaaagtgagcccaagagcttcatcttcatgtctgaagatgccctgaccaacccccagaagctgatggtgctgattcatggcagcggcgtggtgcgggccggccagtgggcccggcggctcatcatcaatgaagacctggacagcggcacccagatccccttcatcaagagagctgtggccgagggctacggcgtgattgtgctgaaccccaatgaaaactacatcgaggtggagaagcccaagatccacgtgcagagcagcagtgacagcagtgatgagcctgctgagaagcgggagaggaaggacaaggtgtccaaggagaccaagaagaggcgggacttctatgagaagtacagaaacccccagcgggagaaggagatgatgcagctgtacatcagagaaaatggcagccctgaggagcacgccatctacgtgtgggaccacttcatcgcccaggccgctgctgaaaatgtgttctttgtggcccacagctatggaggcctggcctttgtggagctgatgatccagcgggaggctgatgtgaagaacaaggtgacagctgtggccctgacagacagcgtgcacaacgtgtggcaccaggaggccggcaagaccatccgggagtggatgagggagaactgctgcaactgggtgagcagcagcgagcccctggacacctctgtggagagcatgctgcctgactgcccccgggtgtctgctggaacagacagacatgagctgacctcctggaagagcttccccagcatcttcaagttcttcacagaggccagcgaggccaagaccagcagcctgaagccagctgtgacccggcgcagccaccgcatcaagcatgaggagctgtag

SEQ ID NO: 8217 - DNA, 435 bp, synthetic construct
  misc_feature 1..435: note = source = /note="Description of Artificial Sequence: Synthetic coding sequence"
  source 1..435: mol_type = other DNA
atgaagacaggcctcttcttcctgtgcctgctgggcacagctgctgccatccccaccaatgcccggctgctgagtgaccacagcaagcccacagctgagaccgtggccccagacaacacagccatccccagcctgcgggcagaggccgaggagaatgagaaggagacagctgtgtccacagaagatgacagccaccacaaggccgagaagagctctgtgctgaagagcaaggaggagagccatgagcagagcgctgagcagggcaagagcagcagccaggagctgggcctgaaggaccaggaggacagtgatggccacctgtctgtgaacctggagtatgcccccacagagggcaccctggacatcaaggaggacatgtctgagccccaggagaagaagctgtctgagaacacagacttcctggcccctggatag

SEQ ID NO: 8218 - DNA, 1341 bp, synthetic construct
  misc_feature 1..1341: note = source = /note="Description of Artificial Sequence: Synthetic coding sequence"
  source 1..1341: mol_type = other DNA
ctgaccctgcacagcctgacctgctatgaggacctggtgaccttcctgcagcagagcatccaccagtttgaggtgggcccctacggctgcatcctgctgaccctgagcgccatcctgagccgcagcacagagctgatccggcaggactttgatgtgcccaccagccacctgattggagcccacggctactgcacccaggagctggtgaacctgctgctgaccgggaaggctgtgtccaatgtgttcaatgatgtggtggagctggacagcggagatggcaacatcaccctgctgcggggcattgctgcccggagtgacatcggcttcctgagcctgtttgagcactacaacatgtgccaggtgggctgcttcctgaagaccccccgcttccccatctgggtggtgtgcagcgagagccacttcagcatcctcttcagcctgcagcccggcctgctgcgggactggaggacagagcggctgtttgacctgtactactatgatggcctggccaaccagcaggagcagatccggctgaccatcgacaccacccagaccatcagcgaggacacagacaatgacctggtgccccccctggagctgtgcatccgcaccaacatcggcagcgccctgggcttcaagtaccctgtgggcaacaaccagacagctgtgcaggacaacgtgaaggtgtccctggccttcggcctgagcatcgccaccctggcccagagcgtgggccacatcagcggggcccacctgaacccagctgtgaccctgggcctgctgctgagctgccagatcagcatcttccgggccctgatgtacatcatcgcccagtgtgtgggcgccatcgtggccacagccatcctgagcggcatcaccagcagcctgactggaaacagcctgggcagaaatgacctggctgatggagtgaacagcggccagggcctgggcatcgagatcatcggcaccctgcagctggtgctgtgtgtgctggccaccacagacagaagaagaagagacctgggcggcagcgcccccctggccatcggcctgtctgtggccctgggccacctgctggccatcgactacacaggctgcggcatcaacccagcccggagctttggcagcgctgtgatcacccacaacttcagcaaccactggatcttctgggtgggccccttcatcggcggggccctggccgtgctgatctatgacttcatcctggcccccaggagcagtgacctgacagacagagtgaaggtgtggaccagcggccaggtggaggagtatgacctggatgctgatgacatcaacagccgggtggagatgaagcccaagtag

SEQ ID NO: 8219 - DNA, 81 bp, synthetic construct
  misc_feature 1..81: note = source = /note="Description of Artificial Sequence: Synthetic coding sequence"
  source 1..81: mol_type = other DNA
atgaagctgctgctgtgggcctgcatcgtgtgtgtggcctttgccaggaagaatgccggcctgggcttcctgtggctgtag

SEQ ID NO: 8220 - DNA, 348 bp, synthetic construct
  misc_feature 1..348: note = source = /note="Description of Artificial Sequence: Synthetic coding sequence"
  source 1..348: mol_type = other DNA
atgggccctgaggccctgagcagcctgctgctgctgctgctggtggccagcggagatgctgacatgaagggccactttgatcctgccaagtgccgctatgccctgggcatgcaggacaggaccatcccagacagcgacatcagcgccagcagctcctggagcgacagcacagctgcccggcacagccggctggagagcagtgatggagatggagcctggtgcccagctggcagcgtcttccccaaggaggaggagtacctgcaggtggacctgcagaggctgcacctggtggccctggtgggcacccagggcagacatgctgggggcctgggcaaggagttctcctag

SEQ ID NO: 8221 - DNA, 165 bp, synthetic construct
  misc_feature 1..165: note = source = /note="Description of Artificial Sequence: Synthetic coding sequence"
  source 1..165: mol_type = other DNA
atgtacatccccctggaccctgactacaatgctgactgccccaacgtgacagcccctgtgtgtgccagcaatggccacaccttccagaatgaatgcttcttctgtgtggagcagcgggagttccactaccgcatcaagtttgagaagtatggaaaatgtgactag

SEQ ID NO: 8222 - DNA, 351 bp, synthetic construct
  misc_feature 1..351: note = source = /note="Description of Artificial Sequence: Synthetic coding sequence"
  source 1..351: mol_type = other DNA
atggtgctgctgcactggtgcctgctgtggctgctcttccccctgagcagcaggacccagaagctgcccaccagagatgaggagctgttccagatgcagatccgggacaaggccttcttccatgacagcagcgtcatcccagatggagctgagatcagcagctacctgttccgggacacccccaagcgctacttctttgtggtggaggaggacaacacccccctgtctgtgacagtgaccccctgtgatgcccccctggagtggaagctgagcctgcaggagctgcctgaagatagaagtggagagggcagcggggacctggagcccctggagcagcagaagcagcagtag

SEQ ID NO: 8223 - DNA, 432 bp, synthetic construct
  misc_feature 1..432: note = source = /note="Description of Artificial Sequence: Synthetic coding sequence"
  source 1..432: mol_type = other DNA
atgggccctgaggccctgagcagcctgctgctgctgctgctggtggccagcggagatgctgacatgaagggccactttgatcctgccaagtgccgctatgccctgggcatgcaggacaggaccatcccagacagcgacatcagcgccagcagctcctggagcgacagcacagctgcccggcacagccggctggagagcagtgatggagatggagcctggtgcccagctggcagcgtcttccccaaggaggaggagtacctgcaggtggacctgcagaggctgcacctggtggccctggtgggcacccagggcagacatgctgggggcctgggcaaggagttcagccgcagctaccgcctgcgctacagcagagatggaagacgctggatgggctggaaggaccgctggggccaggaggtgatcagcggctag

SEQ ID NO: 8224 - DNA, 747 bp, synthetic construct
  misc_feature 1..747: note = source = /note="Description of Artificial Sequence: Synthetic coding sequence"
  source 1..747: mol_type = other DNA
atggagctgctgcaggtgaccatcctcttcctgctgcccagcatctgcagcagcaacagcactggagtgctggaggccgccaacaacagcctggtggtgaccaccaccaagcccagcatcaccacccccaacacagagagcctgcagaagaatgtggtgacccccaccaccggcaccacccccaagggcaccatcaccaatgagctgctgaagatgagcctgatgagcacagccaccttcctgaccagcaaggatgagggcctgaaggccaccaccacagatgtgaggaagaatgacagcatcatcagcaatgtgacagtgacctctgtgaccctgcccaatgctgtgtccaccctgcagagcagcaagcccaagagctctgtgctgcagccagatgccagccccagcaagacaggcaccctgaccagcatccctgtgaccatccctgagaacaccagccagagccaggtgattggaacagagggcggcaagaatgccagcaccagcgccaccagccgcagctacagcagcatcatcctgcctgtggtgattgccctgattgtcatcaccctgtctgtgtttgtgctggtgggcctgtacaggatgtgctggaaggctgaccccggcaccccagaaaatggaaatgaccagccccagagcgacaaggagagcgtgaagctgctgactgtgaagaccatcagccatgaaagtggagagcacagcgcccagggcaagaccaagaactag

SEQ ID NO: 8225 - DNA, 363 bp, synthetic construct
  misc_feature 1..363: note = source = /note="Description of Artificial Sequence: Synthetic coding sequence"
  source 1..363: mol_type = other DNA
atgaagacaggcctcttcttcctgtgcctgctgggcacagctgctgccatccccaccaatgcccggctgctgagtgaccacagcaagcccacagctgagaccgtggccccagacaacacagccatccccagcctgcgggcagaggccgaggagaatgagaaggagacagctgtgtccacagaagatgacagccaccacaaggccgagaagagctctgtgctgaagagcaaggaggagagccatgagcagagcgctgagcagggcaagagcagcagccaggagctgggcctgaaggaccaggaggacagtgatggccacctgtctgtgaacctggagtatgcccccacagagggcaccctgtag

SEQ ID NO: 8226 - DNA, 339 bp, synthetic construct
  misc_feature 1..339: note = source = /note="Description of Artificial Sequence: Synthetic coding sequence"
  source 1..339: mol_type = other DNA
atgggccctgaggccctgagcagcctgctgctgctgctgctggtggccagcggagatgctgacatgaagggccactttgatcctgccaagtgccgctatgccctgggcatgcaggacaggaccatcccagacagcgacatcagcgccagcagctcctggagcgacagcacagctgcccggcacagccggctggagagcagtgatggagatggagcctggtgcccagctggcagcgtcttccccaaggaggaggagtacctgcaggtggacctgcagaggctgcacctggtggccctggtgggcacccagggcagacatgctgggggcctgggcaagtag

SEQ ID NO: 8227 - DNA, 513 bp, synthetic construct
  misc_feature 1..513: note = source = /note="Description of Artificial Sequence: Synthetic coding sequence"
  source 1..513: mol_type = other DNA
atgggccctgaggccctgagcagcctgctgctgctgctgctggtggccagcggagatgctgacatgaagggccactttgatcctgccaagtgccgctatgccctgggcatgcaggacaggaccatcccagacagcgacatcagcgccagcagctcctggagcgacagcacagctgcccggcacagccggctggagagcagtgatggagatggagcctggtgcccagctggcagcgtcttccccaaggaggaggagtacctgcaggtggacctgcagaggctgcacctggtggccctggtgggcacccagggcagacatgctgggggcctgggcaaggagttcagccgcagctaccgcctgcgctacagcagagatggaagacgctggatgggctggaaggaccgctggggccaggaggtgatctctggaaatgaagatcctgagggcgtggtgctgaaggacctgggcccccccatggtggcccggctggtgcgcttctacccccgggcctag

SEQ ID NO: 8228 - DNA, 417 bp, synthetic construct
  misc_feature 1..417: note = source = /note="Description of Artificial Sequence: Synthetic coding sequence"
  source 1..417: mol_type = other DNA
atgggccctgaggccctgagcagcctgctgctgctgctgctggtggccagcggagatgctgacatgaagggccactttgatcctgccaagtgccgctatgccctgggcatgcaggacaggaccatcccagacagcgacatcagcgccagcagctcctggagcgacagcacagctgcccggcacagccggctggagagcagtgatggagatggagcctggtgcccagctggcagcgtcttccccaaggaggaggagtacctgcaggtggacctgcagaggctgcacctggtggccctggtgggcacccagggcagacatgctgggggcctgggcaaggagttcagccgcagctaccgcctgcgctacagcagagatggaagacgctggatgggctggaaggaccgctggggccagtag

SEQ ID NO: 8229 - DNA, 285 bp, synthetic construct; identical to SEQ ID NO: 7736
  misc_feature 1..285: note = source = /note="Description of Artificial Sequence: Synthetic coding sequence"
  source 1..285: mol_type = other DNA

SEQ ID NO: 8230 - DNA, 156 bp, synthetic construct; identical to SEQ ID NO: 8192
  misc_feature 1..156: note = source = /note="Description of Artificial Sequence: Synthetic coding sequence"
  source 1..156: mol_type = other DNA

SEQ ID NO: 8231 - DNA, 2760 bp, synthetic construct; identical to SEQ ID NO: 7514
  misc_feature 1..2760: note = source = /note="Description of Artificial Sequence: Synthetic coding sequence"
  source 1..2760: mol_type = other DNA

SEQ ID NO: 8232 - DNA, 318 bp, synthetic construct
  misc_feature 1..318: note = source = /note="Description of Artificial Sequence: Synthetic coding sequence"
  source 1..318: mol_type = other DNA
atgggcgtgtccaagctggacatcctgtacagaaggctgctgctgaccaagctgttcatccggggctggggccggcctgaggacctgaagaggctgtttgagttcaggaagatgattggcaaccgggagcgctgccagaacctggtgtccagtgactaccctgtgcacatcgacaagattgaggagcagagcgactgcaagatcctggatggccactttgtgagccccatggcccactacgtgcctgacatcatgcccattgaatctgtgattgcccgcttccagttcatcgtgcccaaggagtggaacagcaagtag

SEQ ID NO: 8233 - DNA, 126 bp, synthetic construct
  misc_feature 1..126: note = source = /note="Description of Artificial Sequence: Synthetic coding sequence"
  source 1..126: mol_type = other DNA
atgaagctgagcggcatgttcctgctgctgagcctggccctcttctgcttcctgactggagtcttcagccagggcggccaggtggactgtggggagttccaggaccccaaggtgtactgcacctag

SEQ ID NO: 8234 - DNA, 459 bp, synthetic construct; identical to SEQ ID NO: 7709
  misc_feature 1..459: note = source = /note="Description of Artificial Sequence: Synthetic coding sequence"
  source 1..459: mol_type = other DNA

SEQ ID NO: 8235 - DNA, 1611 bp, synthetic construct
  misc_feature 1..1611: note = source = /note="Description of Artificial Sequence: Synthetic coding sequence"
  source 1..1611: mol_type = other DNA
atggacttcctgctggccctggtgctggtgagcagcctgtacctgcaggccgctgctgagtttgatggccgctggccccggcagatcgtgagcagcatcggcctgtgccgctatggaggaagaattgactgctgctggggctgggcccggcagagctggggccagtgccagcctgtgtgccagccccgctgcaagcacggggagtgcatcggccccaacaagtgcaagtgccaccctggctacgccggcaagacctgcaaccaggacctgaatgaatgtggcctgaagccccggccctgcaagcaccgctgcatgaacacctacggcagctacaagtgctactgcctgaatggctacatgctgatgccagatggcagctgcagcagcgccctgacctgcagcatggccaactgccagtatggctgtgatgtggtgaagggccagatccgctgccagtgccccagccctggcctgcagctggccccagatggccgcacctgtgtggatgtggatgaatgtgccaccggccgggccagctgcccccgcttccggcagtgtgtgaacaccttcggcagctacatctgcaagtgccacaagggctttgacctgatgtacatcggcggcaagtaccagtgccacgacattgatgaatgttccctgggccagtaccagtgcagcagctttgcccgctgctacaacatccggggcagctacaagtgcaagtgcaaggagggctaccagggagatggcctgacctgtgtgtacatccccaaggtgatgattgagcccagcggccccatccacgtgcccaagggaaatggcaccatcctgaagggggacaccggcaacaacaactggatcccagatgtgggcagcacctggtggccacccaagaccccctacatcccccccatcatcaccaaccggcccaccagcaagcccaccacccggcccacccccaagcccacccccatccccaccccacctcctcctccacccctgcccacagagctgcggacccccctgccccccaccaccccagagcggcccaccaccggcctgaccaccatcgccccagctgccagcaccccacctgggggcatcaccgtggacaacagagtgcagacagacccccagaagcccagaggagatgtgttttctgtgctggtgcacagctgcaactttgaccacggcctgtgtggctggatccgggagaaggacaatgacctgcactgggagcccatccgggaccctgctgggggccagtacctgactgtgtctgctgccaaggcccctgggggcaaggccgcccggctggtgctgcccctgggccgcctgatgcacagcggggacctgtgcctgtccttccgccacaaggtgacaggcctgcacagcggcaccctgcaggtgtttgtgaggaagcatggagcccacggggccgccctgtggggcagaaatggaggccacggctggaggcagacccagatcaccctgcggggagctgacatcaagtctgtggtgttcaagggggagaagagaagaggccacactggagagatcggcctggatgatgtgtccctgaagaagggccactgcagcgaggagaggtag

SEQ ID NO: 8236 - DNA, 288 bp, synthetic construct
  misc_feature 1..288: note = source = /note="Description of Artificial Sequence: Synthetic coding sequence"
  source 1..288: mol_type = other DNA
atgctgttcaggaaccgcttcctgctgctgctggccctggccgccctgctggcctttgtgtccctgagcctgcagttcttccacctgatccctgtgtccacccccaagaatggcatgagcagcaagagcaggaagaggatcatgccagaccctgtgacagagccccctgtgacagatcctgtgtatgaggccctgctgtactgcaacatccccagcgtggccgagaggtccatggagggccacgccccccaccacttcaagctggtgtctgtgcacgtgttcatctag

SEQ ID NO: 8237 - DNA, 213 bp, synthetic construct
  misc_feature 1..213: note = source = /note="Description of Artificial Sequence: Synthetic coding sequence"
  source 1..213: mol_type = other DNA
atggccagtgacctgatccgcaccatcctggccgtggccctgatcagcaagctgggcacagctgtggatgctgagctgatgcccagcggggccatcctgcagaacaagcgggagaacctgccccgggtgtgccacgccctggccttcctgggcatggcccgctgccaggacctcttcctggtgcggctgcagggctggaagctgggcacctag

SEQ ID NO: 8238 - DNA, 417 bp, synthetic construct; identical to SEQ ID NO: 8228
  misc_feature 1..417: note = source = /note="Description of Artificial Sequence: Synthetic coding sequence"
  source 1..417: mol_type = other DNA

SEQ ID NO: 8239 - DNA, 219 bp, synthetic construct
  misc_feature 1..219: note = source = /note="Description of Artificial Sequence: Synthetic coding sequence"
  source 1..219: mol_type = other DNA
atggctgtgtctgtgctgcggctgactgtggtgctgggcctgctggtgctcttcctgacctgctacgcagatgacaagccagacaagccagatgacaagccagatgattctgggaaggaccccaagccagacttccccaagttcctgagcctgctgggcacagagatcattgaaaatgctgtggagttcatcctgcgctccatgagccgcagcacctag

SEQ ID NO: 8240 - DNA, 438 bp, synthetic construct
  misc_feature 1..438: note = source = /note="Description of Artificial Sequence: Synthetic coding sequence"
  source 1..438: mol_type = other DNA
atggtgctgctgcactggtgcctgctgtggctgctcttccccctgagcagcaggacccagaagctgcccaccagagatgaggagctgttccagatgcagatccgggacaaggccttcttccatgacagcagcgtcatcccagatggagctgagatcagcagctacctgttccgggacacccccaagcgctacttctttgtggtggaggaggacaacacccccctgtctgtgacagtgaccccctgtgatgcccccctggagtggaagctgagcctgcaggagctgcctgaagatagaagtggagagggcagcggggacctggagcccctggagcagcagaagcagcagatcatcaatgaggagggcacagagctgttctcctacaagggaaatgatgtggagtacttcatcagcagcagcagccccagcggcctgtag

SEQ ID NO: 8241 - DNA, 258 bp, synthetic construct
  misc_feature 1..258: note = source = /note="Description of Artificial Sequence: Synthetic coding sequence"
  source 1..258: mol_type = other DNA
atgggccctgaggccctgagcagcctgctgctgctgctgctggtggccagcggagatgctgacatgaagggccactttgatcctgccaagtgccgctatgccctgggcatgcaggacaggaccatcccagacagcgacatcagcgccagcagctcctggagcgacagcacagctgcccggcacagccggctggagagcagtgatggagatggagcctggtgcccagctggcagcgtcttccccaaggaggaggagtag

SEQ ID NO: 8242 - DNA, 1410 bp, synthetic construct
  misc_feature 1..1410: note = source = /note="Description of Artificial Sequence: Synthetic coding sequence"
  source 1..1410: mol_type = other DNA
atgctgaaggtgcactaccccaagtttggagtgtctgaggactgcctgtacctgaacatctatgccccagcccacgccgacaccggcagcaagctgcctgtgctggtgtggttccctggaggagccttcaagacaggcagcgccagcatctttgatggcagcgccctggccgcctatgaagatgtgctggtggtggtggtgcagtaccgcctgggcatcttcggcttcttcaccacctgggaccagcacgcccctggcaactgggccttcaaggaccaggtggccgccctgtcctgggtgcagaagaacatcgagttctttggaggagaccccagctctgtgaccatctttggagagagcgctggggccatctctgtgagcagcctcatcctgagccccatggccaagggcctcttccacaaggccatcatggagagcggcgtggccatcatcccctacctggaggcccatgactatgagaagtctgaggacctgcaggtggtggcccacttctgtggcaacaatgccagtgacagcgaggccctgctgcgctgcctgcggaccaagcccagcaaggagctgctgaccctgagccagaagaccaagagcttcaccagggtggtggatggagccttcttccccaatgagcccctggacctgctgagccagaaggccttcaaggccatccccagcatcattggagtgaacaaccatgaatgtggcttcctgctgcccatgaaggaggcccctgagatcctgagcggcagcaacaagagcctggccctgcacctgatccagaacatcctgcacatccccccccagtacctgcacctggtggccaatgagtacttccatgacaagcacagcctgacagagatccgggacagcctgctggacctgctgggagatgtgttctttgtggtgcctgccctgatcacagcccgctaccacagagatgctggggcccctgtgtacttctatgagttccgccaccggccccagtgctttgaggacaccaagccagcctttgtgaaggctgaccatgctgatgaggtgcgctttgtgtttggaggagccttcctgaagggggacatcgtgatgtttgagggcgccacagaggaggagaagctgctgagcaggaagatgatgaagtactgggccacctttgccaggacaggcaaccccaatggaaatgacctgagcctgtggccagcctacaacctgacagagcagtacctgcagctggacctgaacatgagcctgggccagaggctgaaggagccccgggtggacttctggaccagcaccatccccctcatcctgagcgccagtgacatgctgcacagccccctgagcagcctgaccttcctgagcctgctgcagcccttcttcttcttctgtgccccctag

SEQ ID NO: 8243 - DNA, 393 bp, synthetic construct
  misc_feature 1..393: note = source = /note="Description of Artificial Sequence: Synthetic coding sequence"
  source 1..393: mol_type = other DNA
atgctgcccttcctgttcttcagcaccctcttcagcagcatcttcacagaggcccagaagcagtactgggtgtgcaacagcagtgatgccagcatctcctacacctactgcggccgggacctgaagcagctgtacttcaacctgtacatcaccgtgaacaccatgaacctgcccaagaggaaggaggtgatctgccggggcagtgatgatgactacagcttctgccgggccctgaagggggagaccgtgaacaccaccatctccttctccttcaagggcatcaagttcagcaagggcaagtacaagtgtgtggtggaggccatcagcggcagccctgaggagatgctgttctgcctggagtttgtgatcctgcaccagcccaacagcaactag

SEQ ID NO: 8244 - DNA, 318 bp, synthetic construct
  misc_feature 1..318: note = source = /note="Description of Artificial Sequence: Synthetic coding sequence"
  source 1..318: mol_type = other DNA
atgaagtgcacagcccgggagtggctgcgggtgaccaccgtgctcttcatggcccgggccatcccagccatggtggtgcccaatgccaccctgctggagaagctgctggagaagtacatggatgaagatggagagtggtggatcgccaagcagaggggcaagagggccatcacagacaatgacatgcagagcatcctggacctgcacaacaagctgcggagccaggtgtaccccacagccagcaacatggagtacatgacctgggatgtggagctggagaggtctgctgagagctgggccgagagctgcctgtggtag

SEQ ID NO: 8245 - DNA, 567 bp, synthetic construct
  misc_feature 1..567: note = source = /note="Description of Artificial Sequence: Synthetic coding sequence"
  source 1..567: mol_type = other DNA
atgaccatggtgtgccacaggcctgagggcctggagcagctggaggcccagaccaacttcaccaagcgggagctgcaggtgctgtaccggggcttcaagaatgaatgtcccagcggcgtggtgaatgaagacaccttcaagcagatctatgcccagttcttcccccatggagatgccagcacctacgcccactacctgttcaatgcctttgacaccacccagacaggctctgtgaagtttgaagattttgtgacagccctgagcatcctgctgcggggcaccgtgcatgagaagctgcgctggaccttcaacctgtatgacatcaacaaggatggctacatcaacaaggaggagatgatggacatcgtgaaggccatctatgacatgatgggcaagtacacctaccctgtgctgaaggaggacaccccccggcagcacgtggatgtgttcttccagaagatggacaagaacaaggatggcatcgtgaccctggatgagttcctggagagctgccaggaggatgacaacatcatgaggagcctgcagctgttccagaatgtgatgtag

SEQ ID NO: 8246 - DNA, 1275 bp, synthetic construct
  misc_feature 1..1275: note = source = /note="Description of Artificial Sequence: Synthetic coding sequence"
  source 1..1275: mol_type = other DNA
atgccacccttcctgatcaccctcttcctgttccacagctgctgcctgcgggccaacggccacctgcgggagggcatgaccctgctgaagacagaatttgccctgcacctgtaccagagcgtggccgcctgcagaaatgagaccaacttcgtcatcagccctgctggggtgtccctgcccctggagatcctgcagtttggagctgagggcagcacaggccagcagctggctgatgccctgggctacacagtgcatgacaagagggtgaaggacttcctgcatgctgtgtatgccaccctgcccaccagcagccagggcacagagatggagctggcctgcagcctgtttgtgcaggtgggcacccccctgagcccctgctttgtggagcacgtgtcctggtgggccaacagcagcctggagcctgctgacctgtctgagcccaacagcacagccatccagaccagcgagggcgccagccgggagacagctgggggcggccccagcgagggccctgggggctggccctgggagcaggtgtctgctgcctttgcccagctggtgctggtgtccaccatgtccttccagggcacctggaggaagcgcttcagcagcacagacacccagatcctgcccttcacctgtgcctacggcctggtgctgcaggtgcccatgatgcaccagaccacagaggtgaactacggccagttccaggacacagctggccaccaggtgggcgtgctggagctgccctacctgggcagcgctgtgtccctcttcctggtgctgccccgggacaaggacacccccctgagccacatcgagccccacctgacagccagcaccatccacctgtggaccaccagcctgcggcgggccaggatggatgtgttcctgccccgcttccgcatccagaaccagttcaacctgaagagcatcctgaacagctggggcgtgacagacctgtttgaccccctgaaggccaacctgaagggcatcagcggccaggacggcttctacgtgtctgaggccatccacaaggccaagattgaggtgctggaggagggcaccaaggccagcggggccacagccctgctgctgctgaagaggagccgcatccccatcttcaaggctgaccggcccttcatctacttcctgcgggagcccaacacaggcatcaccgtcttctttgaccgcatccagatcatctaccagtgcctgagcagcaacaagggcagctttgtgcactaccccctgaagaacaagcacagcttctag

SEQ ID NO: 8247 - DNA, 1815 bp, synthetic construct
  misc_feature 1..1815: note = source = /note="Description of Artificial Sequence: Synthetic coding sequence"
  source 1..1815: mol_type = other DNA
atggctgtgctggtgtgcccagccagctgccacggcctgaaggagttccgcatcagaagaggcatgtggaggctgtgcctggtgtactacttctacccagccagcagcaccctgtatgtgctgagaattgatgtgctgaactacaccagcaaggatgagggccccagcgctgagggcccccagaggaacacccggctgggctggatccagggcaagcaggtgacagtgctgggcagccctgtgcctgtgaatgtgttcctgggcgtgccctttgctgccccacccctgggcagcctgcgcttcaccaacccccagcctgccagcccctgggacaacctgcgggaggccaccagctaccccaacctgtgcctgcagaacagcgagtggctgctgctggaccagcacatgctgaaggtgcactaccccaagtttggagtgtctgaggactgcctgtacctgaacatctatgccccagcccatgctgacaccggcagcaagctgcctgtgctggtgtggttccctgggggcgccttcaagacaggcagcgccagcatctttgatggcagcgccctggccgcctatgaagatgtgctggtggtggtggtgcagtaccgcctgggcatcttcggcttcttcaccacctgggaccagcacgcccctggcaactgggccttcaaggaccaggtggccgccctgtcctgggtgcagaagaacatcgagttcttcggcggggaccccagctctgtgaccatctttggagagagcgctggggccatctctgtgagcagcctcatcctgagccccatggccaagggcctcttccacaaggccatcatggagagcggcgtggccatcatcccctacctggaggcccatgactatgagaagtctgaggacctgcaggtggtggcccacttctgtggcaacaatgccagtgacagcgaggccctgctgcgctgcctgcggaccaagcccagcaaggagctgctgaccctgagccagaagaccaagagcttcaccagggtggtggatggagccttcttccccaatgagcccctggacctgctgagccagaaggccttcaaggccatccccagcatcatcggcgtgaacaaccatgaatgtggcttcctgctgcccatgaaggaggcccctgagatcctgagcggcagcaacaagagcctggccctgcacctgatccagaacatcctgcacatccccccccagtacctgcacctggtggccaatgagtacttccatgacaagcacagcctgacagagatccgggacagcctgctggacctgctgggagatgtgttctttgtggtgcctgccctgatcacagcccgctaccacagagatgctggggcccctgtgtacttctatgagttccgccaccggccccagtgctttgaggacaccaagccagcctttgtgaaggctgaccacgcagatgaggtgcgctttgtgtttggaggagccttcctgaagggggacatcgtgatgtttgaaggagccacagaggaggagaagctgctgagcaggaagatgatgaagtactgggccacctttgccaggactggaaaccccaatggaaatgacctgagcctgtggccagcctacaacctgacagagcagtacctgcagctggacctgaacatgagcctgggccagaggctgaaggagccccgggtggacttctggaccagcaccatccccctcatcctgagcgccagtgacatgctgcacagccccctgagcagcctgaccttcctgagcctgctgcagcccttcttcttcttctgtgccccctag

SEQ ID NO: 8248 - DNA, 939 bp, synthetic construct
  misc_feature 1..939: note = source = /note="Description of Artificial Sequence: Synthetic coding sequence"
  source 1..939: mol_type = other DNA
atgaacatctggggccagatctggcccaaggctgtgtacctggtgtgcaactacagccccaagggcaactggtggggccacgccccctacaagcacggccggccctgcagcgcctgcccccccagctttggaggcggctgccgggagaacctgtgctacaaggagggcagtgaccgctactacccaccccgggaggaggagaccaatgaaattgagcggcagcagagccaggtgcatgacacccacgtgaggaccaggagtgatgacagcagcagaaatgaagtcatcagcgcccagcagatgagccagatcgtgtcctgtgaggtgcggctgcgggaccagtgcaagggcaccacctgcaacagatatgagtgcccagctggctgcctggacagcaaggccaaggtgattggctctgtgcactatgagatgcagagcagcatctgcagagctgccatccactacggcatcatcgacaatgatggcggctgggtggacatcacccggcagggcaggaagcactacttcatcaagagcaacagaaatggcatccagaccatcggcaagtaccagagcgccaacagcttcaccgtgtccaaggtgacagtgcaggccgtgacctgtgagaccaccgtggagcagctgtgccccttccacaagccagccagccactgcccccgggtgtactgccccaggaactgcatgcaggccaacccccactacgcccgggtgattggcaccagggtgtacagcgacctgagcagcatctgcagagctgctgtgcatgctggggtggtgagaaatcatggaggctacgtggatgtgatgcctgtggacaagaggaagacctacatcgccagcttccagaatggcatcttcagcgagagcctgcagaaccccccaggcggcaaggccttccgggtgtttgctgtggtgtag

SEQ ID NO: 8249 - DNA, 777 bp, synthetic construct; identical to SEQ ID NO: 6928
  misc_feature 1..777: note = source = /note="Description of Artificial Sequence: Synthetic coding sequence"
  source 1..777: mol_type = other DNA

SEQ ID NO: 8250 - DNA, 1215 bp, synthetic construct; identical to SEQ ID NO: 7753
  misc_feature 1..1215: note = source = /note="Description of Artificial Sequence: Synthetic coding sequence"
  source 1..1215: mol_type = other DNA

SEQ ID NO: 8251 - DNA, 936 bp, synthetic construct; identical to SEQ ID NO: 8152
  misc_feature 1..936: note = source = /note="Description of Artificial Sequence: Synthetic coding sequence"
  source 1..936: mol_type = other DNA

SEQ ID NO: 8252 - DNA, 555 bp, synthetic construct
  misc_feature 1..555: note = source = /note="Description of Artificial Sequence: Synthetic coding sequence"
  source 1..555: mol_type = other DNA
atggccagcgagcggctgcccaacagacctgcctgcctgctggtggccagcggggctgctgagggcgtgtctgcccagagcttcctgcactgcttcaccatggccagcacagccttcaacctgcaggtggccacccctgggggcaaggccatggagtttgtggatgtgacagagagcaatgcccgctgggtgcaggacttccggctgaaggcctatgccagccctgccaagctggagagcattgatgagcccatctgtgctgtgggccacggcgtggccgccctgtgctgtgccaccaatgaagatcgctcctgggtgtttgacagctacagcctgaccggccccagcgtgtgtgagctggtgcgggcccctggctttgcccggctgcccctggtggtggaggactttgtgaaggacagcggggcctgcttcagcgccagcgagccagatgctgtgcacgtggtgctggacagacacctggtgacaggccagaatgccagcagcacagtgcctgctgtgcagaacctgctcttcctgtgtggcagcaggaagtag

SEQ ID NO: 8253 - DNA, 1257 bp, synthetic construct; identical to SEQ ID NO: 7322
  misc_feature 1..1257: note = source = /note="Description of Artificial Sequence: Synthetic coding sequence"
  source 1..1257: mol_type = other DNA

SEQ ID NO: 8254 - DNA, 1425 bp, synthetic construct
  misc_feature 1..1425: note = source = /note="Description of Artificial Sequence: Synthetic coding sequence"
  source 1..1425: mol_type = other DNA
atggacaggaaccccagccccccacctcctggccgggacaaggaggaggaggaggaggtggccggcggggactgcatcggcagcacagtgtacagcaagcactggctgtttggagtgctgagcggcctcatccagatcgtgtccccagagaacaccaagagcagcagtgatgatgaggagcagctgacagagctggatgaggagatggagaatgagatctgccgggtgtgggacatgtccatggatgaagatgtggccctcttcctgcaggagttcaatgccccagacatcttcatgggcgtgctggccaagagcaagtgcccccggctgcgggagatctgtgtgggcatcctgggcaacatggcctgcttccaggagatctgtgtgtccatcagcagtgacaagaacctgggccaggtgctgctgcactgcctgtatgacagcgacccccccaccctgctggagaccagccggctgctgctgacctgcctgagccaggccgaggtggcctctgtgtgggtggagcgcatccaggagcacccagccatctatgacagcatctgcttcatcatgagcagcagcaccaacgtggacctgctggtgaaggtgggggaggtggtggacaagctgtttgacctggatgagaagctgatgctggagtgggtgagaaatggagctgcccagcccctggaccagccccaggaggagagcgaggagcagcctgtgttccggctggtgccctgcatcctggaggccgccaagcaggtgcgctcagaaaatcctgagtggctggatgtgtacatgcacatcctgcagctgctgaccaccgtggatgatggcatccaggccatcgtgcactgcccagacaccgggaaggacatctggaacctgctgtttgacctggtgtgccacgagttctgccagagtgatgacccccccatcatcctgcaggagcagaagacagtgctggcctctgtgttttctgtgctgagcgccatctatgccagccagacagagcaggagtacctgaagattgagaaggtggacctgcccctgattgacagcctcatccgggtgctgcagaacatggagcagtgccagaagaagccagaaaattctgctgagagcaacacagaggagaccaagaggacagacctgacccaggatgacttccacctgaagatcctgaaggacatcctgtgtgagttcctgagcaacatcttccaggccctgaccaaggagaccgtggcccagggcgtgaaggagggccagctgagcaagcagaagtgcagcagcgccttccagaacctgctgcccttctacagccctgtggtggaggacttcatcaagatcctgcgggaggtggacaaggccctggctgatgacctggagaagaacttccccagcctgaaggtgcagacctag

SEQ ID NO: 8255 - DNA, 438 bp, synthetic construct; identical to SEQ ID NO: 7088
  misc_feature 1..438: note = source = /note="Description of Artificial Sequence: Synthetic coding sequence"
  source 1..438: mol_type = other DNA

SEQ ID NO: 8256 - DNA, 1728 bp, synthetic construct
  misc_feature 1..1728: note = source = /note="Description of Artificial Sequence: Synthetic coding sequence"
  source 1..1728: mol_type = other DNA
tgaatttttggaggcagcatccactacttccgggtgccccgggagtactggagggaccggctgctgaagatgaaggcctgtggcctgaacaccctgaccacctacgtgccctggaacctgcacgagcctgagcggggcaagtttgacttcagcggcaacctggacctggaggcctttgtgctgatggctgctgagatcggcctgtgggtgatcctgcggcccggcccctacatctgcagcgagatggacctgggcggcctgcccagctggctgctgcaggaccccggcatgaggctgcggaccacctacaagggcttcacagaagctgtggacctgtactttgaccacctgatgagccgggtggtgcccctgcagtacaagagaggaggccccatcatcgctgtgcaggtggagaatgaatatggcagctacaacaaggaccctgcctacatgccctacgtgaagaaggccctggaggaccggggcatcgtggagctgctgctgaccagtgacaacaaggatggcctgagcaagggcatcgtgcagggcgtgctggccaccatcaacctgcagagcacccatgagctgcagctgctgaccaccttcctgttcaacgtgcagggcacccagcccaagatggtgatggagtactggacaggctggtttgacagctggggcggcccccacaacatcctggacagcagcgaggtgctgaagacagtgtctgccatcgtggatgctggcagcagcatcaacctgtacatgtttcatggaggcaccaactttggcttcatgaatggagccatgcacttccatgactacaagagtgatgtgaccagctatgactatgatgctgtgctgacagaggccggggactacacagccaagtacatgaagctgcgggacttcttcggcagcatcagcggcatccccctgcccccacctccagacctgctgcccaagatgccctatgagcccctgacccctgtgctgtacctgagcctgtgggatgccctgaagtacctgggggagcccatcaagtctgagaagcccatcaacatggagaacctgcctgtgaatggaggaaatggccagagctttggctacatcctgtatgagaccagcatcaccagcagcggcatcctgagcggccacgtgcatgaccggggccaggtgtttgtgaacacagtgtccatcggcttcctggactacaagaccaccaagattgctgtgcccctcatccagggctacacagtgctgcgcatcctggtggagaacagaggccgggtgaactacggggagaacattgatgaccagaggaagggcctcatcggcaacctgtacctgaatgacagccccctgaagaacttccgcatctacagcctggacatgaagaagagcttcttccagcgcttcggcctggacaagtggagcagcctgcctgagacccccaccctgcctgccttcttcctgggcagcctgagcatcagcagcaccccctgtgacaccttcctgaagctggagggctgggagaagggcgtggtgttcatcaatggccagaacctgggccgctactggaacatcggcccccagaagaccctgtacctgcccggcccctggctgagcagcggcatcaaccaggtgattgtgtttgaggagaccatggccggccctgccctgcagttcacagagaccccccacctgggcaggaaccagtacatcaagtag

SEQ ID NO: 8257 - DNA, 255 bp, synthetic construct
  misc_feature 1..255: note = source = /note="Description of Artificial Sequence: Synthetic coding sequence"
  source 1..255: mol_type = other DNA
atgaggaccctcttcaacctgctgtggctggccctggcctgcagccctgtgcacaccaccctgagcaagagtgatgccaagaaggccgccagcaagaccctgctggagaagagccagttcagtgacaagcctgtgcaggaccggggcctggtggtgacagacctgaaggccgagagcgtggtgctggagcacaggagctactgcagcgccaaggcccgggacagacactttgctggagatgtgctgggctactag

SEQ ID NO: 8258 - DNA, 744 bp, synthetic construct
  misc_feature 1..744: note = source = /note="Description of Artificial Sequence: Synthetic coding sequence"
  source 1..744: mol_type = other DNA
atgaggagcctgctgctgctgagcgccttctgcctgctggaggccgccctggccgctgaggtgaagaagccagctgctgctgctgcccctggaacagctgagaagctgagccccaaggccgccaccctggccgagaggtctgctggcctggccttcagcctgtaccaggccatggccaaggaccaggccgtggagaacatcctggtgtcccctgtggtggtggccagcagcctgggcctggtgtccctgggcggcaaggccaccacagccagccaggccaaggctgtgctgtctgctgagcagctgagagatgaggaggtgcatgctggcctgggggagctgctgcggagcctgagcaacagcacagccagaaatgtgacctggaagctgggcagccggctgtatggccccagctctgtgtcctttgctgatgactttgtgcgcagcagcaagcagcactacaactgtgagcacagcaagatcaacttccgggacaagaggtctgccctgcagagcatcaatgagtgggccgcccagaccacagatggcaagctgcctgaggtgaccaaggatgtggagaggacagatggagccctgctggtgaatgccatgttcttcaagccccactgggatgagaagttccaccacaagatggtggacaacagaggcttcatggtgaccaggagctacacagtgggcgtgatgatgatgcacaggacaggcctgtacaactactatgactag

SEQ ID NO: 8259 - DNA, 117 bp, synthetic construct
  misc_feature 1..117: note = source = /note="Description of Artificial Sequence: Synthetic coding sequence"
  source 1..117: mol_type = other DNA
atgaggaccctcttcaacctgctgtggctggccctggcctgcagccctgtgcacaccaccctgagcaagagtgatgccaagaaggccgccagcaagaccctgctggagaaggtgtag

SEQ ID NO: 8260 - DNA, 750 bp, synthetic construct
  misc_feature 1..750: note = source = /note="Description of Artificial Sequence: Synthetic coding sequence"
  source 1..750: mol_type = other DNA
atgaggagcctgctgctgctgagcgccttctgcctgctggaggccgccctggccgctgaggtgaagaagccagctgctgctgctgcccctggaacagctgagaagctgagccccaaggccgccaccctggccgagaggtctgctggcctggccttcagcctgtaccaggccatggccaaggaccaggccgtggagaacatcctggtgtcccctgtggtggtggccagcagcctgggcctggtgtccctgggcggcaaggccaccacagccagccaggccaaggctgtgctgtctgctgagcagctgagagatgaggaggtgcatgctggcctgggggagctgctgcggagcctgagcaacagcacagccagaaatgtgacctggaagctgggcagccggctgtatggccccagctctgtgtcctttgctgatgactttgtgcgcagcagcaagcagcactacaactgtgagcacagcaagatcaacttccgggacaagaggtctgccctgcagagcatcaatgagtgggccgcccagaccacagatggcaagctgcctgaggtgaccaaggatgtggagaggacagatggagccctgctggtgaatgccatgttcttcaagccccactgggatgagaagttccaccacaagatggtggacaacagaggcttcatggtgaccaggagctacacagtgggcgtgatgatgatgcacaggacaggcctgtacaactactatgatgatgaatag

SEQ ID NO: 8261 - DNA, 201 bp, synthetic construct
  misc_feature 1..201: note = source = /note="Description of Artificial Sequence: Synthetic coding sequence"
  source 1..201: mol_type = other DNA
atgaagcccctgctggtggtgtttgtgttcctgttcctgtgggaccctgtgctggccggcatcaacagcctgagcagcgagatgcacaagaagtgctacaagaatggcatctgccgcctggagtgctatgaaagtgagatgctggtggcctactgcatgttccagctggagtgctgcgtgaagggcaacccagccccctag

SEQ ID NO: 8262 - DNA, 1002 bp, synthetic construct; identical to SEQ ID NO: 7654
  misc_feature 1..1002: note = source = /note="Description of Artificial Sequence: Synthetic coding sequence"
  source 1..1002: mol_type = other DNA

SEQ ID NO: 8263 - DNA, 645 bp, synthetic construct
  misc_feature 1..645: note = source = /note="Description of Artificial Sequence: Synthetic coding sequence"
  source 1..645: mol_type = other DNA
atgaggcccaagacaggccaggtgggctgtgagaccccagaggagctgggccctggcccccggcagcgctggcccctgctgctgctgggcctggccatggtggcccacggcctgctgcggcccatggtggccccccagagcggggaccctgaccccggggcctctgtgggcagcagccgcagcagcctgcggagcctgtggggccgcctgctgctgcagcccagcccccagagagctgacccccgctgctggccccggggcttctggagcgagccccagagcctgtgctacgtgtttggaacaggcaccaaggtgacagtgctgggccagcccaaggccaaccccaccgtgaccctcttcccccccagcagcgaggagctgcaggccaacaaggccaccctggtgtgcctgatcagtgacttctacccaggagctgtgacagtggcctggaaggcagatggcagccctgtgaaggccggcgtggagaccaccaagcccagcaagcagagcaacaacaagtatgctgccagcagctacctgagcctgaccccagagcagtggaagagccacaggagctacagctgccaggtgacccatgagggcagcacagtggagaagacagtggcccccacagagtgcagctag

SEQ ID NO: 8264 - DNA, 1050 bp, synthetic construct
  misc_feature 1..1050: note = source = /note="Description of Artificial Sequence: Synthetic coding sequence"
  source 1..1050: mol_type = other DNA
tgactctacaagaaccggctgggcagcggcggccggggccgctgcatcaagcagggcgagaactggtacagccccacagaatttgaggccatggccggccgggccagcagcaaggactggaagaggagcatccgctatgccggccggcccctgcagtgcctgatccaggacggcatcctgaacccccacgccgccagctgcacctgtgccgcctgctgtgatgacatgaccctgagcggccctgtgcggctgtttgtgccctacaagaggaggaagaaggaaaatgagctgcccaccacccctgtgaagaaggacagccccaagaacatcaccctgctgcctgccacagctgccaccaccttcaccgtgacccccagcggccagatcaccaccagcggggccctgacctttgaccgggccagcacagtggaggccacagctgtgatcagcgagagccctgcccagggagatgtgtttgctggggccaccgtgcaggaggcctctgtgcagcccccctgccgggccagccaccctgagccccactacccaggctaccaggacagctgccagatcgcccccttccctgaggccgccctgcccaccagccaccccaagatcgtgctgaccagcctgcctgccctggccgtgcccccacccacccccaccaaggccgcccccccagccctggtgaatggcctggagctgtctgagcccaggtcctggctgtacctggaggagatggtgaacagcctgctgaacacagcccagcagctgaagaccctgtttgagcaggccaagcacgccagcacctaccgggaggccgccaccaaccaggccaagatccatgctgatgctgagaggaaggagcagagctgtgtgaactgtggccgggaggccatgtctgagtgcaccggctgccacaaggtgaactactgcagcaccttctgccagaggaagcgctggagcctgaccatgctgaccagcctggtgtccatctcctggctgcgggccatcctgccctgccagccccccaaggtgctgggcctgtag

SEQ ID NO: 8265 - DNA, 600 bp, synthetic construct
  misc_feature 1..600: note = source = /note="Description of Artificial Sequence: Synthetic coding sequence"
  source 1..600: mol_type = other DNA
atgagcctggacatccagagcctggacatccagtgtgaggagctgagtgatgcccgctgggccgagctgctgcccctgctgcagcagtgccaggtggtgcggctggatgactgtggcctgacagaggcccgctgcaaggacatcagcagcgccctgcgggtgaacccagccctggccgagctgaacctgcggagcaatgagctgggagatgtgggcgtgcactgtgtgctgcagggcctgcagacccccagctgcaagatccagaagctgagcctgcagaactgctgcctgaccggggccggctgcggcgtgctgagcagcaccctgcggaccctgcccaccctgcaggagctgcacctgagtgacaacctgctgggagatgctggcctgcagctgctgtgtgagggcctgctggacccccagtgccgcctggagaagctgcagctggagtactgcagcctgtctgctgccagctgtgagcccctggcctctgtgctgcgggccaagccagacttcaaggagctgactgtgagcaacaatgacatcaatgaagctggggtgcgggtgctgtgccagggcctgaaggacagcccctgctag

SEQ ID NO: 8266 - DNA, 465 bp, synthetic construct
  misc_feature 1..465: note = source = /note="Description of Artificial Sequence: Synthetic coding sequence"
  source 1..465: mol_type = other DNA
atggccggcatccctggcctgctcttcctgctcttcttcctgctgtgtgctgtgggccaggtgagcccctacagcgccccctggaagcccacctggccagcctaccgcctgcctgtggtgctgccccagagcaccctgaacctggccaagccagactttggagctgaggccaagctggaggtgagcagcagctgtggcccccagtgccacaagggcacccccctgcccacctatgaggaggccaagcagtacctgtcctatgagaccctgtatgccaacggcagcaggacagagacccaggtgggcatctacatcctgagcagcagtggagatggagcccagcaccgggacagcggcagcagcggcaagagcaggaggaagaggcagatctacggctatgacagccgcttcagcatctttgggaaggacttcctgctgaactaccccttcagcacctctgtgtag

SEQ ID NO: 8267 - DNA, 936 bp, synthetic construct; identical to SEQ ID NO: 6978
  misc_feature 1..936: note = source = /note="Description of Artificial Sequence: Synthetic coding sequence"
  source 1..936: mol_type = other DNA

SEQ ID NO: 8268 - DNA, 1404 bp, synthetic construct; identical to SEQ ID NO: 7332
  misc_feature 1..1404: note = source = /note="Description of Artificial Sequence: Synthetic coding sequence"
  source 1..1404: mol_type = other DNA

SEQ ID NO: 8269 - DNA, 81 bp, synthetic construct
  misc_feature 1..81: note = source = /note="Description of Artificial Sequence: Synthetic coding sequence"
  source 1..81: mol_type = other DNA
atgaggaccctcttcaacctgctgtggctggccctggcctgcagccctgtgcacaccaccctgagcaagagtgatgcctag

SEQ ID NO: 8270 - DNA, 549 bp, synthetic construct
  misc_feature 1..549: note = source = /note="Description of Artificial Sequence: Synthetic coding sequence"
  source 1..549: mol_type = other DNA
atgaggaggatgtgggccacccagggcctggccgtggccctggccctgtctgtgctgcccggcagccgggccctgcggcctggggactgtgaggtgtgcatctcctacctgggccgcttctaccaggacctgaaggacagagatgtgaccttctccccagccaccattgaaaatgagctgatcaagttctgccgggaggcccggggcaaggaaaatcggctgtgctactacatcggggccacagatgatgctgccaccaagatcatcaatgaggtgtccaagcccctggcccaccacatccctgtggagaagatctgtgagaagctgaagaagaaggacagccagatctgtgagctgaagtatgacaagcagattgacctgagcacagtggacctgaagaagctgcgggtgaaggagctgaagaagatcctggatgactggggcgagacctgcaagggctgtgccgagaagagtgactacatcaggaagatcaatgagctgatgcccaagtatgcccccaaggccgccagcgccaggacagacctgtag

SEQ ID NO: 8271 - DNA, 153 bp, synthetic construct
  misc_feature 1..153: note = source = /note="Description of Artificial Sequence: Synthetic coding sequence"
  source 1..153: mol_type = other DNA
atgaaggtgttcttcctgtttgctgtgctcttctgcctggtgcagaccaacagcgtgcacatcagccaccgggaggcccggggccccagcttccgcatctgtgtggacttcctgggcccccgctgggcccggggctgcagcacaggcaactag

SEQ ID NO: 8272 - DNA, 666 bp, synthetic construct
  misc_feature 1..666: note = source = /note="Description of Artificial Sequence: Synthetic coding sequence"
  source 1..666: mol_type = other DNA
atgggcgccaccaccatggaccagaagagcctgtgggccggcgtggtggtgctgctgctgctgcagggcggcagcgcctacaagctggtgtgctacttcaccaactggagccaggaccggcaggagcccgggaagttcaccccagaaaatattgaccccttcctgtgcagccacctgatctacagctttgccagcattgagaacaacaaggtgatcatcaaggacaagtctgaggtgatgctgtaccagaccatcaacagcctgaagaccaagaaccccaagctgaagatcctgctgagcattggaggctacctgtttggcagcaagggcttccaccccatggtggacagcagcaccagccggctggagttcatcaacagcatcatcctcttcctgaggaaccacaactttgatggcctggatgtgtcctggatctacccagaccagaaggagaacacccacttcaccgtgctgatccacgagctggccgaggccttccagaaggacttcaccaagagcaccaaggagcggctgctgctgacagctggggtgtctgctggccggcagatgattgacaacagctaccaggtggagaagctggccaaggacctggacttcatcaacctgctgagctttgacttccacggctcctgggagaagccctag

SEQ ID NO: 8273 - DNA, 1257 bp, synthetic construct; identical to SEQ ID NO: 7212
  misc_feature 1..1257: note = source = /note="Description of Artificial Sequence: Synthetic coding sequence"
  source 1..1257: mol_type = other DNA

SEQ ID NO: 8274 - DNA, 612 bp, synthetic construct
  misc_feature 1..612: note = source = /note="Description of Artificial Sequence: Synthetic coding sequence"
  source 1..612: mol_type = other DNA
atgaggagcctgctgctgctgagcgccttctgcctgctggaggccgccctggccgctgaggtgaagaagccagctgctgctgctgcccctggaacagctgagaagctgagccccaaggccgccaccctggccgagaggtctgctggcctggccttcagcctgtaccaggccatggccaaggaccaggccgtggagaacatcctggtgtcccctgtggtggtggccagcagcctgggcctggtgtccctgggcggcaaggccaccacagccagccaggccaaggctgtgctgtctgctgagcagctgagagatgaggaggtgcatgctggcctgggggagctgctgcggagcctgagcaacagcacagccagaaatgtgacctggaagctgggcagccggctgtatggccccagctctgtgtcctttgctgatgactttgtgcgcagcagcaagcagcactacaactgtgagcacagcaagatcaacttccgggacaagaggtctgccctgcagagcatcaatgagtgggccgcccagaccacagatggcaagctgcctgaggtgaccaaggatgtggagaggacagatggagccctgctggtgaatgcctag

SEQ ID NO: 8275 - DNA, 492 bp, synthetic construct
  misc_feature 1..492: note = source = /note="Description of Artificial Sequence: Synthetic coding sequence"
  source 1..492: mol_type = other DNA
atgaggagcctgctgctgctgagcgccttctgcctgctggaggccgccctggccgctgaggtgaagaagccagctgctgctgctgcccctggaacagctgagaagctgagccccaaggccgccaccctggccgagaggtctgctggcctggccttcagcctgtaccaggccatggccaaggaccaggccgtggagaacatcctggtgtcccctgtggtggtggccagcagcctgggcctggtgtccctgggcggcaaggccaccacagccagccaggccaaggctgtgctgtctgctgagcagctgagagatgaggaggtgcatgctggcctgggggagctgctgcggagcctgagcaacagcacagccagaaatgtgacctggaagctgggcagccggctgtatggccccagctctgtgtcctttgctgatgactttgtgcgcagcagcaagcagcactacaactgtgagcacagcaagatcaacttctag

SEQ ID NO: 8276 - DNA, 570 bp, synthetic construct
  misc_feature 1..570: note = source = /note="Description of Artificial Sequence: Synthetic coding sequence"
  source 1..570: mol_type = other DNA
atgagcctggacatccagagcctggacatccagtgtgaggagctgagtgatgcccgctgggccgagctgctgcccctgctgcagcagtgccaggtggtgcggctggatgactgtggcctgacagaggcccgctgcaaggacatcagcagcgccctgcgggtgaacccagccctggccgagctgaacctgcggagcaatgagctgggagatgtgggcgtgcactgtgtgctgcagggcctgcagacccccagctgcaagatccagaagctgagcctgcagaactgctgcctgaccggggccggctgcggcgtgctgagcagcaccctgcggaccctgcccaccctgcaggagctgcacctgagtgacaacctgctgggagatgctggcctgcagctgctgtgtgagggcctgctggacccccagtgccgcctggagaagctgcagctggagtactgcagcctgtctgctgccagctgtgagcccctggcctctgtgctgcgggccaagccagacttcaaggagctgactgtgagcaacaatgacatcaatgaagctggggtgcgggtgtag

SEQ ID NO: 8277 - DNA, 585 bp, synthetic construct
  misc_feature 1..585: note = source = /note="Description of Artificial Sequence: Synthetic coding sequence"
  source 1..585: mol_type = other DNA
atgagcctggacatccagagcctggacatccagtgtgaggagctgagtgatgcccgctgggccgagctgctgcccctgctgcagcagtgccaggtggtgcggctggatgactgtggcctgacagaggcccgctgcaaggacatcagcagcgccctgcgggtgaacccagccctggccgagctgaacctgcggagcaatgagctgggagatgtgggcgtgcactgtgtgctgcagggcctgcagacccccagctgcaagatccagaagctgagcctgcagaactgctgcctgaccggggccggctgcggcgtgctgagcagcaccctgcggaccctgcccaccctgcaggagctgcacctgagtgacaacctgctgggagatgctggcctgcagctgctgtgtgagggcctgctggacccccagtgccgcctggagaagctgcagctggagtactgcagcctgtctgctgccagctgtgagcccctggcctctgtgctgcgggccaagccagacttcaaggagctgactgtgagcaacaatgacatcaatgaagctggggtgcgggtgctgtgccagggcctgtag

SEQ ID NO: 8278 - DNA, 1086 bp, synthetic construct; identical to SEQ ID NO: 7981
  misc_feature 1..1086: note = source = /note="Description of Artificial Sequence: Synthetic coding sequence"
  source 1..1086: mol_type = other DNA

SEQ ID NO: 8279 - DNA, 327 bp, synthetic construct
  misc_feature 1..327: note = source = /note="Description of Artificial Sequence: Synthetic coding sequence"
  source 1..327: mol_type = other DNA
tgacccaagagcaagtggaggagcaagatcctgctgggcctgaacttctacggcatggactatgccaccagcaaggatgcccgggagcctgtggtgggcgcccgctacatccagaccctgaaggaccaccggcccaggatggtgtgggacagccaggccagcgagcacttctttgagtacaagaagagccgcagcggccgccacgtggtgttctaccccaccctgaagagcctgcaggtgcggctggagctggcccgggagctgggcgtgggcgtgtccatctgggagctgggccagggcctggactacttctatgacctgctgtag

SEQ ID NO: 8280 - DNA, 504 bp, synthetic construct
  misc_feature 1..504: note = source = /note="Description of Artificial Sequence: Synthetic coding sequence"
  source 1..504: mol_type = other DNA
atgaggagcctgctgctgctgagcgccttctgcctgctggaggccgccctggccgctgaggtgaagaagccagctgctgctgctgcccctggaacagctgagaagctgagccccaaggccgccaccctggccgagaggtctgctggcctggccttcagcctgtaccaggccatggccaaggaccaggccgtggagaacatcctggtgtcccctgtggtggtggccagcagcctgggcctggtgtccctgggcggcaaggccaccacagccagccaggccaaggctgtgctgtctgctgagcagctgagagatgaggaggtgcatgctggcctgggggagctgctgcggagcctgagcaacagcacagccagaaatgtgacctggaagctgggcagccggctgtatggccccagctctgtgtcctttgctgatgactttgtgcgcagcagcaagcagcactacaactgtgagcacagcaagatcaacttccgggacaagaggtag

SEQ ID NO: 8281 - DNA, 1209 bp, synthetic construct; identical to SEQ ID NO: 7162
  misc_feature 1..1209: note = source = /note="Description of Artificial Sequence: Synthetic coding sequence"
  source 1..1209: mol_type = other DNA

SEQ ID NO: 8282 - DNA, 975 bp, synthetic construct
  misc_feature 1..975: note = source = /note="Description of Artificial Sequence: Synthetic coding sequence"
  source 1..975: mol_type = other DNA
atgaggagcctgctgctgctgagcgccttctgcctgctggaggccgccctggccgctgaggtgaagaagccagctgctgctgctgcccctggaacagctgagaagctgagccccaaggccgccaccctggccgagaggtctgctggcctggccttcagcctgtaccaggccatggccaaggaccaggccgtggagaacatcctggtgtcccctgtggtggtggccagcagcctgggcctggtgtccctgggcggcaaggccaccacagccagccaggccaaggctgtgctgtctgctgagcagctgagagatgaggaggtgcatgctggcctgggggagctgctgcggagcctgagcaacagcacagccagaaatgtgacctggaagctgggcagccggctgtatggccccagctctgtgtcctttgctgatgactttgtgcgcagcagcaagcagcactacaactgtgagcacagcaagatcaacttccgggacaagaggtctgccctgcagagcatcaatgagtgggccgcccagaccacagatggcaagctgcctgaggtgaccaaggatgtggagaggacagatggagccctgctggtgaatgccatgttcttcaagccccactgggatgagaagttccaccacaagatggtggacaacagaggcttcatggtgaccaggagctacacagtgggcgtgatgatgatgcacaggacaggcctgtacaactactatgatgatgagaaggagaagctgcagatcgtggagatgcccctggcccacaagctgagcagcctcatcatcctgatgccccaccacgtggagcccctggagcggctggagaagctgctgaccaaggagcagctgaagatctggatgggcaagatgcagaagaaggctgtggccatcagcctgcccaagggcgtggtggaggtgacccatgacctgcaggtgcggggcggccctgcctag

SEQ ID NO: 8283 - DNA, 990 bp, synthetic construct
  misc_feature 1..990: note = source = /note="Description of Artificial Sequence: Synthetic coding sequence"
  source 1..990: mol_type = other DNA
atggtgtccaagagccgctggaagctgctggccatgctggccctggtgctggtggtgatggtgtggtacagcatcagccgggaggacagcttctacttccccatccctgagaagaaggagccctgcctgcagggcgaggccgagagcaaggccagcaagctgtttggaaactacagccgggaccagcccatcttcctgcggctggaggactacttctgggtgaagacccccagcgcctatgagctgccctacggcaccaagggcagcgaggacctgctgctgcgggtgctggccatcaccagcagcagcatccccaagaacatccagagcctgcgctgccgccgctgtgtggtggtgggcaatggccaccggctgaggaacagcagcctgggagatgccatcaacaagtatgatgtggtgatccggctgaacaatgcccctgtggccggctatgaaggagatgtgggcagcaagaccaccatgaggctcttctacccagagagcgcccactttgaccccaaggtggagaacaacccagacaccctgctggtgctggtggccttcaaggccatggacttccactggattgagaccatcctgagtgacaagaagagggtgaggaagggcttctggaagcagcccccactcatctgggatgtgaaccccaagcagatccgcatcctgaaccccttcttcatggagattgctgctgacaagctgctgagcctgcccatgcagcagcccaggaagatcaagcagaagcccaccaccggcctgctggccatcaccctggccctgcacctgtgtgacctggtgcacatcgccggcttcggctacccagatgcctacaacaagaagcagaccatccactactatgagcagatcaccctgaagtccatggccggcagcggccacaacgtgtcccaggaggccctggccatcaagaggatgctggagatgggcgccatcaagaacctgaccagcttctag

SEQ ID NO: 8284 - DNA, 351 bp, synthetic construct
  misc_feature 1..351: note = source = /note="Description of Artificial Sequence: Synthetic coding sequence"
  source 1..351: mol_type = other DNA
atgaggaccctcttcaacctgctgtggctggccctggcctgcagccctgtgcacaccaccctgagcaagagtgatgccaagaaggccgccagcaagaccctgctggagaagagccagttcagtgacaagcctgtgcaggaccggggcctggtggtgacagacctgaaggccgagagcgtggtgctggagcacaggagctactgcagcgccaaggcccgggacagacactttgctggagatgtgctgggctacgtgaccccctggaacagccacggctatgatgtgaccaaggtgtttggcagcaagttcacccagatcagccctgtgtggctgcagctgaagagaagatag

SEQ ID NO: 8285 - DNA, 282 bp, synthetic construct; identical to SEQ ID NO: 7538
  misc_feature 1..282: note = source = /note="Description of Artificial Sequence: Synthetic coding sequence"
  source 1..282: mol_type = other DNA

SEQ ID NO: 8286 - DNA, 255 bp, synthetic construct
  misc_feature 1..255: note = source = /note="Description of Artificial Sequence: Synthetic coding sequence"
  source 1..255: mol_type = other DNA
atgaggcccaagacaggccaggtgggctgtgagaccccagaggagctgggccctggcccccggcagcgctggcccctgctgctgctgggcctggccatggtggcccacggcctgctgcggcccatggtggccccccagagcggggaccctgaccccggggcctctgtgggcagcagccgcagcagcctgcggagcctgtggggccgcagcgcccagggccagccccactgccacagcgtgcctgccctgctgtag

SEQ ID NO: 8287 - DNA, 27 bp, synthetic construct
  misc_feature 1..27: note = source = /note="Description of Artificial Sequence: Synthetic coding sequence"
  source 1..27: mol_type = other DNA
atgagcctggacatccagagcctgtag

SEQ ID NO: 8288 - DNA, 576 bp, synthetic construct
  misc_feature 1..576: note = source = /note="Description of Artificial Sequence: Synthetic coding sequence"
  source 1..576: mol_type = other DNA
atgctgatcttctggaccatcaccctcttcctgctgggcgccgccaagggcaaggaggtgtgctatgaggacctgggctgcttcagtgacacagagccctggggcggcacagccatccggcccctgaagatcctgccctggagccctgagaagattggcacccgcttcctgctgtacaccaatgaaaaccccaacaacttccagatcctgctgctgagtgaccccagcaccatcgaggccagcaacttccagatggacaggaagacccgcttcatcatccacggcttcatcgacaagggagatgagagctgggtgacagacatgtgcaagaagctgtttgaggtggaggaggtgaactgcatctgtgtggactggaagaagggcagccaggccacctacacccaggccgccaacaacgtgcgggtggtgggcgcccaggtggcccagatgctggacatcctgctgacagagtacagctacccacccagcaaggtgcacctgattggccacagcctgggcgcccacgtggccggggaggccggcagcaagaccccaggcctgagccgcatcacctag

SEQ ID NO: 8289 - DNA, 123 bp, synthetic construct
  misc_feature 1..123: note = source = /note="Description of Artificial Sequence: Synthetic coding sequence"
  source 1..123: mol_type = other DNA
atgagcctggacatccagagcctggacatccagtgtgaggagctgagtgatgcccgctgggccgagctgctgcccctgctgcagcagtgccaggtggtgcggctggatgactgtggcctgtag

SEQ ID NO: 8290 - DNA, 648 bp, synthetic construct
  misc_feature 1..648: note = source = /note="Description of Artificial Sequence: Synthetic coding sequence"
  source 1..648: mol_type = other DNA
atgaggcccaagacaggccaggtgggctgtgagaccccagaggagctgggccctggcccccggcagcgctggcccctgctgctgctgggcctggccatggtggcccacggcctgctgcggcccatggtggccccccagagcggggaccctgaccccggggcctctgtgggcagcagccgcagcagcctgcggagcctgtggggcagccggctgctgctgcagcccagcccccagagagctgacccccgctgctggccccggggcttctggagcgagccccagagcctgtgctacgtgtttggcaccggcaccaaggtgacagtgctgggccagcccaaggccaaccccaccgtgaccctcttcccccccagcagcgaggagctgcaggccaacaaggccaccctggtgtgcctgatcagtgacttctacccaggagctgtgacagtggcctggaaggcagatggcagccctgtgaaggccggcgtggagaccaccaagcccagcaagcagagcaacaacaagtatgctgccagcagctacctgagcctgaccccagagcagtggaagagccacaggagctacagctgccaggtgacccatgagggcagcacagtggagaagacagtggcccccacagaatgttcctag

SEQ ID NO: 8291 - DNA, 999 bp, synthetic construct
  misc_feature 1..999: note = source = /note="Description of Artificial Sequence: Synthetic coding sequence"
  source 1..999: mol_type = other DNA
atgtgcccagctggctggaagctgctggccatgctggccctggtgctggtggtgatggtgtggtacagcatcagcagagaagatcgctacatcgagctgttctacttccccatccctgagaagaaggagccctgcctgcagggcgaggccgagagcaaggccagcaagctgtttggaaactacagccgggaccagcccatcttcctgcggctggaggactacttctgggtgaagaccccatctgcctatgagctgccctacggcaccaagggcagcgaggacctgctgctgcgggtgctggccatcaccagcagcagcatccccaagaacatccagagcctgcgctgcagaagatgtgtggtggtgggcaatggccaccggctgaggaacagcagcctgggagatgccatcaacaagtatgatgtggtgatccggctgaacaatgcccctgtggccggctatgaaggagatgtgggcagcaagaccaccatgaggctcttctacccagagagcgcccactttgaccccaaggtggagaacaacccagacaccctgctggtgctggtggccttcaaggccatggacttccactggattgagaccatcctgagtgacaagaagagggtgaggaagggcttctggaagcagcccccactcatctgggatgtgaaccccaagcagatccgcatcctgaaccccttcttcatggagattgctgctgacaagctgctgagcctgcccatgcagcagcccaggaagatcaagcagaagcccaccaccggcctgctggccatcaccctggccctgcacctgtgtgacctggtgcacatcgccggcttcggctacccagatgcctacaacaagaagcagaccatccactactatgagcagatcaccctgaagtccatggccggcagcggccacaacgtgtcccaggaggccctggccatcaagaggatgctggagatgggcgccatcaagaacctgaccagcttctag

SEQ ID NO: 8292 - DNA, 888 bp, synthetic construct
  misc_feature 1..888: note = source = /note="Description of Artificial Sequence: Synthetic coding sequence"
  source 1..888: mol_type = other DNA
atgaggagcctgctgctgctgagcgccttctgcctgctggaggccgccctggccgctgaggtgaagaagccagctgctgctgctgcccctggaacagctgagaagctgagccccaaggccgccaccctggccgagaggtctgctggcctggccttcagcctgtaccaggccatggccaaggaccaggccgtggagaacatcctggtgtcccctgtggtggtggccagcagcctgggcctggtgtccctgggcggcaaggccaccacagccagccaggccaaggctgtgctgtctgctgagcagctgagagatgaggaggtgcatgctggcctgggggagctgctgcggagcctgagcaacagcacagccagaaatgtgacctggaagctgggcagccggctgtatggccccagctctgtgtcctttgctgatgactttgtgcgcagcagcaagcagcactacaactgtgagcacagcaagatcaacttccgggacaagaggtctgccctgcagagcatcaatgagtgggccgcccagaccacagatggcaagctgcctgaggtgaccaaggatgtggagaggacagatggagccctgctggtgaatgccatgttcttcaagccccactgggatgagaagttccaccacaagatggtggacaacagaggcttcatggtgaccaggagctacacagtgggcgtgatgatgatgcacaggacaggcctgtacaactactatgatgatgagaaggagaagctgcagatcgtggagatgcccctggcccacaagctgagcagcctcatcatcctgatgccccaccacgtggagcccctggagcggctggagaagctgctgaccaaggagcagctgaagatctggatgggctag

SEQ ID NO: 8293 - DNA, 399 bp, synthetic construct
  misc_feature 1..399: note = source = /note="Description of Artificial Sequence: Synthetic coding sequence"
  source 1..399: mol_type = other DNA
atgaggaccctcttcaacctgctgtggctggccctggcctgcagccctgtgcacaccaccctgagcaagagtgatgccaagaaggccgccagcaagaccctgctggagaagagccagttcagtgacaagcctgtgcaggaccggggcctggtggtgacagacctgaaggccgagagcgtggtgctggagcacaggagctactgcagcgccaaggcccgggacagacactttgctggagatgtgctgggctacgtgaccccctggaacagccacggctatgatgtgaccaaggtgtttggcagcaagttcacccagatcagccctgtgtggctgcagctgaagagaagaggccgggagatgtttgaggtgacaggcctgcatgatgtggaccagggctag

SEQ ID NO: 8294 - DNA, 360 bp, synthetic construct
  misc_feature 1..360: note = source = /note="Description of Artificial Sequence: Synthetic coding sequence"
  source 1..360: mol_type = other DNA
atgaggaccctcttcaacctgctgtggctggccctggcctgcagccctgtgcacaccaccctgagcaagagtgatgccaagaaggccgccagcaagaccctgctggagaagagccagttcagtgacaagcctgtgcaggaccggggcctggtggtgacagacctgaaggccgagagcgtggtgctggagcacaggagctactgcagcgccaaggcccgggacagacactttgctggagatgtgctgggctacgtgaccccctggaacagccacggctatgatgtgaccaaggtgtttggcagcaagttcacccagatcagccctgtgtggctgcagctgaagagaagaggccgggagtag

SEQ ID NO: 8295 - DNA, 390 bp, synthetic construct; identical to SEQ ID NO: 6974
  misc_feature 1..390: note = source = /note="Description of Artificial Sequence: Synthetic coding sequence"
  source 1..390: mol_type = other DNA

SEQ ID NO: 8296 - DNA, 1386 bp, synthetic construct; identical to SEQ ID NO: 7292
  misc_feature 1..1386: note = source = /note="Description of Artificial Sequence: Synthetic coding sequence"
  source 1..1386: mol_type = other DNA

SEQ ID NO: 8297 - DNA, 453 bp, synthetic construct
  misc_feature 1..453: note = source = /note="Description of Artificial Sequence: Synthetic coding sequence"
  source 1..453: mol_type = other DNA
atgaggagcctgctgctgctgagcgccttctgcctgctggaggccgccctggccgctgaggtgaagaagccagctgctgctgctgcccctggaacagctgagaagctgagccccaaggccgccaccctggccgagaggtctgctggcctggccttcagcctgtaccaggccatggccaaggaccaggccgtggagaacatcctggtgtcccctgtggtggtggccagcagcctgggcctggtgtccctgggcggcaaggccaccacagccagccaggccaaggctgtgctgtctgctgagcagctgagagatgaggaggtgcatgctggcctgggggagctgctgcggagcctgagcaacagcacagccagaaatgtgacctggaagctgggcagccggctgtatggccccagctctgtgtcctttgctgatgactttgtgcgcagcagctag

SEQ ID NO: 8298 - DNA, 1257 bp, synthetic construct; identical to SEQ ID NO: 7322
  misc_feature 1..1257: note = source = /note="Description of Artificial Sequence: Synthetic coding sequence"
  source 1..1257: mol_type = other DNA

SEQ ID NO: 8299 - DNA, 1002 bp, synthetic construct; identical to SEQ ID NO: 7654
  misc_feature 1..1002: note = source = /note="Description of Artificial Sequence: Synthetic coding sequence"
  source 1..1002: mol_type = other DNA

SEQ ID NO: 8300 - DNA, 987 bp, synthetic construct
  misc_feature 1..987: note = source = /note="Description of Artificial Sequence: Synthetic coding sequence"
  source 1..987: mol_type = other DNA
atgtgcccagctggctggaagctgctggccatgctggccctggtgctggtggtgatggtgtggtacagcatcagcagagaagattccttctacttccccatccctgagaagaaggagccctgcctgcagggcgaggccgagagcaaggccagcaagctgtttggaaactacagccgggaccagcccatcttcctgcggctggaggactacttctgggtgaagaccccatctgcctatgagctgccctacggcaccaagggcagcgaggacctgctgctgcgggtgctggccatcaccagcagcagcatccccaagaacatccagagcctgcgctgcagaagatgtgtggtggtgggcaatggccaccggctgaggaacagcagcctgggagatgccatcaacaagtatgatgtggtgatccggctgaacaatgcccctgtggccggctatgaaggagatgtgggcagcaagaccaccatgaggctcttctacccagagagcgcccactttgaccccaaggtggagaacaacccagacaccctgctggtgctggtggccttcaaggccatggacttccactggattgagaccatcctgagtgacaagaagagggtgaggaagggcttctggaagcagcccccactcatctgggatgtgaaccccaagcagatccgcatcctgaaccccttcttcatggagattgctgctgacaagctgctgagcctgcccatgcagcagcccaggaagatcaagcagaagcccaccaccggcctgctggccatcaccctggccctgcacctgtgtgacctggtgcacatcgccggcttcggctacccagatgcctacaacaagaagcagaccatccactactatgagcagatcaccctgaagtccatggccggcagcggccacaacgtgtcccaggaggccctggccatcaagaggatgctggagatgggcgccatcaagaacctgaccagcttctag

SEQ ID NO: 8301 - DNA, 585 bp, synthetic construct; identical to SEQ ID NO: 6927
  misc_feature 1..585: note = source = /note="Description of Artificial Sequence: Synthetic coding sequence"
  source 1..585: mol_type = other DNA

SEQ ID NO: 8302 - DNA, 1386 bp, synthetic construct; identical to SEQ ID NO: 7292
  misc_feature 1..1386: note = source = /note="Description of Artificial Sequence: Synthetic coding sequence"
  source 1..1386: mol_type = other DNA

SEQ ID NO: 8303 - DNA, 1995 bp, synthetic construct
  misc_feature 1..1995: note = source = /note="Description of Artificial Sequence: Synthetic coding sequence"
  source 1..1995: mol_type = other DNA
atgccccaggcccccagcacaggcagcagcctcatccgggaccccagcatcgcccacaggaacacccagatcctgtggacagaagctggccgggacctggcccaggacacccgctacaccggggaggagagcctgaccatctttgtggacaagaggaagctgagcaagagagctgagggcagtgacagcaccaccaacagcagctctgtgaccctggagaccctgcaccagctggccgccagctacttcatcgaccgggacagcaccctgcggcggctgcaccacatccagatcgccagcacagccatcaaggtgacagagaccaggacaggccccctgggctgcagcaactatgacaacctggacagcgtgtcctctgtgctggtgcagagccctgagaacaagatccagctgcagggcctgcaggtgctgctgcctgactacctgcaggagagatttgtgcaggccgccctgagctacatcgcctgcaacagcgagggggagttcatctgcaaggaaaatgactgctggtgccactgcggccccaagtttcctgagtgcaactgccccagcatggacatccaggccatggaggagaacctgctgcgcatcacagagacctggaaggcctacaacagcgactttgaggagagtgatgagttcaagctgttcatgaagaggctgcccatgaactacttcctgaacaccagcaccatcatgcacctgtggaccatggacagcaacttccagaggagatatgagcagctggagaacagcatgaagcagctgttcctgaaggcccagaagatcgtgcacaagctgttcagcctgagcaagcgctgccacaagcagcccctcatcagcctgccccggcagaggaccagcacctactggctgacccgcatccagagcttcctgtactgcaatgaaaatggcctgctgggcagcttcagcgaggagacccacagctgcacctgccccaatgaccaggtggtgtgcacagccttcctgccctgcaccgtgggagatgccagcgcctgcctgacctgtgccccagacaacagaacccgctgtggcacctgcaacacaggctacatgctgagccagggcctgtgcaagccagaggtggccgagagcacagaccactacatcggctttgaaacagacctgcaggacctggagatgaagtacctgctgcagaagacagaccggcgcatcgaggtgcacgccatcttcatcagcaatgacatgaggctgaacagctggtttgaccccagctggaggaagaggatgctgctgaccctgaagagcaacaagtacaagagcagcctggtgcacatgatcctgggcctgagcctgcagatctgcctgaccaagaacagcaccctggagcctgtgctggccgtgtatgtgaacccctttggaggcagccacagcgagagctggttcatgcctgtgaatgaaaacagcttcccagactgggagaggaccaagctggacctgcccctgcagtgctacaactggaccctgaccctgggcaacaagtggaagaccttctttgagaccgtgcacatctacctgcggagccgcatcaagagcaatggccccaatggaaatgaaagcatctactatgagcccctggagttcatcgaccccagcaggaacctgggctacatgaagatcaacaacatccaggtgtttggctacagcatgcactttgatcctgaggccatccgggacctgatcctgcagctggactacccctacacccagggcagccaggacagcgccctgctgcagctgctggagatccgggacagagtgaacaagctgagccccccaggccagaggcggctggacctcttcagctgcctgctgcggcaccggctgaagctgagcaccagcgaggtggtgcgcatccagagcgccctgcaggccttcaatgccaagctgcccaacaccatggactatgacaccaccaagctgtgcagctag

SEQ ID NO: 8304 - DNA, 459 bp, synthetic construct
  misc_feature 1..459: note = source = /note="Description of Artificial Sequence: Synthetic coding sequence"
  source 1..459: mol_type = other DNA
atggcccgggactatgaccacctgttcaagctgctgatcatcggggacagcggcgtgggcaagagcagcctgctgctgcgctttgctgacaacaccttcagcggcagctacatcaccaccatcggcgtggacttcaagatcagaacagtggagatcaatggagagaaggtgaagctgcagatctgggacacagctggccaggagcgcttccgcaccatcaccagcacctactaccggggcacccacggcgtgattgtggtgtatgatgtgaccagcgctgagagctttgtgaatgtgaagcgctggctgcacgagatcaaccagaactgtgatgatgtgtgccgcatcctggatgtgcagctgcaccacggggccggcccccccagcaaggagcggcagcccgggaagacagctgctgccaccacagagcgctgtggggaggcccacgaggagcagtag

SEQ ID NO: 8305 - DNA, 696 bp, synthetic construct
  misc_feature 1..696: note = source = /note="Description of Artificial Sequence: Synthetic coding sequence"
  source 1..696: mol_type = other DNA
atgctgtacatcggcattgctgagtacttcttcaagagcgccagctttgcccacttcaccgctggggtcttcaacgtgaccctgagcacagaggagatcagcaaccactttgtgcagaacagccagggcctgggcaatgtgctgagcagaattgctgagatctacatcctgagccagcccttcatggtgcgcatcatggccacagagccccccatcatcaacctgcagcccggcaacttcaccctggacatcccagccagcatcatgatgctgacccagcccaagaacagcacagtggagaccatcgtgtccatggactttgtggccagcacctctgtgggcctggtgatcctgggccagaggctggtgtgcagcctgagcctgaaccgcttccggctggccctgcctgagagcaacagaagcaacatcgaggtgctgcgctttgagaacatcctgagcagcatcctgcactttggagtgctgcccctggccaatgccaagctgcagcagggcttccccctgagcaacccccacaagttcctgtttgtgaacagcgacatcgaggtgctggagggcttcctgctgatcagcacagacctgaagtatgagaccagcagcaagcagcagcccagcttccacgtgtgggagggcctgaacctgatcagccggcagtggaggggcaagagcgccccctag

SEQ ID NO: 8306 - DNA, 1911 bp, synthetic construct; identical to SEQ ID NO: 7237
  misc_feature 1..1911: note = source = /note="Description of Artificial Sequence: Synthetic coding sequence"
  source 1..1911: mol_type = other DNA

SEQ ID NO: 8307 - DNA, 1374 bp, synthetic construct
  misc_feature 1..1374: note = source = /note="Description of Artificial Sequence: Synthetic coding sequence"
  source 1..1374: mol_type = other DNA
atgggctgcagcctgcccctgagctgcatcatggtgcgctctgtggcctgggccggcttcatggtgctgctgatgatcccctggggcagcgctgccaagctggtgtgctacttcaccaactgggcccagtaccggcagggcgaggcccgcttcctgcccaaggacctggaccccagcctgtgcacccacctgatctatgcctttgctggcatgaccaaccaccagctgagcaccacagagtggaatgatgagaccctgtaccaggagttcaacggcctgaagaagatgttcacagacatggtggccacagccaacaaccggcagacctttgtgaacagcgccatccgcttcctgaggaagtacagctttgatggcctggacctggactgggagtacccaggcagccagggcagccctgctgtggacaaggagcgcttcaccaccctggtgcaggacctggccaatgccttccagcaggaggcccagaccagcggcaaggagcggctgctgctgtctgctgctgtgcctgctggccagacctacgtggatgctggctatgaggtggacaagatcgcccagaacctggactttgtgaacctgatggcctatgacttccacggctcctgggagaaggtgacaggccacaacagccccctgtacaagaggcaggaggagagcggggctgctgccagcctgaatgtggatgctgctgtgcagcagtggctgcagaagggcaccccagccagcaagctgatcctgggcatgcccacctacggccgctccttcaccctggccagcagcagtgacaccagggtgggcgccccagccactggaagtggcaccccaggccccttcaccaaggagggcggcatgctggcctactatgaggtgtgctcctggaagggggccaccaagcagaggatccaggaccagaaggtgccctacatcttccgggacaaccagtgggtgggctttgatgatgtggagagcttcaagaccaaggtgtcctacctgaagcagaagggcctgggcggggccatggtgtgggccctggacctggatgactttgctggcttcagctgcaaccagggccgctaccccctcatccagaccctgcggcaggagctgagcctgccctacctgcccagcggcaccccagagctggaggtgcccaagccaggccagcccagcgagcctgagcacggccccagccctggccaggacaccttctgccagggcaaggcagatggcctgtaccccaacccccgggagaggagcagcttctacagctgtgccgccggccgcctcttccagcagagctgccccaccggcctggtgttcagcaacagctgcaagtgctgcacctggaactag

SEQ ID NO: 8308 - DNA, 1125 bp, synthetic construct
  misc_feature 1..1125: note = source = /note="Description of Artificial Sequence: Synthetic coding sequence"
  source 1..1125: mol_type = other DNA
atgtatgtgtccacccgggagcgctacaagtggctgcgcttcagcgaggactgcctgtacctgaatgtgtatgccccagcccgggcccctggggacccccagctgcctgtgatggtgtggttccctgggggcgccttcatcgtgggcgccgccagcagctatgagggcagtgacctggccgcccgggagaaggtggtgctggtgttcctgcagcaccggctgggcatcttcggcttcctgcgctggaggggccgcacagatgacagccacgcccggggcaactggggcctgctggaccagatggccgccctgcgctgggtgcaggagaacattgctgccttcggcggggaccctggaaatgtgaccctgtttggccagagcgctggggccatgagcatcagcggcctgatgatgagccccctggccagcggcctcttccaccgggccatcagccagagcggcacagccctcttccgcctcttcatcaccagcaaccccctgaaggtggccaagaaggtggcccacctggccggctgcaaccacaacagcacccagatcctggtgaactgcctgcgggccctgagcggcaccaaggtgatgagggtgagcaacaagatgaggttcctgcagctgaacttccagagggaccctgaggagatcatctggagcatgagccctgtggtggatggagtggtgatcccagatgaccccctggtgctgctgacccagggcaaggtgtcctctgtgccctacctgctgggcgtgaacaacctggagttcaactggctgctgccctacatcatgaagttccccctgaaccggcaggccatgaggaaggagaccatcaccaagatgctgtggagcaccaggaccctgctgaacatcaccaaggagcaggtgcccctggtggtggaggagtacctggacaacgtgaatgaacatgactggaagatgctgaggaacaggatgatggacatcgtgcaggatgccacctttgtgtatgccaccctgcagacagcccactaccaccgggagacccccatgatgggcatctgcccagctggccacgccaccaccaggatgaagagcacctgctcctggatcctgccccaggagtgggcctag

SEQ ID NO: 8309 - DNA, 384 bp, synthetic construct
  misc_feature 1..384: note = source = /note="Description of Artificial Sequence: Synthetic coding sequence"
  source 1..384: mol_type = other DNA
atgaagacaggcctcttcttcctgtgcctgctgggcacagctgctgccatccccaccaatgcccggctgctgagtgaccacagcaagcccacagctgagaccgtggccccagacaacacagccatccccagcctgcgggcagaggccgaggagaatgagaaggagacagctgtgtccacagaagatgacagccaccacaaggccgagaagagctctgtgctgaagagcaaggaggagagccatgagcagagcgctgagcagggcaagagcagcagccaggagctgggcctgaaggaccaggaggacagtgatggccacctgtctgtgaacctggagtatgcccccacagagggcaccctggacatcaaggaggacatgtcctag

SEQ ID NO: 8310 - DNA, 285 bp, synthetic construct; identical to SEQ ID NO: 7606
  misc_feature 1..285: note = source = /note="Description of Artificial Sequence: Synthetic coding sequence"
  source 1..285: mol_type = other DNA

SEQ ID NO: 8311 - DNA, 414 bp, synthetic construct
  misc_feature 1..414: note = source = /note="Description of Artificial Sequence: Synthetic coding sequence"
  source 1..414: mol_type = other DNA
atggccgccctgagccgggccctgggccccctgcggaccccagccccacccctgtggattggcctcttcctggtggccaccggcagccagcagagcctggcccagcccctgcccggcaacaccacagaggccacccccaggagcctgcgggccagcggcagcctgtgtggcccccacgccaaggccccctacctgtgtgaggccacccatgagcctgctgctgcccgcatccgggcccaggtgcctgacacccgctggagccgggtgggcggccagcgcttctacagccgggtgctgagccccctgcaccggggccccagcggccacacagaggccagcgcccagaggagccacatgggcaagctgaaggagccccagccccaggaccacaagccaggcctgggcgccagctag

SEQ ID NO: 8312 - DNA, 228 bp, synthetic construct
  misc_feature 1..228: note = source = /note="Description of Artificial Sequence: Synthetic coding sequence"
  source 1..228: mol_type = other DNA
atgctgaaggtgcactaccccaagtttggagtgtctgaggactgcctgtacctgaacatctatgccccagcccacgccgacaccggcagcaagctgcctgtgctggtgtggttccctggaggagccttcaagacaggcagcgccagcatctttgatggcagcgccctggccgcctatgaagatgtgctggtggtggtggtgcagtaccgcctgggcatcttcggctag

SEQ ID NO: 8313 - DNA, 1491 bp, synthetic construct
  misc_feature 1..1491: note = source = /note="Description of Artificial Sequence: Synthetic coding sequence"
  source 1..1491: mol_type = other DNA
atggccccagcccggaccatggcccgggcccggctggccccagctgactgcctgaacagcttcaccgctggggtgcccggctttgtgctggacaccaatgcctctgtgtccaatggagccaccttcctggagagccccaccgtgagaagaggctgggactgtgtgcgggcctgctgcaccacccagaactgcaacctggccctggtggagctgcagcctgacagaggagaagatgccatcgccgcctgcttcctgatcaactgcctgtatgagcagaactttgtgtgcaagtttgccccccgggagggcttcatcaactacctgacccgggaggtgtaccgcagctaccggcagctgcggacccagggctttggaggcagcggcatccccaaggcctgggccggcatcgacctgaaggtgcagccccaggagcccctggtgctgaaggatgtggagaacacagactggaggctgctgcggggggacacagatgtgcgggtggagaggaaggaccccaaccaggtggagctgtggggcctgaaggagggcacctacctgttccagctgactgtgaccagcagtgaccaccctgaggacacagccaacgtgacagtgacagtgctgagcaccaagcagacagaggactactgcctggccagcaacaaggtgggccgctgccggggcagcttcccccgctggtactatgaccccacagagcagatctgcaagagctttgtgtatggaggctgcctgggcaacaagaacaactacctgcgggaggaggagtgcatcctggcctgccggggcgtgcagggcggccccctgcggggcagcagcggggcccaggccaccttcccccagggccccagcatggagaggaggcaccctgtgtgcagcggcacctgccagcccacccagttccgctgcagcaatggctgctgcatcgacagcttcctggagtgtgatgacacccccaactgcccagatgccagtgatgaggccgcctgtgagaagtacaccagcggctttgatgagctgcagaggatccacttccccagcgacaagggccactgtgtggacctgcctgacaccggcctgtgcaaggagagcatcccccgctggtactacaaccccttcagcgagcactgtgcccgcttcacctacggcggctgctacggcaacaagaacaactttgaggaggagcagcagtgcctggagagctgccggggcatcagcaagaaggatgtgtttggcctgcggcgggagatccccatccccagcacaggctctgtggagatggctgtggccgtgttcctggtgatctgcatcgtggtggtggtggccatcctgggctactgcttcttcaagaaccagaggaaggacttccacggccaccaccaccaccccccacccaccccagccagcagcacagtgtccaccacagaggacacagagcacctggtgtacaaccacaccacccggcccctgtag

SEQ ID NO: 8314 - DNA, 528 bp, synthetic construct
  misc_feature 1..528: note = source = /note="Description of Artificial Sequence: Synthetic coding sequence"
  source 1..528: mol_type = other DNA
atgcctcctggcacccgggcctgccgggtgcccaggcctggaagaagagccccccggcccaggagagatggagagcccggcggccatggagtggccccagccagcgctgaggaggtgggcgcccggcccggcctgcgggctgtggcccggctgctgccccagcagcacctgcaggccggctacgtgtgtgagaggaaggacctgctggtgaatggctgctgcaatgtgaatgtgcccagcaccaagcagtactgctgtgatggctgctggcccaacggctgctgcagcgcctatgagtactgtgtgtcctgctgcctgcagcccaacaagcagctgctgctggagcgcttcctgaacagagctgctgtggccttccagaacctcttcatggctgtggaggaccactttgagctgtgcctggccaagtgcaggaccagcagccagagcgtgcagcacgagaacacctacagagaccccatcgccaagtactgctatggagagagccccccagagctgtttcctgcctag

SEQ ID NO: 8315 - DNA, 1881 bp, synthetic construct
  misc_feature 1..1881: note = source = /note="Description of Artificial Sequence: Synthetic coding sequence"
  source 1..1881: mol_type = other DNA
atggacctggtgctgaagcgctgcctgctgcacctggccgtgattggagccctgctggccgtgggcgccaccaaggtgcccaggaaccaggactggctgggcgtgtcccggcagctgcggaccaaggcctggaaccggcagctgtacccagagtggacagaggcccagaggctggactgctggaggggcggccaggtgtccctgaaggtgtccaatgatggccccaccctcatcggggccaatgccagcttcagcatcgccctgaacttccctggcagccagaaggtgctgcctgatggccaggtgatctgggtgaacaacaccatcatcaatggagaccaggtgtggggcggccagcctgtgtacccccaggagacagatgatgcctgcatcttcccagatggcggcccctgccccagcggctcctggagccagaagaggagctttgtgtatgtgtggaagacctggggccagtactggcaggtgctgggcggccctgtgtctggcctgagcatcggcaccggccgggccatgctgggcacccacaccatggaggtgacagtgtaccacagaagaggcagccgctcctatgtgcccctggcccacagcagcagcgccttcaccatcacagaccaggtgcccttctctgtgtctgtgtcccagctgcgggccctggatggcggcaacaagcacttcctgaggaaccagcccctgacctttgccctgcagctgcatgaccccagcggctacctggccgaggccgacctgagctacacctgggactttggagacagcagcggcaccctcatcagccgggccctggtggtgacccacacctacctggagcccggccctgtgacagcccaggtggtgctgcaggccgccatccccctgaccagctgtggcagcagccctgtgcccggcaccacagatggccaccggcccacagctgaggcccccaacaccacagctggccaggtgcccaccacagaggtggtgggcaccaccccaggccaggcccccacagctgagcccagcggcaccacctctgtgcaggtgcccaccacagaggtgatcagcacagcccctgtgcagatgcccacagctgagagcacagctgcccaggtgaccaccacagagtgggtggagaccacagcccgggagctgcccatccctgagcctgagggcccagatgccagcagcatcatgagcacagagagcatcaccggcagcctgggccccctgctggatggaacagccaccctgcggctggtgaagaggcaggtgcccctggactgtgtgctgtaccgctatggcagcttctctgtgaccctggacatcgtgcagggcattgaatctgctgagatcctgcaggccgtgcccagcggggagggagatgcctttgagctgactgtgtcctgccagggcggcctgcccaaggaggcctgcatggagatcagcagccctggctgccagcccccagcccagaggctgtgccagcctgtgctgcccagccctgcctgccagctggtgctgcaccagatcctgaagggcggcagcggcacctactgcctgaatgtgtccctggccgacaccaacagcctggccgtggtgtccacccagctgatcatgcctgtgcccggcatcctgctgaccggccaggaggccggcctgggccaggtgcccctcatcgtgggcatcctgctggtgctgatggctgtggtgctggccagcctcatctacagaagaaggctgatgaagcaggacttctctgtgccccagctgccccacagcagcagccactggctgcggctgccccgcatcttctgcagctgccccatcggggagaacagccccctgctgagcggccagcaggtgtag

SEQ ID NO: 8316 - DNA, 1611 bp, synthetic construct
  misc_feature 1..1611: note = source = /note="Description of Artificial Sequence: Synthetic coding sequence"
  source 1..1611: mol_type = other DNA
atgcccaccctgtgcagcagctttggcctgcaggtgctgctgcctgagtacctgcgggagagatttgtggccgccgccctgagctacatcacctgcagcagcgagggggagctggtgtgcaaggaaaatgactgctggtgcaagtgcagccccaccttccctgagtgcaactgcccagatgctgacatccaggccatggaggacagcctgctgcagatccaggacagctgggccacccacaaccggcagtttgaggagagcgaggagttccaggccctgctgaagaggctgcctgatgaccgcttcctgaacagcacagccatcagccagttctgggccatggacaccagcctgcagcaccgctaccagcagctgggcgccggcctgaaggtgctcttcaagaagacccaccgcatcctgcggcggctcttcaacctgtgcaagcgctgccaccggcagccccgcttccggctgcccaaggagagcagccccaggagcctgagctactggtggaaccgcatccagagcctgctgtactgtggggagagcaccttccctggcaccttcctggagcagagccacagctgcacctgcccctatgaccagagcagctgccagggccccatcccctgtgccctgggggagggccctgcctgtgcccactgtgccccagacaacagcacccgctgtggcagctgcaaccctggctacgtgctggcccagggcctgtgcaggcctgaggtggccgagagcctggagaacttcctgggcctggagacagacctgcaggacctggagctgaagtacctgctgcagaagcaggacagccgcatcgaggtgcacagcatcttcatcagcaatgacatgaggctgggctcctggtttgaccccagctggaggaagaggatgctgctgaccctgaagagcaacaagtacaagccaggcctggtgcacgtgatgctggccctgagcctgcagatctgcctgaccaagaacagcaccctggagcctgtgatggccatctacgtgaacccctttggaggcagccacagcgagagctggttcatgcctgtgaatgaaggcagcttcccagactgggagaggaccaacgtggatgctgctgcccagtgccagaactggaccatcaccctgggcaaccgctggaagaccttctttgagaccgtgcacgtgtacctgcggagccgcatcaagagcctggatgacagcagcaatgagaccatctactatgagcccctggagatgacagaccccagcaagaacctgggctacatgaagatcaacaccctgcaggtgtttggctacagcctgccctttgatcctgatgccatccgggacctgatcctgcagctggactacccctacacccagggcagccaggacagcgccctgctgcagctgattgagctgcgggacagagtgaaccagctgagccccccaggcaaggtgcggctggacctcttcagctgcctgctgcggcaccggctgaagctggccaacaatgaggtgggccgcatccagagcagcctgcgggccttcaacagcaagctgcccaaccctgtggagtatgaaacaggcaagctgtgcagctag

SEQ ID NO: 8317 - DNA, 423 bp, synthetic construct
  misc_feature 1..423: note = source = /note="Description of Artificial Sequence: Synthetic coding sequence"
  source 1..423: mol_type = other DNA
atgagccagagcattgaggtgctgaacctgcggacccagagggacttccagtatgtgctgaagatggagacccagatgaagggcctgaaggccaagttccggcagattgaagatgacaggaagaccctgatgaccaagcacttccaggagctgaaggagaagatggatgagctgctgcccctcatccctgtgctggagcagtacaagacagatgccaagctgatcacccagttcaaggaggagatccggaacctgtctgctgtgctgaccggcatccaggaggagatcggggcctatgactatgaggagctgcaccagagggtgctgagcctggagacccggctgcgggactgcatgaagaagctgattgacctgaagaagaggaaggaggaggagaagaggcagcagaagggggaggcctag

SEQ ID NO: 8318 - DNA, 1119 bp, synthetic construct
  misc_feature 1..1119: note = source = /note="Description of Artificial Sequence: Synthetic coding sequence"
  source 1..1119: mol_type = other DNA
atggcctacatcgagcagaggcgcatcagccatgagggcagccctgtgaagcctgtggccatccgggagttccagaagacagaggacatgaggcgctacctgcaccagaacagagtgcctgctgagcccagcagcctgctgagcctgagcgccagccacaaccagctgagccacacagacctggagctgcaccagaggcgggagcagctggtggagaggacccggcgggaggcccagctggccgccctgcagtatgaggaggagaagatccgcaccaagcagatccagagagatgctgtgctggactttgtgaagcagaaggccagccagagcccccagaagcagcaccccctgctggatggagtggatggagaatgtcccttccccagcagaagaagccagcacacagatgattctgccctgtgcatgagcctgagcggcctgaaccaggtgggctgtgccgccaccctgccccacagcagcgccttcacccccctgaagagtgatgaccggcccaatgccctgctgagcagccctgccacagaaacagtgcaccacagccctgcctacagcttccctgctgccatccagaggaaccagccccagaggcctgagagcttcctgttccgggccggcgtgcgggcagagaccaacaagggccacgccagccccctgccccccagcgctgcccccaccacagacagcacagacagcatcaccggccagaacagccggcagcgggaggaggagctggagctgattgaccagctgaggaagcacatcgagtaccgcctgaaggtgtccctgccctgtgacctgggcgccgccctgacagatggagtggtgctgtgccacctggccaaccacgtgcggcccaggtctgtgcccagcatccacgtgcccagccctgctgtgcccaagctgaccatggccaagtgcagaagaaatgtggagaacttcctggaggcctgcaggaagattggagtgccccaggagcagctgtgcctgcccctgcacatcctggaggagaagggcctgagccaggtggccgtgacagtgcaggccctgctggagctggccccacccaagcagcagcagcaccagctgtctgctgtgtag

SEQ ID NO: 8319 - DNA, 1242 bp, synthetic construct; identical to SEQ ID NO: 7412
  misc_feature 1..1242: note = source = /note="Description of Artificial Sequence: Synthetic coding sequence"
  source 1..1242: mol_type = other DNA

SEQ ID NO: 8320 - DNA, 2541 bp, synthetic construct; identical to SEQ ID NO: 7561
  misc_feature 1..2541: note = source = /note="Description of Artificial Sequence: Synthetic coding sequence"
  source 1..2541: mol_type = other DNA

SEQ ID NO: 8321 - DNA, 582 bp, synthetic construct
  misc_feature 1..582: note = source = /note="Description of Artificial Sequence: Synthetic coding sequence"
  source 1..582: mol_type = other DNA
atgctgggcgtgctggagctgctgctgctgggcgccgcctggctggccggccctgcccggggccagaatgaaacagagcccatcgtgctggagggcaagtgcctggtggtgtgtgacagcaaccccaccagtgaccccactggaacagccctgggcatctctgtgcgcagcggcagcgccaaggtggccttcagcgccatccgcagcaccaaccacgagcccagcgagatgagcaacagaaccatgatcatctactttgaccaggtgctggtgaacatcggcaacaactttgattctgagaggagcaccttcatcgcccccaggaagggcatctacagcttcaacttccacgtggtgaaggtgtacaaccggcagaccatccaggtgtccctgatgctgaatggctggcctgtgatcagcgcctttgctggggaccaggatgtgacccgggaggccgccagcaatggagtgctgatccagatggagaagggggaccgggcctacctgaagctggagcggggcaacctgatgggcggctggaagtacagcaccttcagcggcttcctggtgttccccctgtag

SEQ ID NO: 8322 - DNA, 813 bp, synthetic construct
  misc_feature 1..813: note = source = /note="Description of Artificial Sequence: Synthetic coding sequence"
  source 1..813: mol_type = other DNA
atgcacggcagctgcagcttcctgatgctgctgctgcccctgctgctgctgctggtggccaccaccggccctgtgggcgccctgacagatgaggagaagaggctgatggtggagctgcacaacctgtaccgggcccaggtgagccccacagccagtgacatgctgcacatgcgctgggatgaggagctggccgcctttgccaaggcctatgcccggcagtgtgtgtggggccacaacaaggagcggggcagaagaggagagaacctgtttgccatcacagatgagggcatggatgtgcccctggccatggaggagtggcaccacgagcgggagcactacaacctgtctgctgccacctgcagccctggccagatgtgtggccactacacccaggtggtgtgggccaagacagagcgcatcggctgcggcagccacttctgtgagaagctgcagggcgtggaggagaccaacatcgagctgctggtgtgcaactatgagcccccaggaaatgtgaagggcaagaggccctaccaggagggcaccccctgcagccagtgccccagcggctaccactgcaagaacagcctgtgtgagcccatcggcagcccagaagatgcccaggacctgccctacctggtgacagaggcccccagcttccgggccacagaggccagtgacagcaggaagatgggcgctgagggccctgacaagcccagcgtggtgtctggcctgaacagcggccctggccacgtgtggggccccctgctgggcctgctgctgctgccccccctggtgctggccggcatcttctag

SEQ ID NO: 8323 - DNA, 702 bp, synthetic construct
  misc_feature 1..702: note = source = /note="Description of Artificial Sequence: Synthetic coding sequence"
  source 1..702: mol_type = other DNA
atggaccaggtgttcatgattgacagcaaatgtgagagcggcaagggccgctgcagcttcaaccccaacgtgaacacagtgtctgtgatgatcaatgaggagctgttcagcggcatgtacatcgacttcatgggcacagatgctgccatcttccgcagcctgaccaagagaaatgctgtgaggacagaccagcacaacagcaagtggctgtctgagcccatgtttgtggatgcccacgtgatcccagatggaacagaccccaatgatgccaaggtgtacttcttcttcaaggagaagctgacagacaacaacagaagcaccaagcagatccacagcatgattgcccgcatctgccccaatgacaccggcggcctgcggagcctggtgaacaagtggaccaccttcctgaaggcccggctggtgtgcagcgtgacagatgaagatggccctgagacccactttgatgagctggaggatgtgttcctgctggagacagacaaccccaggaccaccctggtgtatggcatcttcaccaccagcagcagcgtcttcaagggcagcgctgtgtgtgtgtaccacctgagtgacatccagacagtgttcaacggcccctttgcccacaaggagggccccaaccaccagctgatctcctaccagggccgcatcccctaccccaggcctggcaccaacacctgtgtgtag

SEQ ID NO: 8324 - DNA, 1368 bp, synthetic construct
  misc_feature 1..1368: note = source = /note="Description of Artificial Sequence: Synthetic coding sequence"
  source 1..1368: mol_type = other DNA
atgctgcaccctgagaccagccctggccggggccacctgctggccgtgctgctggccctgctgggcacagcctgggccgaggtgtggccaccccagctgcaggagcaggcccccatggccggggccctgaacaggaaggagagcttcctgctgctgagcctgcacaaccggctgcgctcctgggtgcagcccccagctgctgacatgaggcggctggactggagcgacagcctggcccagctggcccaggcccgggccgccctgtgtggcatccccacccccagcctggccagcggcctgtggaggaccctgcaggtgggctggaacatgcagctgctgcctgctggcctggccagctttgtggaggtggtgtccctgtggtttgctgagggccagcgctacagccatgctgctggggagtgtgccagaaatgccacctgcacccactacacccagctggtgtgggccaccagcagccagctgggctgcggccgccacctgtgcagcgctggccaggccgccatcgaggcctttgtgtgtgcctacagcccccggggcaactgggaggtgaatggcaagaccatcgtgccctacaagaagggggcctggtgcagcctgtgcacagcctctgtgtctggctgcttcaaggcctgggaccatgctgggggcctgtgtgaggtgcccaggaacccctgcaggatgagctgccagaaccacggccgcctgaacatcagcacctgccactgccactgccccccaggctacacaggccgctactgccaggtgcgctgcagcctgcagtgtgtgcacggccgcttccgggaggaggagtgcagctgtgtgtgtgacatcggctacggcggggcccagtgtgccaccaaggtgcacttccccttccacacctgtgacctgagaattgatggagactgcttcatggtgtcctctgaggccgacacctactaccgggccaggatgaagtgccagaggaagggcggcgtgctggcccagatcaagagccagaaggtgcaggacatcctggccttctacctgggccgcctggagaccaccaatgaagtcatcgacagcgactttgagaccaggaacttctggattggcctgacctacaagacagccaaggacagcttccgctgggccaccggggagcaccaggccttcaccagctttgccttcggccagcctgacaaccacggcctggtgtggctgtctgctgccatgggcttcggcaactgtgtggagctgcaggccagcgctgccttcaactggaacaaccagcgctgcaagaccaggaaccgctacatctgccagtttgcccaggagcacatcagccgctggggccctggcagctag

SEQ ID NO: 8325 - DNA, 462 bp, synthetic construct
  misc_feature 1..462: note = source = /note="Description of Artificial Sequence: Synthetic coding sequence"
  source 1..462: mol_type = other DNA
atggcccgcttctgggtgtgtgtggccggggccggcttcttcctggccttcctggtgctgcacagccgcttctgtggcagccctgtgctgaggaacttcacctttgctgtgtcctggaggacagagaagatcctgtaccgcctggatgtgggctggcccaagcaccctgagtacttcaccggcaccaccttctgtgtggccgtggacagcctgaatggcctggtgtacatcggccagagaggagacaacatccccaagatcctggtgttcacagaagatggctacttcctgcgggcctggaactacacagtggacaccccccacggcatctttgctgccagcaccctgtatgagcagagcgtgtggatcacagatgtgggcagtgacttcatgatcctgtggctgcacggggagaatggaactggacctgccaagttcaacatcccccacagcgtgacctag

SEQ ID NO: 8326 - DNA, 375 bp, synthetic construct
  misc_feature 1..375: note = source = /note="Description of Artificial Sequence: Synthetic coding sequence"
  source 1..375: mol_type = other DNA
atgtggcgctgccccctgggcctgctgctgctgctgcccctggccggccacctggccctgggcgcccagcagggccggggccggcgggagctggcccctggcctgcacctgcggggcatcagagatgctgggggccgctactgccaggagcaggacctgtgctgccggggccgggcagatgactgtgccctgccctacctgggcgccatctgctactgtgacctcttctgcaacagaacagtgtctgactgctgcccagacttctgggacttctgcctgggcgtgcccccacccttcccccccatccaggccccagccaggagaactggaagtggctctgtgaccaagaaccacgcctggtggatccagacctag

SEQ ID NO: 8327 - DNA, 777 bp, synthetic construct
  misc_feature 1..777: note = source = /note="Description of Artificial Sequence: Synthetic coding sequence"
  source 1..777: mol_type = other DNA
atgaagaccctgtacctggccgacaccttccccaccaacttccgggacagcgctggggccatgaagcagatcaatgactatgtggccaagcagaccaagggcaagatcgtggacctgctgaagaacctggacagcaatgctgtggtgatcatggtgaactacatcttcttcaaggccaagtgggagaccagcttcaaccacaagggcacccaggagcaggacttctacgtgaccagcgagaccgtggtgcgggtgcccatgatgagccgggaggaccagtaccactacctgctggacaggaacctgagctgccgggtggtgggcgtgccctaccagggcaatgccacagccctcttcatcctgcccagcgagggcaagatgcagcaggtggagaatggcctgtctgagaagaccctgaggaagtggctgaagatgttcaagaagaggcagctggagctgtacctgcccaagttcagcattgagggcagctaccagctggagaaggtgctgcccagcctgggcatcagcaatgtgttcaccagccatgctgacctgagcggcatcagcaaccacagcaacatccaggtgtctgagatggtgcacaaggctgtggtggaggtggatgagagcggcaccagggctgctgctgccaccggcaccatcttcaccttccgcagcgcccggctgaacagccagaggctggtgttcaaccggcccttcctgatgttcatcgtggacaacaacatcctcttcctgggcaaggtgaaccggccctag

SEQ ID NO: 8328 - DNA, 1731 bp, synthetic construct; identical to SEQ ID NO: 7680
  misc_feature 1..1731: note = source = /note="Description of Artificial Sequence: Synthetic coding sequence"
  source 1..1731: mol_type = other DNA

SEQ ID NO: 8329 - DNA, 1359 bp, synthetic construct
  misc_feature 1..1359: note = source = /note="Description of Artificial Sequence: Synthetic coding sequence"
  source 1..1359: mol_type = other DNA
atggctgacatgcaccggggctatgctgacagccccagcaaggccggggccgccccctacgtgcaggcctttgacagcctgctggccggccctgtggccgagtacctgaagatcagcaaggagattggaggagatgtgcagaagcacgccgagatggtgcacacaggcctgaagctggagcgggccctgctggtgacagccagccagtgccagcagcctgctgagaacaagctgagtgacctgctggcccccatcagcgagcagatcaaggaggtgatcaccttccgggagaagaacagaggcagcaagctgttcaaccacctgtctgctgtgtctgagagcatccaggccctgggctgggtggccatggcccccaagccaggcccctacgtgaaggagatgaatgatgctgccatgttctacaccaacagagtgctgaaggagtacaaggatgtggacaagaagcacgtggactgggtgaaggcctacctgagcatctggacagagctgcaggcctacatcaaggagttccacaccaccggcctggcctggagcaagacaggccctgtggccaaggagctgagcggcctgcccagcggccccagcgctggcagctgccccccacctcctccaccctgccccccacctcctcctgtgtccaccatcagctgcagctatgagagcgccagccgcagcagcctgtttgcccagatcaaccagggcgagagcatcacccacgccctgaagcacgtgtctgatgacatgaagacccacaagaacccagccctgaaggcccagagcggccctgtgcgcagcggccccaagcccttcagcgcccccaagccccagaccagccccagccccaagagggccaccaagaaggagcctgctgtgctggagctggagggcaagaagtggagggtggagaaccaggagaatgtgagcaacctggtgattgaggacacagagctgaagcaggtggcctacatctacaagtgtgtgaacaccaccctgcagatcaagggcaagatcaacagcatcaccgtggacaactgcaagaagctgggcctggtgtttgatgatgtggtgggcatcgtggagatcatcaacagcaaggatgtgaaggtgcaggtgatgggcaaggtgcccaccatcagcatcaacaagacagatggctgccacgcctacctgagcaagaacagcctggactgtgagatcgtgtctgccaagagcagcgagatgaatgtgctgatccccacagagggcggggacttcaatgagttccctgtgcctgagcagttcaagaccctgtggaatggccagaagctggtgaccaccgtgacagaaattgctggatag

SEQ ID NO: 8330 - DNA, 1533 bp, synthetic construct
  misc_feature 1..1533: note = source = /note="Description of Artificial Sequence: Synthetic coding sequence"
  source 1..1533: mol_type = other DNA
atgggccggcccacccagtggcccagcctgctgctgctgctgctgctgcccggccccccacctgtggccggcctggaggatgctgccttcccccacctgggggagagcctgcagcccctgccccgggcctgccccctgcgctgcagctgcccccgggtggacacagtggactgtgatggcctggacctgcgggtcttcccagacaacatcaccagggctgcccagcacctgagcctgcagaacaaccagctgcaggagctgccctacaatgagctgagccggctgagcggcctgcggaccctgaacctgcacaacaacctgatcagcagcgagggcctgcctgatgaggcctttgagagcctgacccagctgcagcacctgtgtgtggcccacaacaagctgtctgtggccccccagttcctgcccaggagcctgcgggtggccgacctggccgccaaccaggtgatggagatcttccccctgacctttggagagaagccagccctgcggtctgtgtacctgcacaacaaccagctgagcaatgccggcctgcccccagatgccttccggggcagcgaggccatcgccaccctgagcctgagcaacaaccagctgagctacctgccccccagcctgccccccagcctggagcggctgcacctgcagaacaacctgatcagcaaggtgcccaggggggccctgagccggcagacccagctgcgggagctgtacctgcagcacaaccagctgacagattctggcctggatgccaccaccttcagcaagctgcacagcctggagtacctggacctgagccacaaccagctgaccaccgtgcctgctggcctgcccaggaccctggccatcctgcacctgggcaggaaccgcatccggcaggtggaggccgcccggctgcacggggcccggggcctgcgctacctgctgctgcagcacaaccagctgggcagcagcggcctgcctgctggggccctgcggcccctgcggggcctgcacaccctgcacctgtatggaaatggcctggacagagtgcccccagccctgccccggcggctgcgggccctggtgctgccccacaaccacgtggccgccctgggcgcccgggacctggtggccaccccaggcctgacagagctgaacctggcctacaaccggctggccagcgcccgggtgcaccaccgggccttccggcggctgcgggccctgcggagcctggacctggccggcaaccagctgacccggctgcccatgggcctgcccaccggcctgcggaccctgcagctgcagaggaaccagctgaggatgctggagcctgagcccctggccggcctggaccagctgcgggagctgagcctggcccacaaccggctgcgggtgggggacatcggccctggcacctggcatgagctgcaggccctgcaggtgcgccaccggctggtgagccacacagtgccccgggccccacccagcccctgcctgccctgccacgtgcccaacatcctggtgtcctggtag

SEQ ID NO: 8331 - DNA, 114 bp, synthetic construct
  misc_feature 1..114: note = source = /note="Description of Artificial Sequence: Synthetic coding sequence"
  source 1..114: mol_type = other DNA
atgaacagcaccctgaacttcttcatccagagctacaacaatgccagcaatgacacctacctgtacagagtgcagaggctcatccgcagccagatgcagcaggtgcactgctag

SEQ ID NO: 8332 - DNA, 1266 bp, synthetic construct
  misc_feature 1..1266: note = source = /note="Description of Artificial Sequence: Synthetic coding sequence"
  source 1..1266: mol_type = other DNA
atgggccggcccacccagtggcccagcctgctgctgctgctgctgctgcccggccccccacctgtggccggcctggaggatgctgccttcccccacctgggggagagcctgcagcccctgccccgggcctgccccctgcgctgcagctgcccccgggtggacacagtggactgtgatggcctggacctgcgggtcttcccagacaacatcaccagggctgcccagcacctgagcctgcagaacaaccagctgcaggagctgccctacaatgagctgagccggctgagcggcctgcggaccctgaacctgcacaacaacctgatcagcagcgagggcctgcctgatgaggcctttgagagcctgacccagctgcagcacctgtgtgtggcccacaacaagaacaacctgatcagcaaggtgcccaggggggccctgagccggcagacccagctgcgggagctgtacctgcagcacaaccagctgacagacagcggcctggatgccaccaccttcagcaagctgcacagcctggagtacctggacctgagccacaaccagctgaccaccgtgcctgctggcctgcccaggaccctggccatcctgcacctgggcaggaaccgcatccggcaggtggaggccgcccggctgcatggagcccggggcctgcgctacctgctgctgcagcacaaccagctgggcagcagcggcctgcctgctggggccctgcggcccctgcggggcctgcacaccctgcacctgtatggaaatggcctggacagagtgcccccagccctgccccggcggctgcgggccctggtgctgccccacaaccacgtggccgccctgggcgcccgggacctggtggccaccccaggcctgacagagctgaacctggcctacaaccggctggccagcgcccgggtgcaccaccgggccttccggcggctgcgggccctgcggagcctggacctggccggcaaccagctgacccggctgcccatgggcctgcccaccggcctgcggaccctgcagctgcagaggaaccagctgaggatgctggagcctgagcccctggccggcctggaccagctgcgggagctgagcctggcccacaaccggctgcgggtgggggacatcggccctggcacctggcatgagctgcaggccctgcaggtgcgccaccggctggtgagccacacagtgccccgggccccacccagcccctgcctgccctgccacgtgcccaacatcctggtgtcctggtag

SEQ ID NO: 8333 - DNA, 993 bp, synthetic construct
  misc_feature 1..993: note = source = /note="Description of Artificial Sequence: Synthetic coding sequence"
  source 1..993: mol_type = other DNA
atgagctcctggagccggcagaggcccaagagccctgggggcatccagccccacgtgtccaggaccctcttcctgctgctgctgctggccgccagcgcctggggcgtgaccctgagccccaaggactgccaggtgttcagaagtgaccacggcagcagcatcagctgccagcccccagctgagatccctggctacctgcctgctgacacagtgcacctggccgtggagttcttcaacctgacccacctgcctgccaacctgctgcagggcgccagcaagctgcaggagctgcacctgagcagcaatggcctggagagcctgagccctgagttcctgcggcctgtgccccagctgcgggtgctggacctgaccagaaatgccctggtgctgaaggagaaccagctggaggtgctggaggtgtcctggctgcacggcctgaaggccctgggccacctggacctgagcggcaaccggctgaggaagctgcccccaggcctgctggccaacttcaccctgctgcggaccctggacctgggggagaaccagctggagaccctgcccccagacctgctgcggggccccctgcagctggagcggctgcacctggagggcaacaagctgcaggtgctgggcaaggacctgctgctgccccagcctgacctgcgctacctgttcctgaatggaaacaagctggcccgggtggccgccggggccttccagggcctgcggcagctggacatgctggacctgagcaacaacagcctggcctctgtgcctgagggcctgtgggccagcctgggccagcccaactgggacatgagagatggctttgacatcagcggcaacccctggatctgtgaccagaacctgagtgacctgtaccgctggctgcaggcccagaaggacaagatgttcagccagaatgacacccgctgtgccggccctgaggccgtgaagggccagaccctgctggccgtggccaagagccagtag

SEQ ID NO: 8334 - DNA, 1815 bp, synthetic construct; identical to SEQ ID NO: 6847
  misc_feature 1..1815: note = source = /note="Description of Artificial Sequence: Synthetic coding sequence"
  source 1..1815: mol_type = other DNA

SEQ ID NO: 8335 - DNA, 948 bp, synthetic construct
  misc_feature 1..948: note = source = /note="Description of Artificial Sequence: Synthetic coding sequence"
  source 1..948: mol_type = other DNA
atgggccaggaccgggaggagaccaacatcgagctgctggtgtgcaactatgagcccccaggaaatgtgaagggcaagaggccctaccaggagggcaccccctgcagccagtgccccagcggctaccactgcaagaacagcctgtgtgagcccatcggcagcccagaagatgcccaggacctgccctacctggtgacagaggcccccagcttccgggccacagaggccagtgacagcaggaagatgggcacccccagcagcctggccaccggcatcccagccttcctggtgacagaggtgtctggcagcctggccaccaaggccctgcctgctgtggagacccaggcccccaccagcctggccaccaaggaccccccatccatggccacagaggccccaccctgtgtgaccacagaggtgcccagcatcctggccgcccacagcctgcccagcctggatgaggagcctgtgaccttccccaagagcacccacgtgcccatccccaagtctgctgacaaggtgacagacaagaccaaggtgcccagccgcagccctgagaacagcctggaccccaagatgagcctgaccggggcccgggagctgctgccccacgcccaggaggaggccgaggccgaggccgagctgccccccagcagcgaggtgctggccagcgtcttccctgcccaggacaagccaggagagctgcaggccaccctggaccacacaggccacaccagcagcaagagcctgcccaacttccccaacaccagcgccacagccaatgccactggaggccgggccctggccctgcagagcagcctgcctggagctgagggccctgacaagcccagcgtggtgtctggcctgaacagcggccctggccacgtgtggggccccctgctgggcctgctgctgctgccccccctggtgctggccggcatcttctag

SEQ ID NO: 8336 - DNA, 207 bp, synthetic construct
  misc_feature 1..207: note = source = /note="Description of Artificial Sequence: Synthetic coding sequence"
  source 1..207: mol_type = other DNA
atgcaggtgtccacagctgccctggccgtgctgctgtgcaccatggccctgtgcaaccaggtgctgagcgcccccctggccgctgacacccccacagcctgctgcttctcctacaccagccggcagatcccccagaacttcatcgctgactactttgagaccagcagccagtgcagcaagcccagcgtgatggccgcccctggatag

SEQ ID NO: 8337 - DNA, 3369 bp, synthetic construct
  misc_feature 1..3369: note = source = /note="Description of Artificial Sequence: Synthetic coding sequence"
  source 1..3369: mol_type = other DNA
atgagcctgcaggagatgttccgcttccccatgggcctgctgctgggctctgtgctgctggtggccagcgccccagccaccctggagcccccaggctgcagcaacaaggagcagcaggtgacagtgagccacacctacaagattgatgtgcccaagagcgccctggtgcaggtggatgctgacccccagcccctgagtgatgatggagccagcctgctggccctgggggaggcccgggaggagcagaacatcatcttccgccacaacatccggctgcagaccccccagaaggactgtgagctggccggctctgtgcaggacctgctggcccgggtgaagaagctggaggaggagatggtggagatgaaggagcagtgcagcgcccagcgctgctgccagggcgtgacagacctgagccgccactgcagcggccacggcaccttcagcctggagacctgcagctgccactgtgaggagggccgggagggccctgcctgtgagcggctggcctgccctggggcctgcagcggccacggccgctgtgtggatggccgctgcctgtgccacgagccctacgtgggcgctgactgtggctacccagcctgcccagagaactgcagcggccatggagaatgtgtgcggggcgtgtgccagtgccacgaggacttcatgtctgaggactgcagcgagaagcgctgccctggggactgcagcggccacggcttctgtgacacaggagagtgctactgtgaggagggcttcaccggcctggactgtgcccaggtggtgaccccccagggcctgcagctgctgaagaacacagaggacagcctgctggtgtcctgggagcccagcagccaggtggaccactacctgctgagctactaccccctgggcaaggagctgagcggcaagcagatccaggtgcccaaggagcagcacagctatgagatcctgggcctgctgcccggcaccaagtacatcgtgaccctgagaaatgtgaagaatgaggtgagcagcagcccccagcacctgctggccaccacagacctggccgtgctgggcacagcctgggtgacagatgaaacagagaacagcctggatgtggagtgggagaaccccagcacagaggtggactactacaagctgcgctatggccccatgacaggccaggaggtggccgaggtgacagtgcccaagagcagtgaccccaagagccgctatgacatcaccggcctgcaccctggaacagagtacaagatcaccgtggtgcccatgagaggagagctggagggcaagcccatcctgctgaatggccgcacagaaattgacagccccaccaacgtggtgacagacagagtgacagaggacacagccaccgtgtcctgggaccctgtgcaggccgtcatcgacaagtatgtggtgcgctacaccagcgcagatggagacaccaaggagatggctgtgcacaaggatgagagcagcacagtgctgaccggcctgaagccaggagaggcctacaaggtgtatgtgtgggccgagcggggcaaccagggcagcaagaaggctgacaccaatgccctgacagaaattgacagccctgccaacctggtgacagacagagtgacagagaacacagccaccatctcctgggaccctgtgcaggccaccatcgacagatatgtggtgcgctacaccagcgccaaggatggagagacccgggaggtgcctgtgggcaaggagcagagcagcacagtgctgaccggcctgcggcctggggtggagtacacagtgcacgtgtgggcccagaagggggcccaggagagcaagaaggctgacaccaaggcccagacagacatcgacagcccccagaacctggtgacagactgggtgacagaaaatacagccaccgtgtcctgggaccctgtgcaggccaccatcgaccgctacgtggtgcactacaccagcgccaacggggagacccgggaggtgcctgtgggcaaggagcagagcagcacagtgctgaccggcctgcggcccggcatggagtacacagtgcacgtgtgggcccagaagggcaaccaggagagcaagaaggctgacaccaaggcccagacagaaattgatggccccaagaacctggtgacagactgggtgacagagaacatggccaccgtgtcctgggaccctgtgcaggccaccatcgacaagtacatggtgcgctacaccagcgcagatggagagacccgggaggtgcctgtgggcaaggagcacagcagcacagtgctgaccggcctgcggcccggcatggagtacatggtgcacgtgtgggcccagaagggggcccaggagagcaagaaggctgacaccaaggcccagacagagctggacccccccaggaacctgcggcccagcgctgtgacccagagcggcggcatcctgacctggaccccacccagcgcccagatccacggctacatcctgacctaccagttcccagatggcaccgtgaaggagatgcagctgggccgggaggaccagagatttgccctgcagggcctggagcagggcgccacctaccctgtgtccctggtggccttcaagggcggcagaagaagcagaaatgtgtccaccaccctgagcacagtgggcgcccgcttcccccaccccagcgactgcagccaggtgcagcagaacagcaatgctgccagcggcctgtacaccatctacctgcatggagatgccagccggcccctgcaggtgtactgtgacatggagacagatggcggcggctggatcgtgttccagaggaggaacacaggccagctggacttcttcaagcgctggaggagctatgtggagggctttggagaccccatgaaggagttctggctgggcctggacaagctgcacaacctgaccaccggcaccccagcccgctatgaggtgcgggtggacctgcagacagccaatgaaagtgcctatgccatctatgacttcttccaggtggccagcagcaaggagcgctacaagctgactgtgggcaagtaccggggcacagctggagatgccctgacctaccacaacggctggaagttcaccacctttgaccgggacaatgacatcgccctgagcaactgtgccctgacccaccacggcggctggtggtacaagaactgccacctggccaaccccaacggccgctatggagagaccaagcacagcgagggcgtgaactgggagccctggaagggccacgagttcagcatcccctacgtggagctgaagatccggccccacggctacagccgggagcctgtgctgggcaggaagaagaggaccctgcggggccgcctgcggaccttctag

SEQ ID NO: 8338 - DNA, 897 bp, synthetic construct
  misc_feature 1..897: note = source = /note="Description of Artificial Sequence: Synthetic coding sequence"
  source 1..897: mol_type = other DNA
atgctgcaccctgagaccagccctggccggggccacctgctggccgtgctgctggccctgctgggcacagcctgggccgaggtgtggccaccccagctgcaggagcaggcccccatggccggggccctgaacaggaaggagagcttcctgctgctgagcctgcacaaccggctgcgctcctgggtgcagcccccagctgctgacatgaggcggctggactggagcgacagcctgaactggctgaagccaggccccctgtggaaccccaaccctgagcccggggtgcggcctgtggcccacccagccagcggcctggagcacgccgcctgcccccgggcctggaggcccctgctgaagtggagcctgtggtttgctgagggccagcgctacagccatgctgctggggagtgtgccagaaatgccacctgcacccactacacccagctggtgtgggccaccagcagccagctgggctgcggccgccacctgtgcagcgctggccaggccgccatcgaggcctttgtgtgtgcctacagcccccggggcaactgggaggtgaatggcaagaccatcgtgccctacaagaagggggcctggtgcagcctgtgcacagcctctgtgtctggctgcttcaaggcctgggaccatgctgggggcctgtgtgaggtgcccaggaacccctgcaggatgagctgccagaaccacggccgcctgaacatcagcacctgccactgccactgccccccaggctacacaggccgctactgccaggtgcgctgcagcctgcagtgtgtgcacggccgcttccgggaggaggagtgcagctgtgtgtgtgacatcggctatgagcccagcgtgcccccacgctgcatcttccccagcacccctgtgacctag

SEQ ID NO: 8339 - DNA, 1728 bp, synthetic construct
  misc_feature 1..1728: note = source = /note="Description of Artificial Sequence: Synthetic coding sequence"
  source 1..1728: mol_type = other DNA
atggacctggtgctgaagcgctgcctgctgcacctggccgtgattggagccctgctggccgtgggcgccaccaagggcagccaggtgtggggcggccagcctgtgtacccccaggagacagatgatgcctgcatcttcccagatggcggcccctgccccagcggctcctggagccagaagaggagctttgtgtatgtgtggaagacctggggccagtactggcaggtgctgggcggccctgtgtctggcctgagcatcggcaccggccgggccatgctgggcacccacaccatggaggtgacagtgtaccacagaagaggcagccgctcctatgtgcccctggcccacagcagcagcgccttcaccatcacagaccaggtgcccttctctgtgtctgtgtcccagctgcgggccctggatggcggcaacaagcacttcctgaggaaccagcccctgacctttgccctgcagctgcatgaccccagcggctacctggccgaggccgacctgagctacacctgggactttggagacagcagcggcaccctcatcagccgggccctggtggtgacccacacctacctggagcccggccctgtgacagcccaggtggtgctgcaggccgccatccccctgaccagctgtggcagcagccctgtgcccggcaccacagatggccaccggcccacagctgaggcccccaacaccacagctggccaggtgcccaccacagaggtggtgggcaccaccccaggccaggcccccacagctgagcccagcggcaccacctctgtgcaggtgcccaccacagaggtgatcagcacagcccctgtgcagatgcccacagctgagagcacaggcatgaccccagagaaggtgcctgtgtctgaggtgatgggcaccaccctggccgagatgagcaccccagaggccaccggcatgaccccagctgaggtgtccatcgtggtgctgagcggcaccacagctgcccaggtgaccaccacagagtgggtggagaccacagcccgggagctgcccatccctgagcctgagggcccagatgccagcagcatcatgagcacagagagcatcaccggcagcctgggccccctgctggatggaacagccaccctgcggctggtgaagaggcaggtgcccctggactgtgtgctgtaccgctatggcagcttctctgtgaccctggacatcgtgcagggcattgaatctgctgagatcctgcaggccgtgcccagcggggagggagatgcctttgagctgactgtgtcctgccagggcggcctgcccaaggaggcctgcatggagatcagcagccctggctgccagcccccagcccagaggctgtgccagcctgtgctgcccagccctgcctgccagctggtgctgcaccagatcctgaagggcggcagcggcacctactgcctgaatgtgtccctggccgacaccaacagcctggccgtggtgtccacccagctgatcatgcctggccaggaggccggcctgggccaggtgcccctgattgtgggcatcctgctggtgctgatggctgtggtgctggccagcctcatctacagaagaaggctgatgaagcaggacttctctgtgccccagctgccccacagcagcagccactggctgcggctgccccgcatcttctgcagctgccccatcggggagaacagccccctgctgagcggccagcaggtgtag

SEQ ID NO: 8340 - DNA, 330 bp, synthetic construct
  misc_feature 1..330: note = source = /note="Description of Artificial Sequence: Synthetic coding sequence"
  source 1..330: mol_type = other DNA
tgaagcggccagagcctgaagagcctgaatgccagcagcggccacctggccctgatcctgagcagcatcttcggcctgctgctgctggtgctcttcatcctcttcctgacctggtgccgggtgcagaagcagaagcacctgcccctgcgggtgtccaccaggagaagaggcagcctggaggagaacctcttccacgagatggagacctgcctgaagcgggaggacccccacggcaccaggaccagtgatgacacccccaaccacggctgtgaagatgccagtgacaccagcctgctgggcgtgctgcctgccagcgaggccaccaagtag

SEQ ID NO: 8341 - DNA, 312 bp, synthetic construct; identical to SEQ ID NO: 7320
  misc_feature 1..312: note = source = /note="Description of Artificial Sequence: Synthetic coding sequence"
  source 1..312: mol_type = other DNA

SEQ ID NO: 8342 - DNA, 2889 bp, synthetic construct; identical to SEQ ID NO: 7529
  misc_feature 1..2889: note = source = /note="Description of Artificial Sequence: Synthetic coding sequence"
  source 1..2889: mol_type = other DNA

SEQ ID NO: 8343 - DNA, 912 bp, synthetic construct
  misc_feature 1..912: note = source = /note="Description of Artificial Sequence: Synthetic coding sequence"
  source 1..912: mol_type = other DNA
atgctgcaccctgagaccagccctggccggggccacctgctggccgtgctgctggccctgctgggcacagcctgggccgaggtgtggccaccccagctgcaggagcaggcccccatggccggggccctgaacaggaaggagagcttcctgctgctgagcctgcacaaccggctgcgctcctgggtgcagcccccagctgctgacatgaggcggctggactggagcgacagcctggcccagctggcccaggcccgggccgccctgtgtggcacccccacccccagcctggccagcggcctgtggaggaccctgcaggtgggctggaacatgcagctgctgcctgctggcctggtgtcctttgtggaggtggtgtccctgtggtttgctgagggccagcgctacagccatgctgctggggagtgtgccagaaatgccacctgcacccactacacccagctggtgtgggccaccagcagccagctgggctgcggccgccacctgtgcagcgctggccaggccgccatcgaggcctttgtgtgtgcctacagcccccggggcaactgggaggtgaatggcaagaccatcgtgccctacaagaagggggcctggtgcagcctgtgcacagcctctgtgtctggctgcttcaaggcctgggaccatgctgggggcctgtgtgaggtgcccaggaacccctgcaggatgagctgccagaaccacggccgcctgaacatcagcacctgccactgccactgccccccaggctacacaggccgctactgccaggtgcgctgcagcctgcagtgtgtgcacggccgcttccgggaggaggagtgcagctgtgtgtgtgacatcggctacggggagcccagcgtgcccccacgctgcatcttccccagcacccctgtgacctag

SEQ ID NO: 8344 - DNA, 1356 bp, synthetic construct
  misc_feature 1..1356: note = source = /note="Description of Artificial Sequence: Synthetic coding sequence"
  source 1..1356: mol_type = other DNA
atggaggccaccggcacagatgaggtggacaagctgaagaccaagttcatcagcgcctggaacaacatgaagtacagctgggtgctgaagaccaagacctacttcagcaggaacagccctgtgctgctgctgggcaagtgctaccacttcaagtatgaagatgaggacaagaccctgcctgctgagagcggctgcaccatcgaggaccacgtgattgctggaaatgtggaggagttcaggaaggacttcatcagccgcatctggctgacctaccgggaggagttcccccagatcgagggcagcgccctgaccacagactgtggctggggctgcaccctgaggacaggccagatgctgctggcccagggcctcatcctgcacttcctgggccgggcctggacctggccagatgccctgaacatcgagaacagcgacagcgagagctggaccagccacacagtgaagaagttcaccgccagctttgaggccagcctgagcggggagcgggagttcaagacccccaccatcagcctgaaggagaccatcggcaagtacagtgatgaccacgagatgagaaatgaggtgtaccacaggaagatcatctcctggtttggagacagccccctggccctgtttggcctgcaccagctgattgaatatggcaagaagagcggcaagaaggccggggactggtacggccctgctgtggtggcccacatcctgaggaaggctgtggaggaggcccggcacccagacctgcagggcatcaccatctacgtggcccaggactgcaccgtgtacaacagtgatgtgattgacaagcagagcgcctccatgaccagtgacaatgctgatgacaaggccgtcatcatcctggtgcctgtgcggctgggcggggagaggaccaacacagactacctggagtttgtgaagggcatcctgagcctggagtactgtgtgggcatcattggaggcaagcccaagcagagctactactttgctggcttccaggatgacagcctcatctacatggacccccactactgccagagctttgtggatgtgtccatcaaggacttccccctggagaccttccactgccccagccccaagaagatgtccttcaggaagatggaccccagctgcaccatcggcttctactgcagaaatgtgcaggacttcaagagggccagcgaggagatcaccaagatgctgaagttcagcagcaaggagaagtaccccctcttcacctttgtgaatggccacagccgggactatgacttcaccagcaccaccaccaatgaggaggacctcttctctgaagatgagaagaagcagaagaagaagaagaagtag

SEQ ID NO: 8345 - DNA, 1557 bp, synthetic construct
  misc_feature 1..1557: note = source = /note="Description of Artificial Sequence: Synthetic coding sequence"
  source 1..1557: mol_type = other DNA
atgaggacctgggactaccgctggagcctggccctggtggcccagacaggagtgcactgctgcaacctgagcagcctgcagcccctgcccccacgcttcaagcgcttcagctgcctgagcctgagcagcggctgggactacagcaacagcggcaacatgaagccacccctgctggtgttcatcgtgtgcctgctgtggctgaaggacagccactgtgcccccacctggaaggacaagacagccatcagcgagaacctgaagagcttcagcgaggtgggggagattgatgctgatgaggaggtgaagaaggccctgaccggcatcaagcagatgaagatcatgatggagaggaaggagaaggagcacaccaacctgatgagcaccctgaagaagtgccgggaggagaagcaggaggccctgaagctgctgaatgaggtgcaggagcacctggaggaggaggagcggctgtgccgggagagcctggccgacagctggggagaatgtcgcagctgcctggagaacaactgcatgaggatctacaccacctgccagcccagctggagctctgtgaagaacaagattgagcgcttcttcaggaagatctaccagttcctgttccccttccacgaggacaatgagaaggacctgcccatcagcgagaagctgattgaagaagatgcccagctgacccagatggaggatgtgttcagccagctgactgtggatgtgaacagcctcttcaacagaagcttcaacgtgttccggcagatgcagcaggagtttgaccagaccttccagagccacttcatcagtgacacagacctgacagagccctacttcttccctgccttcagcaaggagcccatgaccaaggctgacctggagcagtgctgggacatccccaacttcttccagctgttctgcaacttctctgtgtccatctatgaatctgtgtctgagaccatcaccaagatgctgaaggccatcgaggacctgcccaagcaggacaaggccccagaccatggaggcctcatcagcaagatgctgcccggccaggaccggggcctgtgtggggagctggaccagaacctgagccgctgcttcaagttccacgagaagtgccagaagtgccaggcccacctgtctgaggactgcccagatgtgcctgccctgcacacagagctggatgaggccatccggctggtgaatgtgagcaaccagcagtatggccagatcctgcagatgaccaggaagcacctggaggacacagcctacctggtggagaagatgaggggccagtttggctgggtgtctgagctggccaaccaggcccctgagacagagatcatcttcaacagcatccaggtggtgccccgcatccacgagggcaacatcagcaagcaggatgagaccatgatgacagacctgagcatcctgcccagcagcaacttcaccctgaagatccccctggaggagagcgctgagagcagcaacttcatcggctacgtggtggccaaggccctgcagcacttcaaggagcacttcaagacctggtag

SEQ ID NO: 8346 - DNA, 1716 bp, synthetic construct
  misc_feature 1..1716: note = source = /note="Description of Artificial Sequence: Synthetic coding sequence"
  source 1..1716: mol_type = other DNA
gtggagatgaggaagtggagcagcgagcccggccctgagccagacacagtggaggccgtgattgagtacatgtacacaggccgcatccgggtgtccactggatctgtgcatgaggtgctggagctggccgaccgcttcctgctgatccggctgaaggagttctgtggggagttcctgaagaagaagctgcacctgagcaactgtgtggccatccacagcctggcccacatgtacaccctgagccagctggccctgaaggctgctgacatgatcagaagaaacttccacaaggtgatccaggatgaggagttctacaccctgcccttccacctgatccgggactggctgagtgacctggagatcaccgtggacagcgaggaggtgctgtttgagaccgtgctgaagtgggtgcagagaaatgctgaggagcgggagcgctactttgaggagctgttcaagctgctgcggctgagccagatgaagcccacctacctgaccaggcatgtgaagccagagcggctggtggccaacaatgaggtgtgtgtgaagctggtggctgatgctgtggagagacatgccctgcgggcagagaacatccagagcggcacctgccagcaccccaccagccacgtgtccctgctgcccaggtatggccagaacatggatgtgatcatggtgattggaggagtgtctgagggcggggactacctgtctgaatgtgtgggctactttgtggatgaagatcgctgggtgaacctgccccacatccacaaccacctggatggccatgctgtggccgtgacagagagctatgtgtatgtggccggctccatggagcccggctttgccaagacagtggagcgctacaaccccaacctgaacacctgggagcacgtgtgcagcctgatgaccaggaagcacagctttggcctgacagaggtgaagggcaagctgtacagcattggaggccacggcaacttcagccctggcttcaaggatgtgacagtgtacaaccctgagctggacaagtggcacaacctggagagcgcccccaagatcctgagagatgtgaaggccctggccattgaagatagatttgtgtacatcgccgcccggacccctgtggaccgggacacagaagatggcctgaaggctgtgatcacctgctatgacacagagacccggcagtggcaggatgtggagagcctgcccctgattgacaactactgcttcttccagatgtctgtggtgaacagcaacttctaccagacagccagctgctgccccaagagctactgcctggagaatgaggaggccgtgaggaagatcgccagccaggtgtctgatgagatcctggagagcctgcccccagaggtgctgagcattgagggcgccgccatctgctactacaaggatgatgtgttcatcattggaggctggaagaacagtgatgacatcgacaagcagtacaggaaggaggcctaccgctactgtgccgagaggaagcgctggatgctgctgccccccatgccccagccccgctgccgggccacagcctgccacgtgcgcatcccctaccgctacctgcacggcacccagcgctaccccatgccccagaacctgatgtggcagaaggaccgcatccggcagatgcaggagatccacagacatgccctgaacatgagaagagtgcccagcagccagatcgagtgctag

SEQ ID NO: 8347 - DNA, 729 bp, synthetic construct
  misc_feature 1..729: note = source = /note="Description of Artificial Sequence: Synthetic coding sequence"
  source 1..729: mol_type = other DNA
atgctgaagaagatctctgtgggcgtggccggggacctgaacacagtgaccatgaagctgggctgtgtgctgatggcctgggccctgtacctgagcctgggcgtgctgtgggtggcccagatgctgctggccgccggctgccacgccgagctgtttcctgcccccatcctgcgggctgtgcccagcgctgagccccaggccggcagccccatgaccctgagctgccagaccaagctgcccctgcagaggtctgctgcccggctgctcttctccttctacaaggatggccgcatcgtgcagagccggggcctgagcagcgagttccagatccccacagccagcgaggaccacagcggcagctactggtgtgaggccgccacagaggacaaccaggtgtggaagcagagcccccagctggagatccgggtgcagggcgccagcagcagcgctgccccacccaccctgaacccagccccccagaagtctgctgcccctggaacagcccctgaggaggcccctggccccctgcccccaccacccacccccagcagtgaagatcctggcttcagcagccccctgggcatgccagacccccacctgtaccaccagatgggcctgctgctgaagcacatgcaggatgtgcgggtgctgctgggccacctgctgatggagctgcgggagctgagcggccacaggaagccaggcaccaccaaggccacagctgagtag

SEQ ID NO: 8348 - DNA, 1392 bp, synthetic construct
  misc_feature 1..1392: note = source = /note="Description of Artificial Sequence: Synthetic coding sequence"
  source 1..1392: mol_type = other DNA
atgtatgtgtccacccgggagcgctacaagtggctgcgcttcagcgaggactgcctgtacctgaatgtgtatgccccagcccgggcccctggggacccccagctgcctgtgatggtgtggttccctgggggcgccttcatcgtgggcgccgccagcagctatgagggcagtgacctggccgcccgggagaaggtggtgctggtgttcctgcagcaccggctgggcatcttcggcttcctgagcacagatgacagccacgcccggggcaactggggcctgctggaccagatggccgccctgcgctgggtgcaggagaacattgctgccttcggcggggaccctggaaatgtgaccctgtttggccagagcgctggggccatgagcatcagcggcctgatgatgagccccctggccagcggcctcttccaccgggccatcagccagagcggcacagccctcttccgcctcttcatcaccagcaaccccctgaaggtggccaagaaggtggcccacctggccggctgcaaccacaacagcacccagatcctggtgaactgcctgcgggccctgagcggcaccaaggtgatgagggtgagcaacaagatgaggttcctgcagctgaacttccagagggaccctgaggagatcatctggagcatgagccctgtggtggatggagtggtgatcccagatgaccccctggtgctgctgacccagggcaaggtgtcctctgtgccctacctgctgggcgtgaacaacctggagttcaactggctgctgccctacatcatgaagttccccctgaaccggcaggccatgaggaaggagaccatcaccaagatgctgtggagcaccaggaccctgctgaacatcaccaaggagcaggtgcccctggtggtggaggagtacctggacaacgtgaatgaacatgactggaagatgctgaggaacaggatgatggacatcgtgcaggatgccacctttgtgtatgccaccctgcagacagcccactaccacagagatgctggcctgcctgtgtacctgtatgaatttgagcaccacgcccggggcatcatcgtgaagcccaggacagatggagctgaccatggagatgagatgtacttcctgtttggaggcccctttgccaccggcctgtccatgggcaaggagaaggccctgagcctgcagatgatgaagtactgggccaactttgccaggactggaaaccccaatgatggcaacctgccctgctggccccgctacaacaaggatgagaagtacctgcagctggacttcaccaccagggtgggcatgaagctgaaggagaagaagatggccttctggatgagcctgtaccagagccagaggcctgagaagcagaggcagttctag

SEQ ID NO: 8349 - DNA, 1215 bp, synthetic construct
  misc_feature 1..1215: note = source = /note="Description of Artificial Sequence: Synthetic coding sequence"
  source 1..1215: mol_type = other DNA
atgttctaccacgcctatgacagctacctggagaatgccttcccctttgatgagctgcggcccctgacctgtgatggccatgacacctggggcagcttcagcctgaccctgattgatgccctggacaccctgctgatcctgggcaatgtgtctgagttccagagggtggtggaggtgctgcaggacagcgtggactttgatattgatgtgaatgcctctgtgtttgagaccaacatccgggtggtgggcggcctgctgagcgcccacctgctgagcaagaaggccggcgtggaggtggaggccggctggccctgcagcggccccctgctgaggatggccgaggaggccgccaggaagctgctgcctgccttccagacccccaccggcatgccctacggcaccgtgaacctgctgcatggagtgaaccctggagagacccctgtgacctgcacagctggcatcggcaccttcatcgtggagtttgccaccctgagcagcctgaccggggaccctgtgtttgaagatgtggcccgggtggccctgatgaggctgtgggagagcagaagtgacatcggcctggtgggcaaccacattgatgtgctgaccgggaagtgggtggcccaggatgctggcatcggggccggcgtggacagctactttgagtacctggtgaagggggccatcctgctgcaggacaagaagctgatggccatgttcctggagtacaacaaggccatccggaactacaccaggtttgatgactggtacctgtgggtgcagatgtacaagggcaccgtgtccatgcctgtgttccagagcctggaggcctactggccaggcctgcagagcctgattggagacatcgacaatgccatgaggaccttcctgaactactacacagtgtggaagcagtttggaggcctgcctgagttctacaacatcccccagggctacacagtggagaagcgggagggctaccccctgcggcctgagctgattgaaagtgccatgtacctgtaccgggccactggagaccccaccctgctggagctgggcagagatgctgtggagagcattgagaagatcagcaaggtggagtgtggctttgccaccgtgtctgtgtgcatggcccccaggacaggcaagagcctgcccctgctgctgaagagcctcttcaagggccgggccctgggcgtgctgacctaccagcactag

SEQ ID NO: 8350 - DNA, 1281 bp, synthetic construct
  misc_feature 1..1281: note = source = /note="Description of Artificial Sequence: Synthetic coding sequence"
  source 1..1281: mol_type = other DNA
atgggctggacagacaccctggagagcgctgaggacatcttctggaagcaggccgactttggctacgcccgggagcggctggaggagatgcacgtgctgtgccagcccaaggagaccagtgacagcagcctggtgtgcagccgctacctgcagtactgccgggccaccaacctgtacctggacctgaggaacatcaagagaaatcatgaccgcttcaaggaggacttcttccagagcggggagatcggcggccactgcaagctggacatccgcaccctgaccagcgagggccagaggaagagccccctgcagagctggtttgctgagctgcagagctacacccagctgaacttccggcccattgaagatgccaagtgtgacatcgtcatcgagaagcccacctacttcatgaagctggatgctggggtgaacatgtaccaccacttctgtgacttcatcaacctgtacatcacccagcacgtgaacaacagcttcagcacagatgtgtacatcgtgatgtgggacaccagcagctatggctatggagacctcttcagtgacacctggaatgccttcacagattatgatgtgatccacctgaagacctatgacagcaagagggtgtgcttcaaggaggccgtgttcagcctgctgcccaggatgagatatggcctcttctacaacacccccctcatcagcggctgccagaacacaggcctcttccgggcctttgcccagcacgtgctgcaccggctgaacatcacccaggagggccccaaggatggcaagatccgggtgaccatcctggcccggagcacagagtacaggaagatcctgaaccagaatgagctggtgaatgccctgaagacagtgtccacctttgaggtgcagatcgtggactacaagtaccgggagctgggcttcctggaccagctgcgcatcacccacaacacagacatcttcatcggcatgcatggagctggcctgacccacctgctcttcctgcctgactgggccgctgtgtttgagctgtacaactgtgaagatgagcgctgctacctggacctggcccggctgcggggcgtgcactacatcacctggaggcggcagaacaaggtgttcccccaggacaagggccaccaccccaccctgggggagcaccccaagttcaccaactacagctttgatgtggaggagttcatgtacctggtgctgcaggccgctgaccacgtgctgcagcaccccaagtggcccttcaagaagaagcatgatgagctgtag

SEQ ID NO: 8351 - DNA, 1098 bp, synthetic construct
  misc_feature 1..1098: note = source = /note="Description of Artificial Sequence: Synthetic coding sequence"
  source 1..1098: mol_type = other DNA
atgaagctgggctgtgtgctgatggcctgggccctgtacctgagcctgggcgtgctgtgggtggcccagatgctgctggtggccagcagcttctctgctgccagctttgagaccctgcagtgtgagggccctgtgtgcacagaggagagcagctgccacacagaagatgacctgacagatgcccgggaggccggcttccaggtgaaggcctacaccttcagcgagcccttccacctgattgtgtcctatgactggctgatcctgcagggccctgccaagcctgtgtttgaaggagacctgctggtgctgcgctgccaggcctggcaggactggcccctgacccaggtgaccttctacagagatggcagcgccctgggccccccaggccccaaccgggagttcagcatcaccgtggtgcagaaggctgacagcggccactaccactgcagcggcatcttccagagccctggccctggcatccctgagacagcctctgtggtggccatcaccgtgcaggagctgtttcctgcccccatcctgcgggctgtgcccagcgctgagccccaggccggcagccccatgaccctgagctgccagaccaagctgcccctgcagaggtctgctgcccggctgctcttctccttctacaaggatggaagaattgtgcagagccggggcctgagcagcgagttccagatccccacagccagcgaggaccacagcggcagctactggtgtgaggccgccacagaggacaaccaggtgtggaagcagagcccccagctggagatccgggtgcagggcgccagcagcagcgctgccccacccaccctgaacccagccccccagaagtctgctgcccctggaacagcccctgaggaggcccctggccccctgcccccaccacccacccccagcagcgaggaccccggcttcagcagccccctgggcatgccagacccccacctgtaccaccagatgggcctgctgctgaagcacatgcaggatgtgcgggtgctgctgggccacctgctgatggagctgcgggagctgagcggccacaggaagccaggcaccaccaaggccacagctgagtag

SEQ ID NO: 8352 - DNA, 1407 bp, synthetic construct
  misc_feature 1..1407: note = source = /note="Description of Artificial Sequence: Synthetic coding sequence"
  source 1..1407: mol_type = other DNA
atgcgctggatcctgtgctggagcctgaccctgtgcctgatggcccagacagccctgggcgccctgcacaccaagaggccccaggtggtgaccaagtatggcaccctgcagggcaagcagatgcacgtgggcaagacccccatccaggtgttcctgggcgtgcccttcagcaggcctcccctgggcatcctgcgctttgcccctcctgagcccccagagccctggaagggcatcagagatgccaccacctacccacctggctgcctgcaggagagctggggccagctggcctccatgtatgtgtccacccgggagcgctacaagtggctgcgcttcagcgaggactgcctgtacctgaatgtgtatgccccagcccgggcccctggggacccccagctgcctgtgatggtgtggttccctgggggcgccttcatcgtgggcgccgccagcagctatgagggcagtgacctggccgcccgggagaaggtggtgctggtgttcctgcagcaccggctgggcatcttcggcttcctgagcacagatgacagccacgcccggggcaactggggcctgctggaccagatggccgccctgcgctgggtgcaggagaacattgctgccttcggcggggaccctggaaatgtgaccctgtttggccagagcgctggggccatgagcatcagcggcctgatgatgagccccctggccagcggcctcttccaccgggccatcagccagagcggcacagccctcttccgcctcttcatcaccagcaaccccctgaaggtggccaagaaggtggcccacctggccggctgcaaccacaacagcacccagatcctggtgaactgcctgcgggccctgagcggcaccaaggtgatgagggtgagcaacaagatgaggttcctgcagctgaacttccagagggaccctgaggagatcatctggagcatgagccctgtggtggatggagtggtgatcccagatgaccccctggtgctgctgacccagggcaaggtgtcctctgtgccctacctgctgggcgtgaacaacctggagttcaactggctgctgccctacatcatgaagttccccctgaaccggcaggccatgaggaaggagaccatcaccaagatgctgtggagcaccaggaccctgctgaacatcaccaaggagcaggtgcccctggtggtggaggagtacctggacaacgtgaatgaacatgactggaagatgctgaggaacaggatgatggacatcgtgcaggatgccacctttgtgtatgccaccctgcagacagcccactaccaccgggagacccccatgatgggcatctgcccagctggccacgccaccaccaggatgaagagcacctgctcctggatcctgccccaggagtgggcctag

SEQ ID NO: 8353 - DNA, 756 bp, synthetic construct
  misc_feature 1..756: note = source = /note="Description of Artificial Sequence: Synthetic coding sequence"
  source 1..756: mol_type = other DNA
atgagcagctatggctacggggacctcttcagtgacacctggaatgccttcacagattatgatgtgatccacctgaagacctatgacagcaagagggtgtgcttcaaggaggccgtgttcagcctgctgcccaggatgagatatggcctcttctacaacacccccctcatcagcggctgccagaacacaggcctcttccgggcctttgcccagcacgtgctgcaccggctgaacatcacccaggagggccccaaggatggcaagatccgggtgaccatcctggcccggagcacagagtacaggaagatcctgaaccagaatgagctggtgaatgccctgaagacagtgtccacctttgaggtgcagatcgtggactacaagtaccgggagctgggcttcctggaccagctgcgcatcacccacaacacagacatcttcatcggcatgcacggggccggcctgacccacctgctcttcctgcctgactgggccgctgtgtttgagctgtacaactgtgaagatgagcgctgctacctggacctggcccggctgcggggcgtgcactacatcacctggaggcggcagaacaaggtgttcccccaggacaagggccaccaccccaccctgggggagcaccccaagttcaccaactacagctttgatgtggaggagttcatgtacctggtgctgcaggccgctgaccacgtgctgcagcaccccaagtggcccttcaagaagaagcatgatgagctgtag

SEQ ID NO: 8354 - DNA, 927 bp, synthetic construct
  misc_feature 1..927: note = source = /note="Description of Artificial Sequence: Synthetic coding sequence"
  source 1..927: mol_type = other DNA
atgatccctgtggagctgctgctgtgctacctgctgctgcaccctgtggatgccaccagctatggcaagcagaccaacgtgctgatgcacttccccctgagcctggagagccagacccccagcagtgaccccctgagctgccagttcctgcaccccaagagcctgcccggcttcagccacatggcccccctgcccaagttcctggtgtccctggccctgagaaatgccctggaggaggccggctgccaggctgatgtgtgggccctgcagctgcagctgtaccggcagggcggcgtgaatgccacccaggtgctgatccagcacctgcggggcctgcagaagggccgcagcacagaaagaaatgtgtctgtggaggccctggccagcgccctgcagctgctggcccgggagcagcagagcacaggccgggtgggccgcagcctgcccacagaggactgtgaaaatgagaaggagcaggccgtgcacaacgtggtgcagctgctgcccggggtgggcaccttctacaacctgggcacagccctgtactatgccacccagaactgcctgggcaaggcccgggagcggggcagagatggagccatcgacctgggctatgacctgctgatgaccatggccggcatgtctgggggccccatgggcctggccatctctgctgccctgaagccagccctgcggtctggagtgcagcagctgatccagtactaccaggaccagaaggatgccaacatcagccagcctgagaccaccaaggagggcctgcgggccatcagtgatgtgtctgacctggaggagaccaccaccctggccagcttcatcagcgaggtggtgtcctctgccccctactggggctgggccatcatcaagagctatgacctggaccctggagctggcagcctggagatctag

SEQ ID NO: 8355 - DNA, 2862 bp, synthetic construct
  misc_feature 1..2862: note = source = /note="Description of Artificial Sequence: Synthetic coding sequence"
  source 1..2862: mol_type = other DNA
atgagggtgctggcctgcctgctggccgccctggtgggcatccaggccgtggagcggctgcggctggctgatggcccccacggctgtgccggccgcctggaggtgtggcatggaggccgctggggcaccgtgtgtgatgatggctgggacctgagagatgctgctgtggcctgccggcagctgggctgcggcggggccctggccgcccctgggggcgccttctttggagagggcgccggccctgtgtggctgtctgagctggcctgcagaggaaatgaaggccagctgggcctgtgccaccaccggggctggaaggcccacatctgcagccatgaagaagatgctggggtggtgtgtgccggccagagggtggccaacagcagagatgacagcaccagccccctggatggagccccctggccaggcctgctgctggagctgagccccagcacagaggagcccctggtgacccacgcccccaggcctgctggcaacccccagaatgccagcaggaagaagagcccccggcccaagcaggccaagagcacccgggcccccctgctgaccaccggggccccccggcaggagcggctgcggctggtgtctggcccccaccgctgtgccggccgcctggaggtgtggcatggaggccgctggggcaccgtgtgtgatgatggctgggacctgagagatgctgctgtggcctgccgggagctgggctgcggcggggccctggccgcccctgggggcgccaggtttggacctggagctggccctgtgtggatggatgatgtgggctgcggcggcggggagcaggccctgcgggactgccccaggagcccctggggccgcagcaactgtgaccacagtgaagatgctggcctggtgtgcaccggccctgccccccggctgcggctggctgatggcccccacggctgtgccggccgcctggaggtgtggcatggaggccgctggggctctgtgtgtgatgatgcctgggacctgagagatgctgctgtggcctgccgggagctgggctgcggcggggccctggccgcccctgggggcgccttctttggagagggcagcggccccatcatcctggatgacctgcgctgcagaggaaatgaaacagccctgcgcttctgcccagcccggccctggggccagcacgactgccaccacagagaagatgctggagctgtgtgtgatggcatgcccctgggctacgtgcccccaacagcccccacagacagcaacaacagcaccccccgggaggccgccagcaggcctcccagcaccatgaccagccaggcccctggaacagctggggtgtccccacctccagccagccccaccgtgctgtgggagcccggccctgaggccggcagcccccagctgcggctggtggccggccccagcaaatgttctggccgcctggaggtgtggcatgaccagcgctggggcaccgtgtgtgatgacagctgggacatgagggacagcgctgtggtgtgccgggagctgggctgcggcggcccccagcagcctgaccctgctgctggccgcttcggctggggcgccggccccatctggctggatgatgtgggctgtgtgggcacagaggccagcctgagtgactgcccagctgccccctggggcaagcacaactgtgcccacaatgaagatgtgggcgtgacctgcaccggccccccaggcctggacagcatcagtgaccccttctcctggagctggatccctggcctgggccgggacagagatgcctggctgcctggagagctggccaccaagcccagcgcctctgtgacagcctctgtgctggagaagaccaccaccaaggcccctgggaagatgcccaagagcaccaagaagtgggtgaccaagaatgccaagaggcccaccacccagccccctgtgatgcccaccaccaagcacagccgggcccagagccccccagacctgaccagccagaccacagctgccctgaccacagaggccagccggcggcccaccagcgagttcacccggcggcccaccacagaggccccccagcgctggaccagccacaccacagccaccctgaccccccaggccccccgggagaggaccaccaagaccatggccatgctgaccacccagggcccccaggagatgaccagcgagagcaccatcaagagcatcccccaggccagcctggagcccagcgctgagatccctgagggcagccctgagagccccaaggaccctgcccccagccccagcgtgtccaccaccggggagagcggcctcttccgggtgcggctggctgatggccccaacagatgtgccggccgcctggaggtgtggcacgccggccgctggggcaccgtgtgtgatgacaactgggacctgagagatgccaccgtggcctgctgggagctgggctgcggcaaggtgcggccccgggtgggcaagacccactacggccctggcaccggccccatctggctggatgacatgggctgcaagggcagcgaggccagcctgagtgactgccccagcggggcctggggcaagcacaactgtgaccatgaagaagatgtgggcctgacctgcaccggctacacagattatgatgactacccaccctggacctgggaccccaccagccgggaggacctggccaagggcaccaccacagctggggtgcccggccacaccctgccctggaggaccaccaggaggcctggcagcagcagccctgccatccggcggctgcctgacacagagcctgaggccggcctgcgggaggtgatgctgctggtgcagggcctgcccggcctgcagaggctgcccagcccctag

SEQ ID NO: 8356 - DNA, 474 bp, synthetic construct
  misc_feature 1..474: note = source = /note="Description of Artificial Sequence: Synthetic coding sequence"
  source 1..474: mol_type = other DNA
atgctgaggacagagagctgccggcccaggagccctgctggccaggtggccgccgccagccccctgctgctgctgctgctgctgctggcctggtgtgccggggcctgccgcggggcccccatcctgccccagggcctgcagcctgagcagcagctgcagctgtggaatgaaattgatgacacctgcagcagcttcctgagcattgacagccagccccaggccagcaatgccctggaggagctgtgcttcatgatcatgggcatgctgcccaagccccaggagcaggatgagaaggacaacaccaagaggagctctgtggtgcaccccctgctgcagctggtgccccacctgcacgagaggaggatgaagcgcttccgggtggatgaggagttccagagcccctttgccagccagagccggggctacttcctgttccggcccagaaatggaagaagatctgctggcttcatctag

SEQ ID NO: 8357 - DNA, 1545 bp, synthetic construct
  misc_feature 1..1545: note = source = /note="Description of Artificial Sequence: Synthetic coding sequence"
  source 1..1545: mol_type = other DNA
atgcccagcacagtgctgcccagcacagtgctgcccagcctgctgcccacagctggggccggctggagcatgcgctggatcctgtgctggagcctgaccctgtgcctgatggcccagacagccctgggcgccctgcacaccaagaggccccaggtggtgaccaagtatggcaccctgcagggcaagcagatgcacgtgggcaagacccccatccaggtgttcctgggcgtgcccttcagccggccccccctgggcatcctgcgctttgcccctcctgagcccccagagccctggaagggcatcagagatgccaccacctacccacctggctgcctgcaggagagctggggccagctggcctccatgtatgtgtccacccgggagcgctacaagtggctgcgcttcagcgaggactgcctgtacctgaatgtgtatgccccagcccgggcccctggggacccccagctgcctgtgatggtgtggttccctggaggagccttcatcgtgggcgccgccagcagctatgagggcagtgacctggccgcccgggagaaggtggtgctggtgttcctgcagcaccggctgggcatcttcggcttcctgagcacagatgacagccacgcccggggcaactggggcctgctggaccagatggccgccctgcgctgggtgcaggagaacattgctgcctttggaggagaccctggaaatgtgaccctgtttggccagagcgctggggccatgagcatcagcggcctgatgatgagccccctggccagcggcctcttccaccgggccatcagccagagcggcacagccctcttccgcctcttcatcaccagcaaccccctgaaggtggccaagaaggtggcccacctggccggctgcaaccacaacagcacccagatcctggtgaactgcctgcgggccctgagcggcaccaaggtgatgagggtgagcaacaagatgaggttcctgcagctgaacttccagagggaccctgaggagatcatctggagcatgagccctgtggtggatggagtggtgatcccagatgaccccctggtgctgctgacccagggcaaggtgtcctctgtgccctacctgctgggcgtgaacaacctggagttcaactggctgctgccctacaacatcaccaaggagcaggtgcccctggtggtggaggagtacctggacaacgtgaatgaacatgactggaagatgctgaggaacaggatgatggacatcgtgcaggatgccacctttgtgtatgccaccctgcagacagcccactaccaccggggcctgtccatgggcaaggagaaggccctgagcctgcagatgatgaagtactgggccaactttgccaggacaggcaaccccaatgatggcaacctgccctgctggccccgctacaacaaggatgagaagtacctgcagctggacttcaccaccagggtgggcatgaagctgaaggagaagaagatggccttctggatgagcctgtaccagagccagaggcctgagaagcagaggcagttctag

SEQ ID NO: 8358 - DNA, 1062 bp, synthetic construct
  misc_feature 1..1062: note = source = /note="Description of Artificial Sequence: Synthetic coding sequence"
  source 1..1062: mol_type = other DNA
atgagcaaccccacccagacagatgctgacagcgacctggtgggagatgtgtgtgacaccaatgaagattctgatggagatggccaccaggacaccaaggacaactgcccccagctgcccaacagcagccagctggacagcgacaatgatggcctgggagatgaatgtgatggagatgatgacaatgatggcatcccagactatgtgcccccaggccctgacaactgccgcctggtgcccaaccccaaccagaaggacagtgatggaaatggagtgggagatgtgtgtgaagatgactttgacaatgatgctgtggtggaccccctggatgtgtgcccagagagcgctgaggtgaccctgacagacttccgggcctaccagacagtggtgctggaccctgaaggagatgcccagattgaccccaactgggtggtgctgaaccagggcatggagatcgtgcagaccatgaacagcgaccccggcctggccgtgggctacacagccttcaacggggtggactttgagggcaccttccacgtgaacacagtgacagatgatgattatgccggcttcctgttctcctaccaggacagcggccgcttctacgtggtgatgtggaagcagacagagcagacctactggcaggccacccccttccgggctgtggcccagcccggcctgcagctgaaggctgtgacctctgtgtctggccctggagagcacctgagaaatgccctgtggcacacaggccacaccccagaccaggtgcggctgctgtggacagaccccagaaatgtgggctggagggacaagaccagctaccgctggcagctgctgcaccggccccaggtgggctacatccgggtgaagctgtatgagggcccccagctggtggccgacagcggggtcatcatcgacacctccatgagaggaggccgcctgggcgtcttctgcttcagccaggagaacatcatctggagcaacctgcagtaccgctgcaatgacacagtgcctgaagattttgagcccttccggcggcagctgctgcagggccgggtgtag

SEQ ID NO: 8359 - DNA, 1074 bp, synthetic construct
  misc_feature 1..1074: note = source = /note="Description of Artificial Sequence: Synthetic coding sequence"
  source 1..1074: mol_type = other DNA
atggagattgagcacaccctggaccagatgatcagcaaggtgggcaaccacattgatgtgctgaccgggaagtgggtggcccaggatgctggcatcggggccggcgtggacagctactttgagtacctggtgaagggggccatcctgctgcaggacaagaagctgatggccatgttcctggagtacaacaaggccatccggaactacaccaggtttgatgactggtacctgtgggtgcagatgtacaagggcaccgtgtccatgcctgtgttccagagcctggaggcctactggccaggcctgcagagcctgattggagacatcgacaatgccatgaggaccttcctgaactactacacagtgtggaagcagtttggaggcctgcctgagttctacaacatcccccagggctacacagtggagaagcgggagggctaccccctgcggcctgagctgattgaaagtgccatgtacctgtaccgggccactggagaccccaccctgctggagctgggcagagatgctgtggagagcattgagaagatcagcaaggtggagtgtggctttgccaccatcaaggacctgcgggaccacaagctggacaacaggatggagagcttcttcctggccgagaccgtgaagtacctgtacctgctgtttgaccccaccaacttcatccacaacaacggcagcacctttgatgctgtgatcaccccctacggggagtgcatcctgggcgccggcggctacatcttcaacacagaggcccaccccattgatcctgctgccctgcactgctgccagaggctgaaggaggagcagtgggaggtggaggacctgatgagggagttctacagcctgaagaggagccgcagcaagttccagaagaacacagtgagcagcggcccctgggagcccccagcccggcccggcaccctcttctccccagaaaatcatgaccaggcccgggagaggaagccagccaagcagaaggtgcccctgctgagctgccccagccagcccttcaccagcaagctggccctgctgggccaggtgttcctggacagcagctag

SEQ ID NO: 8360 - DNA, 1341 bp, synthetic construct; identical to SEQ ID NO: 7099
  misc_feature 1..1341: note = source = /note="Description of Artificial Sequence: Synthetic coding sequence"
  source 1..1341: mol_type = other DNA

SEQ ID NO: 8361 - DNA, 900 bp, synthetic construct; identical to SEQ ID NO: 7128
  misc_feature 1..900: note = source = /note="Description of Artificial Sequence: Synthetic coding sequence"
  source 1..900: mol_type = other DNA

SEQ ID NO: 8362 - DNA, 1458 bp, synthetic construct
  misc_feature 1..1458: note = source = /note="Description of Artificial Sequence: Synthetic coding sequence"
  source 1..1458: mol_type = other DNA
atggacaacaacaagcactgcaagcaggacaactgcctgctgacccccaacagcggccaggaggatgctgacaatgatggagtgggggaccagtgtgatgatgatgctgatggagatggcatcaagaatgtggaggacaactgccgcctcttccccaacaaggaccagcagaacagcgacacagacagctttggagatgcctgtgacaactgccccaacgtgcccaacaatgaccagaaggacacagatggaaatggagaaggagatgcctgtgacaatgatgtggatggagatggcatccccaacggcctggacaactgccccaaggtgcccaaccccctgcagacagacagagatgaagatggagtgggagatgcctgtgacagctgcccagagatgagcaaccccacccagacagatgctgacagcgacctggtgggagatgtgtgtgacaccaatgaagattctgatggagatggccaccaggacaccaaggacaactgcccccagctgcccaacagcagccagctggacagcgacaatgatggcctgggagatgaatgtgatggagatgatgacaatgatggcatcccagactatgtgcccccaggccctgacaactgccgcctggtgcccaaccccaaccagaaggacagtgatggaaatggagtgggagatgtgtgtgaagatgactttgacaatgatgctgtggtggaccccctggatgtgtgcccagagagcgctgaggtgaccctgacagacttccgggcctaccagacagtggtgctggaccctgaaggagatgcccagattgaccccaactgggtggtgctgaaccagggcatggagatcgtgcagaccatgaacagcgaccccggcctggccgtgggctacacagccttcaacggggtggactttgagggcaccttccacgtgaacacagtgacagatgatgattatgccggcttcctgttctcctaccaggacagcggccgcttctacgtggtgatgtggaagcagacagagcagacctactggcaggccacccccttccgggctgtggcccagcccggcctgcagctgaaggctgtgacctctgtgtctggccctggagagcacctgagaaatgccctgtggcacacaggccacaccccagaccaggtgcggctgctgtggacagaccccagaaatgtgggctggagggacaagaccagctaccgctggcagctgctgcaccggccccaggtgggctacatccgggtgaagctgtatgagggcccccagctggtggccgacagcggggtcatcatcgacacctccatgagaggaggccgcctgggcgtcttctgcttcagccaggagaacatcatctggagcaacctgcagtaccgctgcaatgacacagtgcctgaagattttgagcccttccggcggcagctgctgcagggccgggtgtag

SEQ ID NO: 8363 - DNA, 2358 bp, synthetic construct
  misc_feature 1..2358: note = source = /note="Description of Artificial Sequence: Synthetic coding sequence"
  source 1..2358: mol_type = other DNA
atgaagcacaccctggccctgctggcccccctgctgggcctgggcctgggcctggccctgagccagctggccgccggggccacagactgcaagttcctgggccctgctgagcacctgaccttcaccccagctgcccgggcccgctggctggccccccgggtgcgggcccctggcctgctggacagcctgtatggcaccgtgcggcgcttcctgtctgtggtgcagctgaaccccttccccagcgagctggtgaaggccctgctgaatgagctggcctctgtgaaggtgaatgaggtggtgcgctatgaggccggctacgtggtgtgtgctgtgattgctggcctgtacctgctgctggtgcccacagctggcctgtgcttctgctgctgccgctgccaccggcgctgtggcggccgggtgaagacagagcacaaggccctggcctgtgagcgggccgccctgatggtgttcctgctgctgaccaccctgctgctgctgattggagtggtgtgtgcctttgtgaccaaccagaggacccatgagcagatgggccccagcattgaggccatgcctgagaccctgctgagcctgtggggcctggtgtctgatgtgccccaggagctgcaggccgtggcccagcagttcagcctgccccaggagcaggtgtctgaggagctggatggagtgggcgtgtccatcggcagcgccatccacacccagctgcggagctctgtgtaccccctgctggccgctgtgggcagcctgggccaggtgctgcaggtgtctgtgcaccacctgcagaccctgaatgccaccgtggtggagctgcaggccggccagcaggacctggagcccgccatccgggagcaccgggaccggctgctggagctgctgcaggaggcccgctgccagggcgactgtgccggggccctgtcctgggcccggaccctggagctgggcgctgacttcagccaggtgcccagcgtggaccacgtgctgcaccagctgaagggcgtgcctgaggccaacttcagctccatggtgcaggaggagaacagcaccttcaatgccctgcctgccctggccgccatgcagaccagctctgtggtgcaggagctgaagaaggctgtggcccagcagcctgagggcgtgaggaccctggccgagggcttccctggcctggaggccgccagccgctgggcccaggccctgcaggaggtggaggagagcagccggccctacctgcaggaggtgcagagatatgagacctaccgctggatcgtgggctgtgtgctgtgcagcgtggtgctgtttgtggtgctgtgcaacctgctgggcctgaacctgggcatctggggcctgagcgccagagatgaccccagccaccctgaggccaagggggaggccggggcccgcttcctgatggccggcgtgggcctgtccttcctgtttgctgcccccctcatcctgctggtgtttgccaccttcctggtgggcggcaatgtgcagaccctggtgtgccagagctgggagaatggagagctgtttgaatttgctgacaccccaggcaacctgccccccagcatgaacctgagccagctgctgggcctgaggaagaacatcagcatccaccaggcctaccagcagtgcaaggagggcgccgccctgtggacagtgctgcagctgaatgacagctatgacctggaggagcacctggacatcaaccagatccagaggcctgtggtgaagacctccatggagcagctggcccaggagctgcagggcctggcccaggcccaggacaacagcgtgctgggccagaggctgcaggaggaggcccagggcctgaggaacctgcaccaggagaaggtggtgccccagcagagcctggtggccaagctgaacctgtctgtgcgggccctggagagcagcgcccccaacctgcagctggagaccagtgatgtgctggccaacgtgacctacctgaagggggagctgcctgcctgggccgcccgcatcctgagaaatgtgtctgagtgcttcctggcccgggagatgggctacttcagccagtatgtggcctgggtgcgggaggaggtgacccagagaattgccacctgccagcccctgagcggggccctggacaacagcagggtcatcctgtgtgacatgatggctgacccctggaatgccttctggttctgcctggcctggtgcaccttcttcctgatccccagcatcatctttgctgtgaagaccagcaagtacttccggcccatcaggaagaggctgagcagcaccagcagcgaggagacccagctgttccacatcccccgggtgaccagcctgaagctgtag

SEQ ID NO: 8364 - DNA, 792 bp, synthetic construct
  misc_feature 1..792: note = source = /note="Description of Artificial Sequence: Synthetic coding sequence"
  source 1..792: mol_type = other DNA
atgggccgggtgctggaggaggccaggtttgctgtggccttcacagagagcatgaaggagatggcccaggcccagtggaaggcccggcagatcagcctggccgtgaccagcgctgtgcctgtgcagccccacgccaagggcaaggtgtatgtgcagagccagggcatcgccaccaccccaaatgctgccttcaactggaacaccttcctgcagaggtctgagatcaaccagagcgctgacaacctgcacatcttcctgctgatctgtggcctgcggcaggtgaaggaccccctgtacctggtggatgccttcagcgcctggcaccaggaggagcccaacgtgcacctggtgattgtgggccctgaggtggaccctgtgttcacccgggaggtgaaggccaaggtgaagagagctgctggggtgcggctcatcggggagatgccccaggaggacctgcatgctgtggtgaagaactgctttgctgtggtgaacagctctgtgtctgagggcatgtctgctgccatcctggaggccatggacctggaggtgcctgtgctggccaggaacatccctggaaatgctgctgtggtgaagcatgaggtgacaggcctgctcttcagcaacccccaggagtttgtgcacctggccaagaggctggtgtctgaccctgccctggagaaggagatcgtggtgaatggccgggagtatgtgaggatgtaccacagctggcaggtggagcgggacacctaccagcagctgatcaggaagctggagggcagcacagaggactag

SEQ ID NO: 8365 - DNA, 456 bp, synthetic construct
  misc_feature 1..456: note = source = /note="Description of Artificial Sequence: Synthetic coding sequence"
  source 1..456: mol_type = other DNA
atgaagacagctgtgatgaaggagctgtacagcttcctgcaccaccagaacagatatggcagcgagcaggagtttgtggatgacctgaagaacatgtggtttggcctgtacagcagaggaaatgaggagggggacagcagcggctttgaacatgtgttcagcggggaggtgaagaagggcaaggtgacaggcttccacaactggatccgcttctacctggaggagaaggagggcctggtggactactacagccacatctatgatggccctgtgcctgtgaagccaggccgcatcagcctgagctgcccagacatctacctgggccaggtgcacctgtgggagtggcaggaggtgcaccgccacagcctgcacagcgtcttccacctgattgagctgcgggccaggaagggccacgagggcagctgtgaaacagaggtgctgagcagcctggactag

SEQ ID NO: 8366 - DNA, 363 bp, synthetic construct
  misc_feature 1..363: note = source = /note="Description of Artificial Sequence: Synthetic coding sequence"
  source 1..363: mol_type = other DNA
atgctgccccagtggctgctgctgctcttcctgctcttcttcttcctgttcctgctgacccggggcagcctgagccccaccaagtacaacctgctggagctgaaggagagctgcatccggaaccaggactgtgagaccggctgctgccagagggccccagacaactgtgagagccactgtgccgagaagggcagcgagggcagcctgtgccagacccaggtgttcttcggccagtaccgggcctgcccctgcctgaggaacctgacctgcatctacagcaagaatgagaagtggctgagcatcgcctacggccgctgccagaagattggccggcagaagctggccaagaagatgttcttctag

SEQ ID NO: 8367 - DNA, 951 bp, synthetic construct
  misc_feature 1..951: note = source = /note="Description of Artificial Sequence: Synthetic coding sequence"
  source 1..951: mol_type = other DNA
atggccgaggccgccctggaggccgtgcgctctgagctgcgggagttccctgctgctgcccgggagctgtgtgtgcccctggccgtgccctacctggacaagccacccacccccctgcacttctacagagactgggtgtgccccaaccggccctgcatcatcagaaatgccctgcagcactggccagccctgcagaagtggagcctgccctacttccgggccaccgtgggcagcacagaggtgtctgtggccgtgaccccagatggctatgcagatgctgtgcggggggaccgcttcatgatgcctgctgagcggcggctgcccctgagctttgtgctggatgtgctggagggccgggcccagcaccctggggtgctgtatgtgcagaagcagtgcagcaacctgcccagcgagctgccccagctgctgcctgacctggagagccacgtgccctgggccagcgaggccctgggcaagatgccagatgctgtgaacttctggctgggggaggccgctgctgtgaccagcctgcacaaggaccactatgaaaatctctactgtgtggtgtctggagagaagcacttcctgttccaccccccaagtgaccggcccttcatcccctatgagctgtacaccccagccacctaccagctgacagaggagggcaccttcaaggtggtggatgaggaggccatggagaaggtgccctggatccccctggaccccctggccccagacctggcccgctaccccagctacagccaggcccaggccctgcgctgcaccgtgcgggccggggagatgctgtacctgcctgccctgtggttccaccacgtgcagcagagccagggctgcatcgctgtgaacttctggtatgacatggagtatgacctgaagtacagctacttccagctgctggacagcctgaccaaggccagcggcctggactag

SEQ ID NO: 8368 - DNA, 657 bp, synthetic construct; identical to SEQ ID NO: 7550
  misc_feature 1..657: note = source = /note="Description of Artificial Sequence: Synthetic coding sequence"
  source 1..657: mol_type = other DNA

SEQ ID NO: 8369 - DNA, 909 bp, synthetic construct
  misc_feature 1..909: note = source = /note="Description of Artificial Sequence: Synthetic coding sequence"
  source 1..909: mol_type = other DNA
atggccatgttcctggagtacaacaaggccatccggaactacaccaggtttgatgactggtacctgtgggtgcagatgtacaagggcaccgtgtccatgcctgtgttccagagcctggaggcctactggccaggcctgcagagcctcatcggggacatcgacaatgccatgaggaccttcctgaactactacacagtgtggaagcagtttggaggcctgcctgagttctacaacatcccccagggctacacagtggagaagcgggagggctaccccctgcggcctgagctgattgagagcgccatgtacctgtaccgggccaccggggaccccaccctgctggagctgggcagagatgctgtggagagcattgagaagatcagcaaggtggagtgtggctttgccaccatcaaggacctgcgggaccacaagctggacaacaggatggagagcttcttcctggccgagaccgtgaagtacctgtacctgctgtttgaccccaccaacttcatccacaacaacggcagcacctttgatgctgtgatcaccccctatggagagtgcatcctgggcgctgggggctacatcttcaacacagaggcccaccccatcgaccctgctgccctgcactgctgccagaggctgaaggaggagcagtgggaggtggaggacctgatgagggagttctacagcctgaagaggagccgcagcaagttccagaagaacacagtgagcagcggcccctgggagcccccagcccggcccggcaccctcttcagccctgagaaccacgaccaggcccgggagaggaagccagccaagcagaaggtgcccctgctgagctgccccagccagcccttcaccagcaagctggccctgctgggccaggtgttcctggacagcagctag

SEQ ID NO: 8370 - DNA, 459 bp, synthetic construct
  misc_feature 1..459: note = source = /note="Description of Artificial Sequence: Synthetic coding sequence"
  source 1..459: mol_type = other DNA
atgctggtggatggccccagcgagaggcctgccctgtgcttcctgctgctggccgtggccatgtccttcttcggcagcgccctgagcattgatgagacccgggcccacctgctgctgaaggagaagatgatgaggctgggcggccgcctggtgctgaacaccaaggaggagctggccaatgaaaggctgatgaccctgaagattgctgagatgaaggaggccatgaggaccctcatcttccccccatccatgcacttcttccaggccaagcacctgattgaaagaagccaggtgttcaacatcctgaggatgatgcccaagggagctgccctgcacctgcatgacatcggcatcgtgaccatggactggctggtgagaaatgtgacctaccggccccactgccacatctgcttcaccccccggggcatcatgcagttccgctttgcccaccccacctag

SEQ ID NO: 8371 - DNA, 3951 bp, synthetic construct
  misc_feature 1..3951: note = source = /note="Description of Artificial Sequence: Synthetic coding sequence"
  source 1..3951: mol_type = other DNA
atggagcccaggctcttctgctggaccaccctcttcctgctggccggctggtgcctgcccggcctgccctgccccagccgctgcctgtgcttcaagagcacagtgcgctgcatgcacctgatgctggaccacatcccccaggtgccccagcagaccaccgtgctggacctgcgcttcaaccgcatccgggagatccctggcagcgccttcaagaagctgaagaacctgaacaccctgctgctgaacaacaaccacatcaggaagatcagcagaaatgcctttgagggcctggagaacctgctgtacctgtacctgtacaagaatgagatccacgccctggacaagcagaccttcaagggcctcatcagcctggagcacctgtacatccacttcaaccagctggagatgctgcagcctgagaccttcggggacctgctgcggctggagcggctcttcctgcacaacaacaagctgagcaagatcccagctggcagcttcagcaacctggacagcctgaagaggctgcggctggacagcaatgccctggtgtgtgactgtgacctgatgtggctgggggagctgctgcagggctttgcccagcacggccacacccaggccgccgccacctgtgagtacccccggcggctgcacggccgggctgtggcctctgtgacagtggaggagttcaactgccagagcccccgcatcacctttgagccccaggatgtggaggtgcccagcggcaacacagtgtacttcacctgcagagctgagggcaaccccaagccagagatcatctggatccacaacaaccacagcctggacctggaggatgacacccggctgaatgtgtttgatgatggcaccctgatgatccggaacacccgggagagtgaccagggcgtgtaccagtgcatggccaggaacagcgctggggaggccaagacccagagcgccatgctgcgctacagcagcctgcctgccaagcccagctttgtgatccagccccaggacacagaggtgctgattggcaccagcaccaccctggagtgcatggccaccggccacccccaccccctcatcacctggacccgggacaatggcctggagctggatggcagccgccacgtggccaccagcagcggcctgtacctgcagaacatcacccagagggaccacggccgcttcacctgccacgccaacaacagccacggcaccgtgcaggccgccgccaacatcatcgtgcaggccccaccccagttcaccgtgacccccaaggaccaggtggtgctggaggagcacgctgtggagtggctgtgtgaggctgatggcaaccccccacctgtgattgtgtggaccaagacaggaggccagctgcctgtggagggccagcacacagtgctgagcagcggcaccctgagaattgaccgggccgcccagcacgaccagggccagtatgagtgccaggccgtgagcagcctgggcgtgaagaaggtgtctgtgcagctgactgtgaagcccaaggccctggccgtgttcacccagctgccccaggacacctctgtggaggtgggcaagaacatcaacatcagctgccacgcccagggcgagccccagcccatcatcacctggaacaaggagggcgtgcagatcacagagagcggcaagttccacgtggatgatgagggcaccctgaccatctatgatgctggcttcccagaccagggccgctatgaatgtgtggccagaaattcctttggcctggccgtgaccaacatgttcctgactgtgacagccatccagggccggcaggccggagatgactttgtggagagcagcatcctggatgctgtgcagagggtggacagcgccatcaacagcaccaggaggcacctgttcagccagaagccccacaccagcagtgacctgctggcccagttccactacccccgggaccccctgattgtggagatggcccgggccggggagatctttgagcacaccctgcagctgatccgggagcgggtgaagcagggcctgactgtggacctggagggcaaggagttccgctacaatgacctggtgagccccaggagcctgagcctgattgccaacctgagcggctgcacagcccggcggcccctgcccaactgcagcaaccgctgcttccacgccaagtaccgggcccatgatggcacctgcaacaacctgcagcagcccacctggggcgccgccctgacagcctttgcccggctgctgcagcctgcctacagagatggcatccgggccccccggggcctgggcctgcctgtgggcagccggcagcccctgcccccaccccggctggtggccaccgtgtgggcccgggctgctgctgtgaccccagaccacagctacaccaggatgctgatgcactggggctggttcctggagcatgacctggaccacacagtgcctgccctgagcacagcccgcttcagtgatggccggccctgcagctctgtgtgcaccaatgaccccccctgcttccccatgaacaccaggcatgctgacccccggggcacccacgccccctgcatgctgtttgcccggagcagccctgcctgtgccagcggccggcccagcgccaccgtggacagcgtgtatgcccgggagcagatcaaccagcagacagcctacattgatggcagcaatgtgtatggcagcagcgagcgggagagccaggccctgcgggaccccagcgtgccccggggcctgctgaagacaggcttcccctggcccccatctgggaagcccctgctgcccttcagcacaggccccccaacagaatgtgcccggcaggagcaggagagcccctgcttcctggccggggaccaccgggccaatgagcacctggccctggccgccatgcacaccctgtggttccgggagcacaacaggatggccacagagctgagcgccctgaacccccactgggagggcaacacagtgtaccaggaggccaggaagatcgtgggcgctgagctgcagcacatcacctacagccactggctgcccaaggtgctgggggaccccggcaccaggatgctgcggggctaccggggctacaaccccaacgtgaatgccggcatcatcaacagctttgccacagctgccttccgcttcggccacaccctcatcaaccccatcctgtaccgcctgaatgccaccctgggggagatcagcgagggccacctgcccttccacaaggccctcttcagccccagccgcatcatcaaggagggcggcattgatcctgtgctgcggggcctgtttggagtggccgccaagtggagggcccccagctacctgctgagccctgagctgacccagaggctcttctctgctgcctacagcgctgctgtggacagcgctgccaccatcatccagaggggccgggaccacggcatccccccctacgtggacttccgggtcttctgcaacctgacctctgtgaagaactttgaggacctgcagaatgagatcaaggacagcgagatccggcagaagctgaggaagctgtatggcagccctggggacatcgacctgtggccagccctgatggtggaggacctgatccctggcaccagggtgggccccaccctgatgtgcctgtttgtgacccagttccagaggctgagagatggagaccgcttctggtatgaaaatcctggggtcttcaccccagcccagctgacccagctgaagcaggccagcctgagccgggtgctgtgtgacaacggggacagcatccagcaggtgcaggctgatgtgtttgtgaaggccgagtacccccaggactacctgaactgcagcgagatccccaaggtggacctgcgggtgtggcaggactgctgtgccgacaagcaggccggcggcaccccagaggccggccgggtgtaccgctgctag

SEQ ID NO: 8372 - DNA, 891 bp, synthetic construct
  misc_feature 1..891: note = source = /note="Description of Artificial Sequence: Synthetic coding sequence"
  source 1..891: mol_type = other DNA
atggaccccagcaagatcgcccacacagagtaccctgtgaacaccatcatcatccacgaggactttgacaacaacagcatgagcaacaacatcgccctgctgaagacagacacagccatgcacttcggcaacctggtgcagagcatctgcttcctgggccgcatgctgcacaccccacctgtgctgcagaactgctgggtgtctggctggaaccccaccagcgccaccggcaaccacatgaccatgtctgtgctgaggaagatctttgtgaaggacctggacatgtgccccctgtacaagctgcagaagacagaatgtggcagccacaccaaggaggagaccaagacagcctgcctgggggaccccggcagccccatgatgtgccagctgcagcagtttgacctgtgggtgctgcggggcgtgctgaactttggaggagagacctgccccggcctcttcctgtacaccaaggtggaggactacagcaagtggatcaccagcaaggccgagcgggccggcccccccctgagcagcctgcaccactgggagaagctgatctccttcagccaccacggccccaatgccaccatgacccagaagacctacagcgacagcgagctgggccacgtgggcagctacctgcagggccagaggaggaccatcacccacagccggctgggcaacagcagccgggacagcctggatgtgcgggagaaggatgtgaaggagagcggccgcagccctgaggcctctgtgcagcccctgtactatgactactacggcggggaggtgggggagggccgcatctttgctggccagaaccggctgtaccagcctgaggagatcatcctggtgtcctttgtgctggtgttcttctgcagcagcatctag

SEQ ID NO: 8373 - DNA, 2808 bp, synthetic construct
  misc_feature 1..2808: note = source = /note="Description of Artificial Sequence: Synthetic coding sequence"
  source 1..2808: mol_type = other DNA
atgaggaagcccaggaggaagagccggcagaatgctgagggcagaagaagccccagcccctacagcctgaagtgcagccccacccgggagaccctgacctacgcccaggcccagagaattgtggaggtggacattgatggccgcctgcaccgcatcagcatctatgaccccctgaagatcatcacagaagatgagctgacagcccaggacatcacagagtgcaacagcaacaaggaaaattctgagcagccccagtttcctgggaagagcaagaagcccagcagcaagggcaagaagaaggagagctgcagcaagcacgccagcggcaccagcttccacctgccccagcccagcttcaggatggtggacagcggcatccagcctgaggccccacccctgcctgctgcctactaccgctacatcgagaagcccccagaggacctggatgctgaggtggagtatgacatggatgaggaggacctggcctggctggacatggtgaatgagaagagaagagtggatggccacagcctggtgtctgctgacacctttgagctgctggtggaccggctggagaaggagagctacctggagagccgcagcagcggggcccagcagagcctgattgatgaagatgccttctgctgcgtgtgcctggatgatgagtgccacaacagcaatgtcatcctcttctgtgacatctgcaacctggccgtgcaccaggagtgctacggcgtgccctacatccctgagggccagtggctgtgccgctgctgcctgcagagccccagcaggcctgtggactgcatcctgtgccccaacaagggcggggccttcaagcagaccagtgatggccactgggcccacgtggtgtgtgccatctggatccctgaggtgtgctttgccaacacagtgttcctggagcccatcgagggcatcgacaacatccccccagcccgctggaagctgacctgctacatctgcaagcagaagggcctgggcgccgccatccagtgccacaaggtgaactgctacacagccttccacgtgacctgtgcccagagagctggcctcttcatgaagattgagcccatgagggagaccagcctgaatggcaccatcttcaccgtgaggaagacagcctactgtgaggcccacagccccccaggagctgccacagcccggaggaaaggagacagccccaggagcatcagcgagactggagatgaggagggcctgaaggagggagatggagaggaggaggaggaggaggaggtggaggaggaggagcaggaggcccagggcggcgtgtctggcagcctgaagggcgtgcccaagaagagcaagatgagcctgaagcagaagatcaagaaggagcctgaggaggccggccaggacacccccagcaccctgcccatgctggccgtgccccagatccccagctaccgcctgaacaagatctgcagcggcctgtccttccagaggaagaaccagttcatgcagaggctgcacaactactggctgctgaagaggcaggccagaaatggagtgcccctcatccggcggctgcacagccacctgcagagccagagaaatgctgagcagcgggagcaggatgagaagaccagcgctgtgaaggaggagctgaagtactggcagaagctgcggcatgacctggagcgggcccggctgctgattgagctgatcaggaagcgggagaagctgaagcgggagcaggtgaaggtgcagcaggccgccatggagctggagctgatgcccttcaacgtgctgctgcggaccaccctggacctgctgcaggagaaggaccctgcccacatctttgctgagcctgtgaacctgtctgaggtgcctgactacctggagttcatcagcaagcccatggacttcagcaccatgaggaggaagctggagagccacctgtaccgcaccctggaggagtttgaggaggacttcaacctgattgtgaccaactgcatgaagtacaatgccaaggacaccatcttccacagagctgctgtgcggctgcgggacctgggcggggccatcctgcggcatgcccggcggcaggccgagaacatcggctatgaccctgagcggggcacccacctgcctgagagccccaagctggaggacttctaccgcttctcctgggaggatggcatgaccaacggctttgggaagcacacagagagcggcagtgacagtgaatgttccctgggcctgagcggcggcctggcctttgaggcctgcagcggcctgaccccacccaagaggagccggggcaagccagccctgagccgggtgcccttcctggagggcgtgaatggagacagcgactacaacggcagcggccgcagcctgctgctgccctttgaagatagaggagacctggagcccctggagctggtgtgggccaagtgccggggctaccccagctacccagccctgatcatcgaccccaagatgccccgggagggcctgctgcacaatggagtgcccatccctgtgccccccctggatgtgctgaagctgggggagcagaagcaggccgaggccggggagaagctgttcctggtgctcttctttgacaacaagaggacctggcagtggctgccccgggacaaggtgctgcccctgggcgtggaggacacagtggacaagctgaagatgctggagggcaggaagaccagcatcaggaagtctgtgcaggtggcctatgaccgggccatgatccacctgagccgggtgcggggcccccacagctttgtgaccagcagctacctgtag

SEQ ID NO: 8374 - DNA, 270 bp, synthetic construct
  misc_feature 1..270: note = source = /note="Description of Artificial Sequence: Synthetic coding sequence"
  source 1..270: mol_type = other DNA
atgaagacaggcctcttcttcctgtgcctgctgggcacagctgctgccatccccaccaatgcccggctgctgagtgaccacagcaagcccacagctgagaccgtggccccagacaacacagccatccccagcctgcgggcagaggccgaggagaatgagaaggagacagctgtgtccacagaagatgacagccaccacaaggccgagaagagctctgtgctgaagagcaaggaggagagccatgagcagagcgctgagcagggcaagtag

SEQ ID NO: 8375 - DNA, 657 bp, synthetic construct; identical to SEQ ID NO: 7550
  misc_feature 1..657: note = source = /note="Description of Artificial Sequence: Synthetic coding sequence"
  source 1..657: mol_type = other DNA

SEQ ID NO: 8376 - DNA, 540 bp, synthetic construct
  misc_feature 1..540: note = source = /note="Description of Artificial Sequence: Synthetic coding sequence"
  source 1..540: mol_type = other DNA
atgagcctgggccctgaggtgttcctgggccccccagaggcccagagcttcctgagcagccacacccgcatcccccgggccaaccactgggacctggagctgctgaccccaggcaacctggagagagaatgtctggaggagcgctgctcctgggaggaggcccgggagtactttgaggacaacaccctgacagagcgcttctgggagagctacatctacaacgggaagggcggccggggccgggtggatgtggccagcctggccgtgggcctgaccggcggcatcctgctgattgtgctggccggcctgggcgccttctggtacctgcgctggaggcagcaccggggccagcagccctgcccccaggaggccggcctcatcagccccctgagccccctgaaccccctgggcccccccacccccctgcccccacctcctcctcctcctcctggcctgcccacctatgagcaggccctggccgccagcggcgtgcatgatgcccctcctccaccctacaccagcctgcggcggccccactag

SEQ ID NO: 8377 - DNA, 765 bp, synthetic construct
  misc_feature 1..765: note = source = /note="Description of Artificial Sequence: Synthetic coding sequence"
  source 1..765: mol_type = other DNA
atgaccctggaggacatcgtgcagcgggaggtgtggggcaccgtggtggcccggggggccccagcccctcctggccctgtgcccaccaggggggccgccagccggcggctgtctgtgtccccagccagcaccagcgagaccagcctgtaccaggtgctgctgggcgcccggcagctggtgcagcccggcccccacgccatgtatgcccgggtgcggcaggtggagagcaaccccctgtaccagggcacagccagcagcgcagatgtggccctggtggagctggaggcccctgtgcccttcaccaactacatcctgcctgtgtgcctgcctgaccccagcgtcatctttgagaccggcatgaactgctgggtgacaggctggggcagccccagcgaggaggacctgctgcctgagccccgcatcctgcagaagctggccgtgcccatcatcgacacccccaagtgcaacctgctgtacagcaaggacacagaatttggctaccagcccaagaccatcaagaatgacatgctgtgtgccggctttgaggagggcaagaaggatgcctgcaagggggacagcggcggccccctggtgtgcctggtgggccagagctggctgcaggccggggtcatctcctggggcgagggctgtgcccggcagaacagacctggggtgtacatccgggtgacagcccaccacaactggatccaccgcatcatccccaagctgcagttccagcctgcccggctgggcggccagaagtag

SEQ ID NO: 8378 - DNA, 1899 bp, synthetic construct
  misc_feature 1..1899: note = source = /note="Description of Artificial Sequence: Synthetic coding sequence"
  source 1..1899: mol_type = other DNA
atgaccccacctgtgctgaccacagctgagacctctgtgaagcccagcgtgtctgccttcacccacagccccccagagaacaccaccggcatcagcagcaccatctccttccacagcaggaccctgaacctgacagatgtgattgaggagctggcccaggccagcacccagaccctgaagagcaccatcgccagcgagaccaccctgagcagcaagagccaccagagcaccaccaccaggaaggccatcatccgccacagcaccatcccccccttcctgagcagcagcgccaccctgatgcctgtgcccatcagcccccccttcacccagagagctgtgacagacaacgtggccacccccatcagcggcctgatgaccaacacagtggtgaagctgcacgagagcagccgccacaatgccaagccccagcagctggtggccgaggtggccaccagccccaaggtgcaccccaatgccaagttcaccatcggcaccacccacttcatctacagcaacctgctgcacagcacccccatgcctgccctgaccaccgtgaagagccagaacagcaagctgacccccagcccctgggccgagaaccagttctggcacaagccctacagcgagattgctgagaagggcaagaagccagaggtgtccatgctggccaccaccggcctgtctgaggccaccaccctggtgtctgactgggatggccagaagaacaccaagaagagtgactttgacaagaagcctgtgcaggaggccaccaccagcaagctgctgccctttgacagcctgagccgctacatctttgagaagcccagaattgtgggcggcaaggccgccagcttcaccatcccagccaacagtgatgccttcctgccctgtgaggccgtgggcaaccccctgcccaccatccactggaccagggtgcccagcggcctggacctgagcaagaggaagcagaacagccgggtgcaggtgctgcccaacggcaccctgagcatccagagggtggagatccaggaccggggccagtacctgtgcagcgccagcaacctgtttggaacagaccacctgcacgtgaccctgtctgtggtgtcctacccaccccgcatcctggagaggaggaccaaggagatcaccgtgcacagcggcagcacagtggagctgaagtgcagagctgagggccggcccagccccaccgtgacctggatcctggccaaccagacagtggtgtctgagagcagccagggcagccggcaggccgtggtgacagtggatggcaccctggtgctgcacaacctgagcatctatgaccggggcttctacaagtgtgtggccagcaaccctgggggccaggacagcctgctggtgaagatccaggtgattgctgcccctcctgtgatcctggagcagaggcggcaggtgattgtgggcacctggggcgagagcctgaagctgccctgcacagccaagggcaccccccagcccagcgtgtactgggtgctgagtgatggaacagaggtgaagcccctgcagttcaccaacagcaagctgttcctgttcagcaatggcaccctgtacatccggaacctggccagcagtgaccggggcacctatgaatgtattgccaccagcagcacaggcagcgagcggcgggtggtgatgctgaccatggaggagcgggtgaccagcccccgcatcgaggccgccagccagaagaggacagaggtgaactttggagacaagctgctgctgaactgcagcgccactggagagcccaagccccagatcatgtggaggctgcccagcaaggctgtggtggaccagcagcaccgggtggccgccggcagcaccagcaccctgatggacccctgcctgctggaccagtag

SEQ ID NO: 8379 - DNA, 681 bp, synthetic construct
  misc_feature 1..681: note = source = /note="Description of Artificial Sequence: Synthetic coding sequence"
  source 1..681: mol_type = other DNA
atggacatcatcgtgctgctgcccaagggccactgcaccaagatccaggagctgcagatgaccaccgtgctgaagcagaatgtgcacgtgtttggagtggagggcaacagtgatgagctggatgagcccatcaagacagtgtttgctgatgtggcctttgtgaagaagcacaacctgatgagcctgaacagcatcaactggagccgggtgctggtgcagatggcccaccacttctttgcctacttccagtgcacccccagcctggacacccaccccctgcccctggtggaggtggtggtgcccaccggggctgctggcaacctggccgccggctacatcgcccagaagattggcctgcccatccggctggtggtggccgtgaacagaaatgacatcatccacaggacagtgcagcagggcgacttcagcctgtctgaggccgtgaagagcaccctggccagcgccatggacatccaggtgccctacaacatggagagggtcttctggctgctgagcggcagtgacagccaggtgacccgggccctgatggagcagtttgagaggacccagagcgtgaacctgcccaaggagctgcacagcaagcacagccctgtgctgccccggccctgcctgtgcagccaggtgcccggcagctgccccggctgctggccagacccctag

SEQ ID NO: 8380 - DNA, 729 bp, synthetic construct
  misc_feature 1..729: note = source = /note="Description of Artificial Sequence: Synthetic coding sequence"
  source 1..729: mol_type = other DNA
atgttccagacaggaggcctcatcgtgttctacggcctgctggcccagaccctgcccctgaatgtgaacccagccctgcccctgagccccaccggcctggccggcagcctgaccaatgccctgagcaatggcctgctgagcggcggcctgctgggcatcctggagaacctgcccctgctggacatcctgaagccaggcggcggcaccagcggcggcctgctgggcggcctgctgggcaaggtgaccagcgtcatccctggcctgaacaacatcatcgacatcaaggtgacagacccccagctgctggagctgggcctggtgcagagcccagatggccaccggctgtatgtgaccatccccctgggcatcaagctgcaggtgaacacccccctggtgggcgccagcctgctgcggctggccgtgaagctggacatcacagctgagatcctggccgtgcgggacaagcaggagcgcatccacctggtgctgggggactgcacccacagccctggcagcctgcagatcagcctgctggatggcctgggccccctgcccatccagggcctgctggacagcctgaccggcatcctgaacaaggtgctgcctgagctggtgcagggcaatgtgtgccccctggtgaatgaggtgctgcggggcctggacatcaccctggtgcatgacatcgtgaacatgctgatccacggcctgcagtttgtgatcaaggtgtag

SEQ ID NO: 8381 - DNA, 1422 bp, synthetic construct
  misc_feature 1..1422: note = source = /note="Description of Artificial Sequence: Synthetic coding sequence"
  source 1..1422: mol_type = other DNA
atgagcctggaggccagcctgtgcagcctggaggagtgtgccgccttccagcccagcagccccagccccctgcagccccagggccctgtgaagagcaacaacatcgtgacagtgacaggcatcagcctgtgcctcttcatcatcatcgccaccgtgctgatcaccctgtggaggcgcttcggccgcccagccaagtgcagcaccccagcccggcacaacagcatccacagccccagcttcaggaagaacagtgatgaggagaacatctgtgagctgtctgagcagaggggcagcttcagtgatggaggagatggccccaccggcagccctggggacaccggcatccccctgacctaccgccgcagcggccctgtgcccccagaagatgatgccagcggcagcgagagcttccagagcaatgcccagaagatcatccccccactcttctcctaccgcctggcccagcagcagctgaaggagatgaagaagaagggcctgacagagaccaccaaggtgtaccacgtgtcccagagccccctgacagacacagccattgatgctgcccccagcgcccccctggacctggagagccctgaggaggccgccgccaacaagttccgcatcaagagccccttccctgagcagcctgctgtgtctgctggggagcggccccccagccggctggacctgaatgtgacccaggccagctgtgccatcagccccagccagaccctcatcaggaagagccaggcccggcacgtgggcagccggggcggccccagcgagaggagccacgccagaaatgcccacttccggaggacagccagcttccacgaggcccggcaggcccggcccttccgggagaggtccatgagcaccctgaccccccggcaggccccagcctacagcagcaggaccaggacctgtgagcaggctgaagatcgcttccggccccagagcagaggagcccacctgtttcctgagaagctggagcacttccaggaggccagcggcacccggggccccctgaaccccctgcccaagagctacaccctgggccagcccctgaggaagccagacctgggggaccaccaggccggcctggtggccggcatcgagaggacagagccccaccgggcccggcggggccccagccccagccacaagtctgtgtccaggaagcagagcagccccatcagccccaaggacaactaccagagggtgagcagcctgagccccagccagtgcaggaaggacaagtgccagagcttccccacccaccctgagtttgccttctatgacaacaccagctttggcctgacagaagctgagcagaggatgctggacctgcccggctacttcggcagcaatgaagaagatgagaccaccagcaccctgtctgtggagaagctggtgatctag

SEQ ID NO: 8382 - DNA, 2310 bp, synthetic construct
  misc_feature 1..2310: note = source = /note="Description of Artificial Sequence: Synthetic coding sequence"
  source 1..2310: mol_type = other DNA
atgctgagcaagaagggcatcttcccctggatcctgacctgcatcagcgaggagatggccttccgcaccatctgtgtgctggtgggcgtcttcatctgcagcatctgtgtgaagggcagcagccagccccaggcccgggtgtacctgacctttgatgagctgcgggagaccaagaccagcgagtacttcagcctgagccaccaccccctggactaccgcatcctgctgatggatgaggaccaggaccgcatctacgtgggcagcaaggaccacatcctgagcctgaacatcaacaacatcagccaggaggccctgagcgtcttctggccagccagcaccatcaaggtggaggagtgcaagatggccggcaaggaccccacccacggctgcggcaactttgtgcgggtcatccagaccttcaacagaacccacctgtatgtgtgtggcagcggggccttcagccctgtgtgcacctacctgaacagaggccgccgctctgaggaccaggtgttcatgattgacagcaaatgtgagagcggcaagggccgctgcagcttcaaccccaacgtgaacacagtgtctgtgatgatcaatgaggagctgttcagcggcatgtacatcgacttcatgggcacagatgctgccatcttccgcagcctgaccaagagaaatgctgtgaggacagaccagcacaacagcaagtggctgtctgagcccatgtttgtggatgcccacgtgatcccagatggaacagaccccaatgatgccaaggtgtacttcttcttcaaggagaagctgacagacaacaacagaagcaccaagcagatccacagcatgattgcccgcatctgccccaatgacaccggcggcctgcggagcctggtgaacaagtggaccaccttcctgaaggcccggctggtgtgcagcgtgacagatgaagatggccctgagacccactttgatgagctggaggatgtgttcctgctggagacagacaaccccaggaccaccctggtgtatggcatcttcaccaccagcagcagcgtcttcaagggcagcgctgtgtgtgtgtaccacctgagtgacatccagacagtgttcaacggcccctttgcccacaaggagggccccaaccaccagctgatctcctaccagggccgcatcccctaccccaggcctggcacctgccctggaggagccttcacccccaacatgaggaccaccaaggagttcccagatgatgtggtgaccttcatccggaaccaccccctgatgtacaacagcatctaccccatccacaagaggcccctcatcgtgagaattggaacagactacaagtacaccaagattgctgtggacagagtgaatgctgctgatggccgctaccacgtgctcttcctgggcacagaccggggcaccgtgcagaaggtggtggtgctgcccaccaacaacagcgtgtctggagagctgatcctggaggagctggaggtgttcaagaaccacgcccccatcaccaccatgaagatcagcagcaagaagcagcagctgtatgtgagcagcaatgaaggagtgtcccaggtgtccctgcaccgctgccacatctatggaacagcctgtgccgactgctgcctggcccgggacccctactgtgcctgggatggccacagctgcagccgcttctaccccaccgggaagaggaggagccggcggcaggatgtgagacatggcaaccccctgacccagtgccggggcttcaacctgaaggcctacagaaatgctgctgagatcgtgcagtatggagtgaagaacaacaccaccttcctggagtgtgcccccaagagcccccaggccagcatcaagtggctgctgcagaaggacaaggacaggaggaaggaggtgaagctgaatgaaagaatcatcgccaccagccagggcctgctgatccgctctgtgcagggcagtgaccagggcctgtaccactgcatcgccacagaaaattccttcaagcagaccatcgccaagatcaacttcaaggtgctggacagcgagatggtggccgtggtgacagacaagtggagcccctggacctgggccagctctgtgcgggccctgcccttccaccccaaggacatcatgggcgccttcagccacagcgagatgcagatgatcaaccagtactgcaaggacacccggcagcagcaccagcagggagatgagagccagaagatgagaggagactatggcaagctgaaggccctgatcaacagcaggaagagcaggaacagaagaaaccagctgcctgagagctag

SEQ ID NO: 8383 - DNA, 942 bp, synthetic construct
  misc_feature 1..942: note = source = /note="Description of Artificial Sequence: Synthetic coding sequence"
  source 1..942: mol_type = other DNA
atgcctggctggctgaccctgcccaccctgtgccgcttcctgctgtgggccttcaccatcttccacaaggcccagggcgaccctgccagccaccctggcaccaccccacccagctacaaggtgcgctggagcaaggtggagcccggggagctgcgggagaccctcatcctgatcaccaacggcctgcacgcccggggctacggccccctgggcggccgggccaggatgagaagaggccaccggctggatgccagcctggtgattgctggggtgcggctggaggatgagggccgctaccgctgtgagctgatcaatggaattgaagatgaatctgtggccctgaccctgagcctggagggcgtggtgttcccctaccagcccagccggggccgctaccagttcaactactatgaggccaagcaggcctgtgaggagcaggacggccgcctggccacctacagccagctgtaccaggcctggacagagggcctggactggtgcaatgccggctggctgctggagggctctgtgcgctaccctgtgctgacagcccgggccccctgtggcggccggggccggcccggcatccgctcctatggcccccgggacaggatgagggacagatatgatgccttctgcttcaccagcgccctggccggccaggtgttctttgtgcccggccgcctgaccctgtctgaggcccacgccgcctgcagaagaagaggagctgtggtggccaaggtgggccacctgtatgctgcctggaagttcagcggcctggaccagtgtgatggcggctggctggctgatggctctgtgcgcttccccatcaccaccccccggccccgctgtggcggcctgcctgaccccggggtgcgcagctttggcttcccccggccccagcaggccgcctacggcacctactgctacgccgagaactag

SEQ ID NO: 8384 - DNA, 1089 bp, synthetic construct
  misc_feature 1..1089: note = source = /note="Description of Artificial Sequence: Synthetic coding sequence"
  source 1..1089: mol_type = other DNA
atggcctggacctttgagtgcagcaggaccaccagccctgagcccctgagcaccagcccctgcaggaccaccagcagcaggaacagccccaccatgagctgcccagcctctgtggcctgtgagcccagcaccagcaccaccaccagcagcccccccaaggcctgcctgacccggcccagcagccccagccccagctgcagcaccagcgcctggcacaacaagaacaacctgatcagcaaggtgcccaggggggccctgagccggcagacccagctgcgggagctgtacctgcagcacaaccagctgacagattctggcctggatgccaccaccttcagcaagctgcacagcctggagtacctggacctgagccacaaccagctgaccaccgtgcctgctggcctgcccaggaccctggccatcctgcacctgggcaggaaccgcatccggcaggtggaggccgcccggctgcacggggcccggggcctgcgctacctgctgctgcagcacaaccagctgggcagcagcggcctgcctgctggggccctgcggcccctgcggggcctgcacaccctgcacctgtatggaaatggcctggacagagtgcccccagccctgccccggcggctgcgggccctggtgctgccccacaaccacgtggccgccctgggcgcccgggacctggtggccaccccaggcctgacagagctgaacctggcctacaaccggctggccagcgcccgggtgcaccaccgggccttccggcggctgcgggccctgcggagcctggacctggccggcaaccagctgacccggctgcccatgggcctgcccaccggcctgcggaccctgcagctgcagaggaaccagctgaggatgctggagcctgagcccctggccggcctggaccagctgcgggagctgagcctggcccacaaccggctgcgggtgggggacatcggccctggcacctggcatgagctgcaggccctgcaggtgcgccaccggctggtgagccacacagtgccccgggccccacccagcccctgcctgccctgccacgtgcccaacatcctggtgtcctggtag

SEQ ID NO: 8385 - DNA, 900 bp, synthetic construct
  misc_feature 1..900: note = source = /note="Description of Artificial Sequence: Synthetic coding sequence"
  source 1..900: mol_type = other DNA
atgctgcaccctgagaccagccctggccggggccacctgctggccgtgctgctggccctgctgggcacagcctgggccgaggtgtggccaccccagctgcaggagcaggcccccatggccggggccctgaacaggaaggagagcttcctgctgctgagcctgcacaaccggctgcgctcctgggtgcagcccccagctgctgacatgaggcggctggactggagcgacagcctggcccagctggcccagggcagccccctgtggaaccccaaccctgagcccggggtgcggcctgtggcccacccagccagcggcctggagcacgccgccgccccccgggcctggtgccccctgagcaagtggagcctgtggtttgctgagggccagcgctacagccacgccgctggagaatgtgccagaaatgccacctgcacccactacacccagctggtgtgggccaccagcagccagctgggctgcggccgccacctgtgcagcgctggccaggccgccatcgaggcctttgtgtgtgcctacagcccccggggcaactgggaggtgaatggcaagaccatcgtgccctacaagaagggggcctggtgcagcctgtgcacagcctctgtgtctggctgcttcaaggcctgggaccacgccggcggcctgtgtgaggtgcccaggaacccctgcaggatgagctgccagaaccacggccgcctgaacatcagcacctgccactgccactgccccccaggctacacaggccgctactgccaggtgcgctgcagcctgcagtgtgtgcacggccgcttccgggaggaggagtgcagctgtgtgtgtgacatcggctatgagcccagcgtgcccccacgctgcatcttccccagcacccctgtgacctag

SEQ ID NO: 8386 - DNA, 1047 bp, synthetic construct
  misc_feature 1..1047: note = source = /note="Description of Artificial Sequence: Synthetic coding sequence"
  source 1..1047: mol_type = other DNA
atgctggacaccaacctgatcctgctgcccctcttccagttcatcgtgcccaaggagtggaacagcaagtacagacctgtgtgcatccacctggccggcaccggggaccaccactactggaggaggaggaccctgatggcccggcccatgatcaaggaggccaggatggccagcctgctgctggagaacccctactacggctgcaggaagcccaaggaccaggtgcgcagcagcctgaagaatgtgtctgacctgtttgtgatgggcggggccctggtgctggagagcgctgccctgctgcactggctggagcgggagggctacggccccctgggcatgacaggcatctccatgggcggccacatggccagcctggccgtgagcaactggcccaagcccatgcccctcatcccctgcctgtcctggagcacagccagcggggtcttcaccaccacagacagcttcaagatgggccaggagtttgtgaagcacttcaccagcagcgctgacaagctgaccaacctgaacctggtgtccaggaccctgaacctggacatcagcaaccaggtggtgtcccagaagccagctgactgccacaacagcagcaagacctctgtgtctgccaccagcgagggcctgctgctgcaggacaccagcaagatgaagcgcttcaaccagaccctgagcaccaacaagagcggctacaccagcaggaacccccagagctaccacctgctgagcaaggagcagagcaggaacagcctgaggaaggagagcctcatcttcatgaagggcgtgatggatgaatgtacccacgtggccaacttctctgtgcctgtggaccccagcctcatcatcgtggtgcaggccaaggaggatgcctacatccccaggactggagtgcgcagcctgcaggagatctggccaggctgtgagatccgctacctggagggcggccacatcagcgcctacctgttcaagcagggcctcttccggcaggccatctatgatgcctttgaccgcttcctgcacaagtatgccaactag

SEQ ID NO: 8387 - DNA, 1044 bp, synthetic construct
  misc_feature 1..1044: note = source = /note="Description of Artificial Sequence: Synthetic coding sequence"
  source 1..1044: mol_type = other DNA
atgagggcctgcatcagcctggtgctggccgtgctgtgtggcctggcctgggccgacctgtacagcgcccccaccagctgccagggccgctgctatgaggcctttgacaagcaccaccagtgccactgcaatgcccgctgccaggagtttggaaactgctgcaaggactttgagagcctgtgcagcgaccacgaggtgagccacagcagtgatgccatcaccaaggaggagatccagagcatcagcgagaagatctacagagctgacaccaacaaggcccagaaggaggacatcgtgctgaacagccagaactgcatcagccccagcgagaccaggaaccaggtggaccgctgccccaagcccctcttcacctacgtgaatgagaagctgttcagcaagcccacctatgctgccttcatcaacctgctgaacaactaccagagggccaccggccacggggagcacttcagcgcccaggagctggccgagcaggatgccttcctgcgggagatcatgaagacagctgtgatgaaggagctgtacagcttcctgcaccaccagaacagatatggcagcgagcaggagtttgtggatgacctgaagaacatgtggtttggcctgtacagcagaggaaatgaggagggggacagcagcggctttgagcacgtgttttctggagaggtgaagaagggcaaggtgacaggcttccacaactggatccgcttctacctggaggagaaggagggcctggtggactactacagccacatctatgatggcccctgggacagctacccagatgtgctggccatgcagttcaactgggatggctactacaaggaggtgggcagcgccttcatcggcagcagccctgagtttgaatttgccctgtacagcctgtgcttcatcgcccggcctgggaaggtgtgccagctgagcctgggcggctaccccctggccgtgaggacctacacctgggacaagagcacctatggaaatggcaagaagtacatcgccacagcctacatcgtgagcagcacctag

SEQ ID NO: 8388 - DNA, 864 bp, synthetic construct
  misc_feature 1..864: note = source = /note="Description of Artificial Sequence: Synthetic coding sequence"
  source 1..864: mol_type = other DNA
atgctgaagaagatctctgtgggcgtggccggggacctgaacacagtgaccatgaagctgggctgtgtgctgatggcctgggccctgtacctgagcctgggcgtgctgtgggtggcccagatgctgctggccgccagctttgagaccctgcagtgtgagggccctgtgtgcacagaggagagcagctgccacacagaagatgacctgacagatgcccgggaggccggcttccaggtgaaggcctacaccttcagcgagcccttccacctgattgtgtcctatgagctgtttcctgcccccatcctgcgggctgtgcccagcgctgagccccaggccggcagccccatgaccctgagctgccagaccaagctgcccctgcagaggtctgctgcccggctgctcttctccttctacaaggatggaagaattgtgcagagccggggcctgagcagcgagttccagatccccacagccagcgaggaccacagcggcagctactggtgtgaggccgccacagaggacaaccaggtgtggaagcagagcccccagctggagatccgggtgcagggcgccagcagcagcgctgccccacccaccctgaacccagccccccagaagtctgctgcccctggaacagcccctgaggaggcccctggccccctgcccccaccacccacccccagcagcgaggaccccggcttcagcagccccctgggcatgccagacccccacctgtaccaccagatgggcctgctgctgaagcacatgcaggatgtgcgggtgctgctgggccacctgctgatggagctgcgggagctgagcggccacaggaagccaggcaccaccaaggccacagctgagtag

SEQ ID NO: 8389 - DNA, 1815 bp, synthetic construct; identical to SEQ ID NO: 6847
  misc_feature 1..1815: note = source = /note="Description of Artificial Sequence: Synthetic coding sequence"
  source 1..1815: mol_type = other DNA

SEQ ID NO: 8390 - DNA, 1005 bp, synthetic construct
  misc_feature 1..1005: note = source = /note="Description of Artificial Sequence: Synthetic coding sequence"
  source 1..1005: mol_type = other DNA
atgaggtctgctgggggccgcggggagatcaaggtgagaagagagctgcagcccagcaagcaggtgtctggcctgaccaaccacgccaggacaggccaggagaagaggaacctgcagaggctggtgctggagacccccagccagaacatcttcttcagccctgtgtctgtgtccaccagcctggccatgctgagcctgggcgcccacagcgtgaccaagacccagatcctgcagggcctgggcttcaacctgacccacaccccagagagcgccatccaccagggcttccagcacctggtgcacagcctgactgtgcccagcaaggacctgaccctgaagatgggcagcgccctgtttgtgaagaaggagctgcagctgcaggccaacttcctgggcaatgtgaagaggctgtatgaggccgaggtgttcagcacagacttcagcaaccccagcatcgcccaggcccgcatcaacagccacgtgaagaagaagacccagggcaaggtggtggacatcatccagggcctggacctgctgacagccatggtgctggtgaaccacatcttcttcaaggccaagtgggagaagcccttccaccctgagtacaccaggaagaacttccccttcctggtgggggagcaggtgacagtgcacgtgcccatgatgcaccagaaggagcagtttgccttcggcgtggacacagagctgaactgctttgtgctgcagatggactacaagggagatgctgtggccttctttgtgctgcccagcaagggcaagatgaggcagctggagcaggccctgagcgcccggaccctgaggaagtggagccacagcctgcagaagcgctggattgaggtgttcatcccccgcttcagcatcagcgccagctacaacctggagaccatcctgcccaagatgggcatccagaatgtgtttgacaagaatgctgacttcagcggcatcgccaagagggacagcctgcaggtgtccaaggtgtcctag

SEQ ID NO: 8391 - DNA, 1065 bp, synthetic construct
  misc_feature 1..1065: note = source = /note="Description of Artificial Sequence: Synthetic coding sequence"
  source 1..1065: mol_type = other DNA
atggccccagcccggcggcctgctggggcccggctgctgctggtgtatgccggcctgctggccgctgctgctgctggcctgggcagccctgagcccggggcccccagccgcagccgggcccggcgggagcccccacctggaaatgagctgccccggggccctggagagagcagagctggccctgctgcccggcccccagagcccacagctgagcgggcccacagcgtggaccccagagatgcctggatgctgtttgtgcggcagagcgacaagggcgtgaatggcaagaagaggagccggggcaaggccaagaagctgaagtttggcctgcccggccccccaggccccccaggcccccagggccccccaggccccatcatccccccagaggccctgctgaaggagttccagctgctgctgaagggagctgtgcggcagcgggagcgggcagagcctgagccctgcacctgtggccctgctggccctgtggccgccagcctggcccctgtgtctgccacagctggggaggatgatgatgatgtggtgggagatgtgctggccctgctggccgcccccctggcccctggcccccgggccccccgggtggaggccgccttcctgtgccgcctgcggagagatgccctggtggagcggcgggccctgcacgagctgggcgtgtactacctgcctgatgctgagggcgccttcagaagaggccctggcctgaacctgaccagcggccagtaccgggcccctgtggccggcttctacgccctggccgccaccctgcacgtggccctgggggagcccccccggcggggccccccccggccccgggaccacctgcggctgctgatctgcatccagagccgctgccagagaaatgccagcctggaggccatcatgggcctggagagcagcagcgagctgttcaccatctctgtgaatggagtgctgtacctgcagatgggccagtggaccagcgtcttcctggacaatgccagcggctgcagcctgactgtgcgcagcggcagccacttctctgctgtgctgctgggcgtgtag

SEQ ID NO: 8392 - DNA, 2685 bp, synthetic construct; identical to SEQ ID NO: 8214
  misc_feature 1..2685: note = source = /note="Description of Artificial Sequence: Synthetic coding sequence"
  source 1..2685: mol_type = other DNA

SEQ ID NO: 8393 - DNA, 2685 bp, synthetic construct; identical to SEQ ID NO: 8214
  misc_feature 1..2685: note = source = /note="Description of Artificial Sequence: Synthetic coding sequence"
  source 1..2685: mol_type = other DNA

SEQ ID NO: 8394 - DNA, 2886 bp, synthetic construct; identical to SEQ ID NO: 7526
  misc_feature 1..2886: note = source = /note="Description of Artificial Sequence: Synthetic coding sequence"
  source 1..2886: mol_type = other DNA

SEQ ID NO: 8395 - DNA, 2559 bp, synthetic construct; identical to SEQ ID NO: 7494
  misc_feature 1..2559: note = source = /note="Description of Artificial Sequence: Synthetic coding sequence"
  source 1..2559: mol_type = other DNA

SEQ ID NO: 8396 - DNA, 756 bp, synthetic construct
  misc_feature 1..756: note = source = /note="Description of Artificial Sequence: Synthetic coding sequence"
  source 1..756: mol_type = other DNA
atgccccacctggccagcctcttcaccgccagcagccgctgctgcccccaccccctgcggcctgagggcagcggggccatgggccctgaggccctgagcagcctgctgctgctgctgctggtggccagcggagatgctgacatgaagggccactttgatcctgccaagtgccgctatgccctgggcatgcaggacaggaccatcccagacagcgacatcagcgccagcagctcctggagcgacagcacagctgcccggcacagccggctggagagcagtgatggagatggagcctggtgcccagctggcagcgtcttccccaaggaggaggagtacctgcaggtggacctgcagaggctgcacctggtggccctggtgggcacccagggcagacatgctgggggcctgggcaaggagttcagccgcagctaccgcctgcgctacagcagagatggaagacgctggatgggctggaaggaccgctggggccaggaggtgatctctggaaatgaagatcctgagggcgtggtgctgaaggacctgggcccccccatggtggcccggctggtgcgcttctaccccagggctgacagagtgatgtctgtgtgcctgcgggtggagctgtatggctgcctgtggagaggagagtggctgtccttcctgggcatctgcttcctgagccggggcctggagggcggggagtgtggggagtgggccagccgcatccccagccctgctgggaagctgagcctgtag

SEQ ID NO: 8397 - DNA, 726 bp, synthetic construct
  misc_feature 1..726: note = source = /note="Description of Artificial Sequence: Synthetic coding sequence"
  source 1..726: mol_type = other DNA
atgaagttcatcctgctgtgggccctgctgaacctgactgtggccctggccttcaacccagactacacagtgagcagcaccccaccctacctggtgtacctgaagagtgactacctgccctgtgccggcgtgctgatccaccccctgtgggtgatcacagctgcccactgcaacctgcccaagctgcgggtcatcctgggcgtgaccatcccagctgacagcaatgagaagcacctgcaggtgattggctatgagaagatgatccaccacccccacttctctgtgaccagcattgaccatgacatcatgctgatcaagctgaagacagaagctgagctgaatgactatgtgaagctggccaacctgccctaccagaccatcagcgagaacaccatgtgcagcgtgtccacctggagctacaacgtgtgtgacatctacaaggagccagacagcctgcagacagtgaacatcagcgtcatcagcaagccccagtgcagagatgcctacaagacctacaacatcacagagaacatgctgtgtgtgggcatcgtgcctggaagacggcagccctgcaaggaggtgtctgctgccccagccatctgcaatggcatgctgcagggcatcctgagctttgctgatggctgtgtgctgcgggcagatgtgggcatctatgccaagatcttctactacatcccctggattgaaaatgtcatccagaacaactag

SEQ ID NO: 8398 - DNA, 1536 bp, synthetic construct
  misc_feature 1..1536: note = source = /note="Description of Artificial Sequence: Synthetic coding sequence"
  source 1..1536: mol_type = other DNA
atggccaagggcctgtctgtgcagaatgacaagcaccctggctaccagcctgccctgctgctgagccctggggcccccctgtttgctgatggccctgcctatgccctgctgcacctgctgctgcacgagggcaaggccgagatggctgaccaggccgccgcctggctgacccggcagggcagcttccagggcggcttccgcagcacccaggacaccgtcatcgccctggatgccctgagcgcctactggatcgccagccacaccacagaggagcggggcctgaatgtgaccctgagcagcactggaagaaatggcttcaagagccacgccctgcagctgaacaaccggcagatccggggcctggaggaggagctgcagttcagcctgggcagcaagatcaacgtgaaggtgggcggcaacagcaagggcaccctgaaggtgctgcggacctacaacgtgctggacatgaagaacaccacctgccaggacctgcagatcgaggtgacagtgaagggccacgtggagtacaccatggaggccaatgaagattatgaagattatgaatatgatgagctgcctgccaaggatgatcctgatgcccccctgcagcctgtgacccccctgcagctgtttgagggcagaagaaacagaagaagaagagaggcccccaaggtggtggaggagcaggagagccgggtgcactacacagtgtgcatctggagaaatggcaaggtgggcctgagcggcatggccatcgcagatgtgaccctgctgagcggcttccacgccctgcgggctgacctggagaagctgaccagcctgagtgaccgctacgtgagccactttgaaacagagggcccccacgtgctgctgtactttgattctgtgcccaccagcagagaatgtgtgggctttgaagctgtgcaggaggtgcctgtgggcctggtgcagcctgccagcgccaccctgtatgactactacaaccctgagcggcgctgcagcgtcttctatggagcccccagcaagagccggctgctggccaccctgtgcagcgctgaggtgtgccagtgtgccgagggcaaatgtccccggcagaggcgggccctggagcggggcctgcaggatgaagatggctacaggatgaagtttgcctgctactacccccgggtggagtatggcttccaggtgaaggtgctgcgggaggacagcagagctgccttccggctgtttgagaccaagatcacccaggtgctgcacttcaccaaggatgtgaaggctgctgccaaccagatgaggaacttcctggtgcgggccagctgccgcctgcggctggagcccgggaaggagtacctgatcatgggcctggatggagccacctatgacctggagggccacccccagtacctgctggacagcaacagctggattgaggagatgcccagcgagcggctgtgccgcagcacccggcagagagctgcctgtgcccagctgaatgacttcctgcaggagtatggcacccagggctgccaggtgtag

SEQ ID NO: 8399 - DNA, 2067 bp, synthetic construct; identical to SEQ ID NO: 8067
  misc_feature 1..2067: note = source = /note="Description of Artificial Sequence: Synthetic coding sequence"
  source 1..2067: mol_type = other DNA

SEQ ID NO: 8400 - DNA, 2559 bp, synthetic construct; identical to SEQ ID NO: 7494
  misc_feature 1..2559: note = source = /note="Description of Artificial Sequence: Synthetic coding sequence"
  source 1..2559: mol_type = other DNA

SEQ ID NO: 8401 - DNA, 1737 bp, synthetic construct; identical to SEQ ID NO: 7521
  misc_feature 1..1737: note = source = /note="Description of Artificial Sequence: Synthetic coding sequence"
  source 1..1737: mol_type = other DNA

SEQ ID NO: 8402 - DNA, 1326 bp, synthetic construct; identical to SEQ ID NO: 7358
  misc_feature 1..1326: note = source = /note="Description of Artificial Sequence: Synthetic coding sequence"
  source 1..1326: mol_type = other DNA

SEQ ID NO: 8403 - DNA, 2685 bp, synthetic construct; identical to SEQ ID NO: 8214
  misc_feature 1..2685: note = source = /note="Description of Artificial Sequence: Synthetic coding sequence"
  source 1..2685: mol_type = other DNA

SEQ ID NO: 8404 - DNA, 216 bp, synthetic construct; identical to SEQ ID NO: 7542
  misc_feature 1..216: note = source = /note="Description of Artificial Sequence: Synthetic coding sequence"
  source 1..216: mol_type = other DNA

SEQ ID NO: 8405 - DNA, 2760 bp, synthetic construct; identical to SEQ ID NO: 7514
  misc_feature 1..2760: note = source = /note="Description of Artificial Sequence: Synthetic coding sequence"
  source 1..2760: mol_type = other DNA

SEQ ID NO: 8406 - DNA, 447 bp, synthetic construct; identical to SEQ ID NO: 7498
  misc_feature 1..447: note = source = /note="Description of Artificial Sequence: Synthetic coding sequence"
  source 1..447: mol_type = other DNA

SEQ ID NO: 8407 - DNA, 5097 bp, synthetic construct
  misc_feature 1..5097: note = source = /note="Description of Artificial Sequence: Synthetic coding sequence"
  source 1..5097: mol_type = other DNA
atgaggctgctgtggggcctcatctgggccagcagcttcttcaccctgagcctgcagaagccccggctgctgctcttcagccccagcgtggtgcacctgggcgtgcccctgtctgtgggcgtgcagctgcaggatgtgccccggggccaggtggtgaagggctctgtgttcctgaggaaccccagcagaaataatgtgccctgcagccccaaggtggacttcaccctgagcagcgagcgggactttgccctgctgagcctgcaggtgcccctgaaggatgccaagagctgtggcctgcaccagctgctgcggggccctgaggtgcagctggtggcccacagcccctggctgaaggacagcctgagcaggaccaccaacatccagggcatcaacctgctcttcagcagcagaagaggccacctgttcctgcagacagaccagcccatctacaaccctggccagagggtgcgctacagagtgtttgccctggaccagaagatgaggcccagcacagacaccatcaccgtgatggtggagaacagccacggcctgcgggtgaggaagaaggaggtgtacatgcccagcagcatcttccaggatgactttgtgatcccagacatcagcgagcccggcacctggaagatcagcgcccgcttcagtgatggcctggagagcaacagcagcacccagtttgaggtgaagaagtatgtgctgcccaactttgaggtgaagatcaccccaggcaagccctacatcctgactgtgcccggccacctggatgagatgcagctggacatccaggcccgctacatctacggcaagcctgtgcagggcgtggcctacgtgcgcttcggcctgctggatgaagatggcaagaagaccttcttccggggcctggagagccagaccaagctggtgaatggccagagccacatcagcctgagcaaggccgagttccaggatgccctggagaagctgaacatgggcatcacagacctgcagggcctgcggctgtatgtggccgccgccatcatcgagtacccaggaggagagatggaggaggccgagctgacctcctggtactttgtgagcagccccttcagcctggacctgagcaagaccaagaggcacctggtgcctggggcccccttcctgctgcaggccctggtgcgggagatgagcggcagccctgccagcggcatccctgtgaaggtgtctgccaccgtgagcagccctggctctgtgcctgaggtgcaggacatccagcagaacacagatggcagcggccaggtgtccatccccatcatcatcccccagaccatcagcgagctgcagctgtctgtgtctgctggcagcccccacccagccatcgcccggctgactgtggccgcccctccttctgggggccctggcttcctgagcattgaaagaccagacagccggcccccccgggtgggggacaccctgaacctgaacctgcgggctgtgggcagcggggccaccttcagccactactactacatgatcctgagccggggccagatcgtgttcatgaaccgggagcccaagaggaccctgacctctgtgtctgtgtttgtggaccaccacctggcccccagcttctactttgtggccttctactaccatggagaccaccctgtggccaacagcctgcgggtggatgtgcaggccggggcctgtgagggcaagctggagctgtctgtggatggagccaagcagtacagaaatggagagagcgtgaagctgcacctggagacagacagcctggccctggtggccctgggcgccctggacacagccctgtatgctgctggcagcaagagccacaagcccctgaacatgggcaaggtgtttgaggccatgaacagctatgacctgggctgcggccctgggggcggggacagcgccctgcaggtgttccaggccgccggcctggccttcagtgatggagaccagtggaccctgagcaggaagaggctgagctgccccaaggagaagaccaccaggaagaagagaaatgtgaacttccagaaggccatcaatgagaagctgggccagtatgccagccccacagccaagcgctgctgccaggatggagtgacccggctgcccatgatgaggagctgtgagcagagagctgcccgggtgcagcagcctgactgccgggagcccttcctgagctgctgccagtttgctgagagcctgaggaagaagagccgggacaagggccaggccggcctgcagagggccctggagatcctgcaggaggaggacctgattgatgaagatgacatccctgtgcgctccttcttccctgagaactggctgtggagggtggagaccgtggaccgcttccagatcctgaccctgtggctgcctgacagcctgaccacctgggagatccacggcctgagcctgagcaagaccaagggcctgtgtgtggccacccctgtgcagctgcgggtcttccgggagttccacctgcacctgcggctgcccatgtctgtgagaagatttgagcagctggagctgcggcctgtgctgtacaactacctggacaagaacctgactgtgtctgtgcacgtgtcccctgtggagggcctgtgcctggccggcggcggcggcctggcccagcaggtgctggtgcctgctggcagcgcccggcctgtggccttctctgtggtgcccacagctgctgctgctgtgtccctgaaggtggtggcccggggcagctttgagttccctgtgggagatgctgtgtccaaggtgctgcagatcgagaaggagggcgccatccaccgggaggagctggtgtatgagctgaaccccctggaccaccggggccgcaccctggagatccctggcaacagcgaccccaacatgatcccagatggagacttcaacagctatgtgcgggtgacagccagtgaccccctggacaccctgggcagcgagggcgccctgagccctggaggagtggccagcctgctgcggctgccccggggctgtggggagcagaccatgatctacctggcccccaccctggccgccagccgctacctggacaagacagagcagtggagcaccctgcccccagagaccaaggaccatgctgtggacctgatccagaagggctacatgaggatccagcagttcaggaaggcagatggcagctatgctgcctggctgagccggggcagcagcacctggctgacagcctttgtgctgaaggtgctgagcctggcccaggagcaggtgggcggcagccctgagaagctgcaggagaccagcaactggctgctgagccagcagcaggctgatggcagcttccaggacctgagccctgtgatccaccgctccatgcagggcggcctggtgggcaatgatgagaccgtggccctgacagcctttgtgaccatcgccctgcaccacggcctggccgtgttccaggatgagggcgctgagcccctgaagcagagggtggaggccagcatcagcaaggccagcagcttcctgggggagaaggccagcgctggcctgctgggcgcccacgccgccgccatcacagcctatgccctgaccctgaccaaggccccagctgacctgcggggcgtggcccacaacaacctgatggccatggcccaggagaccggggacaacctgtactggggctctgtgacaggcagccagagcaatgctgtgagccccaccccagcccccaggaaccccagcgaccccatgccccaggccccagccctgtggattgagaccacagcctatgccctgctgcacctgctgctgcacgagggcaaggccgagatggctgaccaggccgccgcctggctgacccggcagggcagcttccagggcggcttccgcagcacccaggacacagtgattgccctggatgccctgagcgcctactggatcgccagccacaccacagaggagcggggcctgaatgtgaccctgagcagcactggaagaaatggcttcaagagccacgccctgcagctgaacaaccggcagatccggggcctggaggaggagctgcagttcagcctgggcagcaagatcaacgtgaaggtgggcggcaacagcaagggcaccctgaaggtgctgcggacctacaacgtgctggacatgaagaacaccacctgccaggacctgcagatcgaggtgacagtgaagggccacgtggagtacaccatggaggccaatgaagattatgaggactatgaatatgatgagctgcctgccaaggatgatcctgatgcccccctgcagcctgtgacccccctgcagctgtttgagggcagaagaaacagaagaagaagagaggcccccaagctgaccagcctgagtgacagatatgtgagccactttgaaacagagggcccccacgtgctgctgtactttgacagcgtgcccaccagccgggagtgtgtgggctttgaggccgtgcaggaggtgcctgtgggcctggtgcagcctgccagcgccaccctgtatgactactacaaccctgagcggcgctgcagcgtcttctacggggcccccagcaagagccggctgctggccaccctgtgcagcgctgaggtgtgccagtgtgccgagggcaagtgcccccggcagaggcgggccctggagcggggcctgcaggatgaagatggctacaggatgaagtttgcctgctactacccccgggtggagtatggcttccaggtgaaggtgctgcgggaggacagccgggccgccttccggctgtttgagaccaagatcacccaggtgctgcacttcaccaaggatgtgaaggccgccgccaaccagatgaggaacttcctggtgcgggccagctgccgcctgcggctggagcccgggaaggagtacctgatcatgggcctggatggagccacctatgacctggagggccacccccagtacctgctggacagcaacagctggattgaggagatgcccagcgagcggctgtgccgcagcacccggcagagagctgcctgtgcccagctgaatgacttcctgcaggagtatggcacccagggctgccaggtgtag

SEQ ID NO: 8408 - DNA, 1986 bp, synthetic construct
  misc_feature 1..1986: note = source = /note="Description of Artificial Sequence: Synthetic coding sequence"
  source 1..1986: mol_type = other DNA
atggacctggtgctgaagcgctgcctgctgcacctggccgtgattggagccctgctggccgtgggcgccaccaaggtgcccaggaaccaggactggctgggcgtgtcccggcagctgcggaccaaggcctggaaccggcagctgtacccagagtggacagaggcccagaggctggactgctggaggggcggccaggtgtccctgaaggtgtccaatgatggccccaccctcatcggggccaatgccagcttcagcatcgccctgaacttccctggcagccagaaggtgctgcctgatggccaggtgatctgggtgaacaacaccatcatcaatggcagccaggtgtggggcggccagcctgtgtacccccaggagacagatgatgcctgcatcttcccagatggcggcccctgccccagcggctcctggagccagaagaggagctttgtgtatgtgtggaagacctggggccagtactggcaggtgctgggcggccctgtgtctggcctgagcatcggcaccggccgggccatgctgggcacccacaccatggaggtgacagtgtaccacagaagaggcagccgctcctatgtgcccctggcccacagcagcagcgccttcaccatcacagaccaggtgcccttctctgtgtctgtgtcccagctgcgggccctggatggcggcaacaagcacttcctgaggaaccagcccctgacctttgccctgcagctgcatgaccccagcggctacctggccgaggccgacctgagctacacctgggactttggagacagcagcggcaccctcatcagccgggccctggtggtgacccacacctacctggagcccggccctgtgacagcccaggtggtgctgcaggccgccatccccctgaccagctgtggcagcagccctgtgcccggcaccacagatggccaccggcccacagctgaggcccccaacaccacagctggccaggtgcccaccacagaggtggtgggcaccaccccaggccaggcccccacagctgagcccagcggcaccacctctgtgcaggtgcccaccacagaggtgatcagcacagcccctgtgcagatgcccacagctgagagcacaggcatgaccccagagaaggtgcctgtgtctgaggtgatgggcaccaccctggccgagatgagcaccccagaggccaccggcatgaccccagctgaggtgtccatcgtggtgctgagcggcaccacagctgcccaggtgaccaccacagagtgggtggagaccacagcccgggagctgcccatccctgagcctgagggcccagatgccagcagcatcatgagcacagagagcatcaccggcagcctgggccccctgctggatggaacagccaccctgcggctggtgaagaggcaggtgcccctggactgtgtgctgtaccgctatggcagcttctctgtgaccctggacatcgtgcagggcattgaatctgctgagatcctgcaggccgtgcccagcggggagggagatgcctttgagctgactgtgtcctgccagggcggcctgcccaaggaggcctgcatggagatcagcagccctggctgccagcccccagcccagaggctgtgccagcctgtgctgcccagccctgcctgccagctggtgctgcaccagatcctgaagggcggcagcggcacctactgcctgaatgtgtccctggccgacaccaacagcctggccgtggtgtccacccagctgatcatgcctggccaggaggccggcctgggccaggtgcccctgattgtgggcatcctgctggtgctgatggctgtggtgctggccagcctcatctacagaagaaggctgatgaagcaggacttctctgtgccccagctgccccacagcagcagccactggctgcggctgccccgcatcttctgcagctgccccatcggggagaacagccccctgctgagcggccagcaggtgtag

SEQ ID NO: 8409 - DNA, 516 bp, synthetic construct; identical to SEQ ID NO: 8098
  misc_feature 1..516: note = source = /note="Description of Artificial Sequence: Synthetic coding sequence"
  source 1..516: mol_type = other DNA

SEQ ID NO: 8410 - DNA, 1986 bp, synthetic construct; identical to SEQ ID NO: 8408
  misc_feature 1..1986: note = source = /note="Description of Artificial Sequence: Synthetic coding sequence"
  source 1..1986: mol_type = other DNA

SEQ ID NO: 8411 - DNA, 1737 bp, synthetic construct; identical to SEQ ID NO: 7521
  misc_feature 1..1737: note = source = /note="Description of Artificial Sequence: Synthetic coding sequence"
  source 1..1737: mol_type = other DNA

SEQ ID NO: 8412 - DNA, 1326 bp, synthetic construct; identical to SEQ ID NO: 7358
  misc_feature 1..1326: note = source = /note="Description of Artificial Sequence: Synthetic coding sequence"
  source 1..1326: mol_type = other DNA

SEQ ID NO: 8413 - DNA, 447 bp, synthetic construct; identical to SEQ ID NO: 7498
  misc_feature 1..447: note = source = /note="Description of Artificial Sequence: Synthetic coding sequence"
  source 1..447: mol_type = other DNA

SEQ ID NO: 8414 - DNA, 732 bp, synthetic construct; identical to SEQ ID NO: 8058
  misc_feature 1..732: note = source = /note="Description of Artificial Sequence: Synthetic coding sequence"
  source 1..732: mol_type = other DNA

SEQ ID NO: 8415 - DNA, 732 bp, synthetic construct; identical to SEQ ID NO: 8058
  misc_feature 1..732: note = source = /note="Description of Artificial Sequence: Synthetic coding sequence"
  source 1..732: mol_type = other DNA

SEQ ID NO: 8416 - DNA, 1224 bp, synthetic construct
  misc_feature 1..1224: note = source = /note="Description of Artificial Sequence: Synthetic coding sequence"
  source 1..1224: mol_type = other DNA
atgaggctgctggcctggctgatcttcctggccaactggggcggggcccgggcagagcccgggaagttctggcacatcgctgacctgcacctggaccctgactacaaggtgtccaaggaccccttccaggtgtgccccagcgctggcagccagcctgtgcctgatgctggcccctggggagactacctgtgtgacagcccctgggccctgatcaacagcagcatctatgccatgaaggagattgagcctgagccagacttcatcctgtggacaggagatgacacccctcatgtgcctgatgagaagctgggggaggccgctgtgctggagatcgtggagcggctgaccaagctgatccgggaggtgtttcctggggccttctactgtgagaagctgcccggccccagcggggccggcagaattgtggtgctgaacaccaacctgtactacaccagcaatgccctgacagctgacatggctgaccccggccagcagttccagtggctggaggatgtgctgacagatgccagcaaggccggggacatggtgtacatcgtgggccacgtgcccccaggcttctttgagaagacccagaacaaggcctggttccgggagggcttcaatgagaagtacctgaaggtggtgaggaagcaccaccgggtgattgctggccagttcttcggccaccaccacacagacagcttcaggatgctgtatgatgatgctggggtgcccatcagcgccatgttcatcaccccaggagtgaccccctggaagaccaccctgcccggggtggtgaatggagccaacaacccagccatccgggtgtttgaatatgaccgggccaccctgagcctgaaggacatggtgacctacttcatgaacctgagccaggccaatgcccagggcaccccccgctgggagctggagtaccagctgacagaggcctatggagtgcctgatgccagcgcccacagcatgcacacagtgctggacagaattgctggggaccagagcaccctgcagcgctactacgtgtacaacagcgtgtcctacagcgctggggtgtgtgatgaggcctgcagcatgcagcacgtgtgtgccatgaggcaggtggacattgatgcctacaccacctgcctgtatgccagcggcaccacccctgtgccccagctgcccctgctgctgatggccctgctgggcctgtgcaccctggtgctgtag

SEQ ID NO: 8417 - DNA, 756 bp, synthetic construct; identical to SEQ ID NO: 8396
  misc_feature 1..756: note = source = /note="Description of Artificial Sequence: Synthetic coding sequence"
  source 1..756: mol_type = other DNA

SEQ ID NO: 8418 - DNA, 756 bp, synthetic construct; identical to SEQ ID NO: 8396
  misc_feature 1..756: note = source = /note="Description of Artificial Sequence: Synthetic coding sequence"
  source 1..756: mol_type = other DNA

SEQ ID NO: 8419 - DNA, 456 bp, synthetic construct
  misc_feature 1..456: note = source = /note="Description of Artificial Sequence: Synthetic coding sequence"
  source 1..456: mol_type = other DNA
atggacctggtgctgaagcgctgcctgctgcacctggccgtgattggagccctgctggccgtgggcgccaccaaggtgcccaggaaccaggactggctgggcgtgtcccggcagctgcggaccaaggcctggaaccggcagctgtacccagagtggacagaggcccagaggctggactgctggaggggcggccaggtgtccctgaaggtgtccaatgatggccccaccctcatcggggccaatgccagcttcagcatcgccctgaacttccctggcagccagaaggtgctgcctgatggccaggtgatctgggtgaacaacaccatcatcaatggcagccaggtgtggggcggccagcctgtgtacccccaggagacagatgatgcctgcatcttcccagatggcggcccctgccccagcggctcctggagccagaagaggagctttgtgtactag

SEQ ID NO: 8420 - DNA, 216 bp, synthetic construct; identical to SEQ ID NO: 7542
  misc_feature 1..216: note = source = /note="Description of Artificial Sequence: Synthetic coding sequence"
  source 1..216: mol_type = other DNA

SEQ ID NO: 8421 - DNA, 447 bp, synthetic construct; identical to SEQ ID NO: 7498
  misc_feature 1..447: note = source = /note="Description of Artificial Sequence: Synthetic coding sequence"
  source 1..447: mol_type = other DNA

SEQ ID NO: 8422 - DNA, 447 bp, synthetic construct; identical to SEQ ID NO: 7498
  misc_feature 1..447: note = source = /note="Description of Artificial Sequence: Synthetic coding sequence"
  source 1..447: mol_type = other DNA

SEQ ID NO: 8423 - DNA, 1326 bp, synthetic construct; identical to SEQ ID NO: 7358
  misc_feature 1..1326: note = source = /note="Description of Artificial Sequence: Synthetic coding sequence"
  source 1..1326: mol_type = other DNA

SEQ ID NO: 8424 - DNA, 2067 bp, synthetic construct; identical to SEQ ID NO: 8067
  misc_feature 1..2067: note = source = /note="Description of Artificial Sequence: Synthetic coding sequence"
  source 1..2067: mol_type = other DNA

SEQ ID NO: 8425 - DNA, 1326 bp, synthetic construct
  misc_feature 1..1326: note = source = /note="Description of Artificial Sequence: Synthetic coding sequence"
  source 1..1326: mol_type = other DNA
atggagtttgaatttgaccggctgcgggccttccaggccatgcaggtgcactgcaacaacatgcacaccctgggcgcccggctgcctggaggagtggagtgccgcttcagaagaggccctgccatggcctgggagggggagcccatgaggcacaacctgggcggcaacctgggggacccccgggcccgggctgtgtctgtgcccctgggcggccgggtggcccgcttcctgcagtgccgcttcctgtttgctggcccctggctgctcttcagcgagatctccttcatcagtgatgtggtgaacaacagcagccctgccctgggcggcaccttccccccagccccctggtggcccccaggccccccacccaccaacttcagcagcctggagctggagccccggggccagcagcctgtggccaaggccgagggcagccccacagccatcctgattggctgcctggtggccatcatcctgctgctgctgctgatcatcgccctgatgctgtggaggctgcactggaggcggctgctgagcaaggtgctggagagccaccccaggaccaggagccctggcctggtgggcatccggcccaccctgctgcctgtgagccccatggccctgcgctgctgcagccccatccagcccacagccagcttctggcccctgacccctgtgcccctggaggcccgggccccaccccaccccccaggccccaacccccccaccccccggggcgtgactggaggcaacacctatgctgtgcctgccctgcccccaggagctgtgggagatggccccccccgggtggacttccccaggagccggctgcgcttcaaggagaagctgggggagggccagtttggagaggtgcacctgtgtgaggtggacagcccccaggacctggtgtccctggacttccccctgaatgtgaggaagggccaccccctgctggtggccgtgaagatcctgcggccagatgccaccaagaatgccagaaatgacttcctgaaggaggtgaagatcatgagccggctgaaggaccccaacatcatccggctgctgggcgtgtgtgtgcaggatgaccccctgtgcatgatcacagactacatggagaatggagacctgaaccagttcctgagcgcccaccagctggaggacaaggctgctgagggcgcccctggagatggccaggccgcccagggccccaccatctcctaccccatgctgctgcacgtggccgcccagatcgccagcggcatgagatacctggccaccctgaactttgtgcacttctggggcgagcggcaccgcttcctgcactag

SEQ ID NO: 8426 - DNA, 2559 bp, synthetic construct; identical to SEQ ID NO: 7494
  misc_feature 1..2559: note = source = /note="Description of Artificial Sequence: Synthetic coding sequence"
  source 1..2559: mol_type = other DNA

SEQ ID NO: 8427 - DNA, 732 bp, synthetic construct; identical to SEQ ID NO: 8058
  misc_feature 1..732: note = source = /note="Description of Artificial Sequence: Synthetic coding sequence"
  source 1..732: mol_type = other DNA

SEQ ID NO: 8428 - DNA, 2760 bp, synthetic construct; identical to SEQ ID NO: 7514
  misc_feature 1..2760: note = source = /note="Description of Artificial Sequence: Synthetic coding sequence"
  source 1..2760: mol_type = other DNA

SEQ ID NO: 8429 - DNA, 2700 bp, synthetic construct; identical to SEQ ID NO: 7525
  misc_feature 1..2700: note = source = /note="Description of Artificial Sequence: Synthetic coding sequence"
  source 1..2700: mol_type = other DNA

SEQ ID NO: 8430 - DNA, 447 bp, synthetic construct; identical to SEQ ID NO: 7498
  misc_feature 1..447: note = source = /note="Description of Artificial Sequence: Synthetic coding sequence"
  source 1..447: mol_type = other DNA

SEQ ID NO: 8431 - DNA, 516 bp, synthetic construct; identical to SEQ ID NO: 8098
  misc_feature 1..516: note = source = /note="Description of Artificial Sequence: Synthetic coding sequence"
  source 1..516: mol_type = other DNA

SEQ ID NO: 8432 - DNA, 666 bp, synthetic construct
  misc_feature 1..666: note = source = /note="Description of Artificial Sequence: Synthetic coding sequence"
  source 1..666: mol_type = other DNA
atgaccacccagctgcgggtggtgcacctgctgcccctgctgctggcctgctttgtgcagaccagccccaagcaggagaagatgaagatggactgccacaaggatgagaagggcaccatctatgactatgaggccatcgccctgaacaagaatgaatatgtgtccttcaagcagtatgtgggcaagcacatcctgtttgtgaatgtggccacctactgcggcctgacagcccagtacccagagctgaatgccctgcaggaggagctgaagccctacggcctggtggtgctgggcttcccctgcaaccagtttgggaagcaggagcccggggacaacaaggagatcctgcccggcctgaagtatgtgcggcctgggggcggctttgtgcccagcttccagctgtttgagaagggagatgtgaatggagagaaggagcagaaggtgttctccttcctgaagcacagctgcccccaccccagcgagatcctgggcaccttcaagagcatctcctgggaccctgtgaaggtgcatgacatccgctggaactttgagaagttcctggtgggcccagatggcatccctgtgatgcgctggagccaccgggccaccgtgtcctctgtgaagacagacatcctggcctacctgaagcagttcaagaccaagtag

SEQ ID NO: 8433 - DNA, 447 bp, synthetic construct; identical to SEQ ID NO: 7498
  misc_feature 1..447: note = source = /note="Description of Artificial Sequence: Synthetic coding sequence"
  source 1..447: mol_type = other DNA

SEQ ID NO: 8434 - DNA, 1737 bp, synthetic construct; identical to SEQ ID NO: 7521
  misc_feature 1..1737: note = source = /note="Description of Artificial Sequence: Synthetic coding sequence"
  source 1..1737: mol_type = other DNA

SEQ ID NO: 8435 - DNA, 1737 bp, synthetic construct; identical to SEQ ID NO: 7521
  misc_feature 1..1737: note = source = /note="Description of Artificial Sequence: Synthetic coding sequence"
  source 1..1737: mol_type = other DNA

SEQ ID NO: 8436 - DNA, 756 bp, synthetic construct; identical to SEQ ID NO: 8396
  misc_feature 1..756: note = source = /note="Description of Artificial Sequence: Synthetic coding sequence"
  source 1..756: mol_type = other DNA

SEQ ID NO: 8437 - DNA, 1764 bp, synthetic construct
  misc_feature 1..1764: note = source = /note="Description of Artificial Sequence: Synthetic coding sequence"
  source 1..1764: mol_type = other DNA
atgaggccccggggcctgccccccctgctggtggtgctgctgggctgctgggcctctgtgtctgcccagacagatgccaccccagctgtgaccacagagggcctgaacagcacagaggccgccctggccaccttcggcaccttccccagcaccaggcctcctggcaccccccgggcccctggccccagcagcggcccccggcccacccctgtgacagatgtggccgtgctgtgtgtgtgtgacctgagccctgcccagtgtgacatcaactgctgctgtgaccctgactgcagctctgtggacttctctgtgttcagcgcctgcagcgtgcctgtggtgactggagacagccagttctgcagccagaaggccgtcatctacagcctgaacttcaccgccaaccccccccagagggtgtttgagctggtggaccagatcaaccccagcatcttctgcatccacatcaccaactacaagccagccctgtccttcatcaaccctgaggtgcctgatgagaacaactttgacaccctgatgaagaccagtgatggcttcaccctgaatgctgagagctatgtgtccttcaccaccaagctggacatccccacagctgccaagtatgaatatggagtgcccctgcagaccagtgacagcttcctgcgcttccccagcagcctgaccagcagcctgtgcacagacaacaacccagctgccttcctggtgaaccaggccgtgaagtgcaccaggaagatcaacctggagcagtgtgaggagattgaggccctgtccatggccttctacagcagccctgagatcctgcgggtgcctgacagcaggaagaaggtgcccatcaccgtgcagagcatcgtcatccagagcctgaacaagaccctgacccggcgggaggacacagatgtgctgcagcccaccctggtgaatgccggccacttcagcctgtgtgtgaatgtggtgctggaggtgaagtacagcctgacctacacagatgctggggaggtgaccaaggctgacctgagctttgtgctgggcaccgtgtcctctgtggtggtgcccctgcagcagaagtttgagatccacttcctgcaggagaacacccagcctgtgcccctgagcggcaaccctggctacgtggtgggcctgcccctggccgccggcttccagccccacaagggcagcggcatcatccagaccaccaacagatatggccagctgaccatcctgcacagcaccacagagcaggactgcctggccctggagggcgtgaggacccctgtgctgtttggctacaccatgcagagcggctgcaagctgcggctgaccggggccctgccctgccagctggtggcccagaaggtgaagagcctgctgtggggccagggcttcccagactatgtggcccccttcggcaacagccaggcccaggacatgctggactgggtgcccatccacttcatcacccagagcttcaacaggaaggacagctgccagctgcccggggccctggtgattgaggtgaagtggaccaagtatggcagcctgctgaacccccaggccaagatcgtgaatgtgacagccaacctgatcagcagcagcttccctgaggccaacagcggaaatgaaagaaccatcctgatcagcacagctgtgacctttgtggatgtgtctgccccagctgaggccggcttccgggcccccccagccatcaatgcccggctgcccttcaacttcttcttcccctttgtgtag

SEQ ID NO: 8438 - DNA, 2067 bp, synthetic construct; identical to SEQ ID NO: 8067
  misc_feature 1..2067: note = source = /note="Description of Artificial Sequence: Synthetic coding sequence"
  source 1..2067: mol_type = other DNA

SEQ ID NO: 8439 - DNA, 303 bp, synthetic construct
  misc_feature 1..303: note = source = /note="Description of Artificial Sequence: Synthetic coding sequence"
  source 1..303: mol_type = other DNA
atgaccacccagctgcgggtggtgcacctgctgcccctgctgctggcctgctttgtgcagaccagccccaagcaggagaagatgaagatggactgccacaaggatgagaagggcaccatctatgactatgaggccatcgccctgaacaagaatgaatatgtgtccttcaagcagtatgtgggcaagcacatcctgtttgtgaatgtggccacctactgcggcctgacagcccagtacccaggcatgtctgtgcagggagaagatctctacctggtgagcagcttcctgaggaagggcatgtag

SEQ ID NO: 8440 - DNA, 705 bp, synthetic construct
  misc_feature 1..705: note = source = /note="Description of Artificial Sequence: Synthetic coding sequence"
  source 1..705: mol_type = other DNA
atgaagaccctggccggcctggtgctgggcctggtgatctttgatgctgctgtgacagcccccaccctggagagcatcaactatgacagcgagacctatgatgccaccctggaggacctggacaacctgtacaactatgagaacatccctgtggacaaggtggagattgagatcgccaccgtgatgcccagcggcaaccgggagctgctgaccccaccaccccagcctgagaaggcccaggaggaggaggaggaggaggagagcaccccccggctgattgatggcagcagcccccaggagcctgagttcaccggggtgctgggcccccacaccaatgaagacttccccacctgcctgctgtgcacctgcatcagcaccaccgtgtactgtgatgaccacgagctggatgccatcccccccctgcccaagaacacagcctacttctacagccgcttcaaccgcatcaagaagatcaacaagaatgactttgccagcctgagtgacctgaagagaattgacctgaccagcaacctgatcagcgagattgatgaagatgccttcaggaagctgccccagctgcgggagctggtgctgcgggacaacaagatccggcagctgcctgagctgcccaccaccctgaccttcatcgacatcagcaacaaccggctgggcaggaagggcatcaagcaggaggccttcaagtag

SEQ ID NO: 8441 - DNA, 2559 bp, synthetic construct; identical to SEQ ID NO: 7494
  misc_feature 1..2559: note = source = /note="Description of Artificial Sequence: Synthetic coding sequence"
  source 1..2559: mol_type = other DNA

SEQ ID NO: 8442 - DNA, 2760 bp, synthetic construct; identical to SEQ ID NO: 7514
  misc_feature 1..2760: note = source = /note="Description of Artificial Sequence: Synthetic coding sequence"
  source 1..2760: mol_type = other DNA

SEQ ID NO: 8443 - DNA, 1737 bp, synthetic construct; identical to SEQ ID NO: 7521
  misc_feature 1..1737: note = source = /note="Description of Artificial Sequence: Synthetic coding sequence"
  source 1..1737: mol_type = other DNA

SEQ ID NO: 8444 - DNA, 516 bp, synthetic construct; identical to SEQ ID NO: 8098
  misc_feature 1..516: note = source = /note="Description of Artificial Sequence: Synthetic coding sequence"
  source 1..516: mol_type = other DNA

SEQ ID NO: 8445 - DNA, 2067 bp, synthetic construct; identical to SEQ ID NO: 8067
  misc_feature 1..2067: note = source = /note="Description of Artificial Sequence: Synthetic coding sequence"
  source 1..2067: mol_type = other DNA

SEQ ID NO: 8446 - DNA, 5097 bp, synthetic construct; identical to SEQ ID NO: 8407
  misc_feature 1..5097: note = source = /note="Description of Artificial Sequence: Synthetic coding sequence"
  source 1..5097: mol_type = other DNA

SEQ ID NO: 8447 - DNA, 726 bp, synthetic construct; identical to SEQ ID NO: 8397
  misc_feature 1..726: note = source = /note="Description of Artificial Sequence: Synthetic coding sequence"
  source 1..726: mol_type = other DNA

SEQ ID NO: 8448 - DNA, 732 bp, synthetic construct; identical to SEQ ID NO: 8058
  misc_feature 1..732: note = source = /note="Description of Artificial Sequence: Synthetic coding sequence"
  source 1..732: mol_type = other DNA

SEQ ID NO: 8449 - DNA, 1986 bp, synthetic construct; identical to SEQ ID NO: 8408
  misc_feature 1..1986: note = source = /note="Description of Artificial Sequence: Synthetic coding sequence"
  source 1..1986: mol_type = other DNA

SEQ ID NO: 8450 - DNA, 2760 bp, synthetic construct; identical to SEQ ID NO: 7514
  misc_feature 1..2760: note = source = /note="Description of Artificial Sequence: Synthetic coding sequence"
  source 1..2760: mol_type = other DNA

SEQ ID NO: 8451 - DNA, 216 bp, synthetic construct; identical to SEQ ID NO: 7542
  misc_feature 1..216: note = source = /note="Description of Artificial Sequence: Synthetic coding sequence"
  source 1..216: mol_type = other DNA

SEQ ID NO: 8452 - DNA, 2685 bp, synthetic construct; identical to SEQ ID NO: 8214
  misc_feature 1..2685: note = source = /note="Description of Artificial Sequence: Synthetic coding sequence"
  source 1..2685: mol_type = other DNA

SEQ ID NO: 8453 - DNA, 273 bp, synthetic construct
  misc_feature 1..273: note = source = /note="Description of Artificial Sequence: Synthetic coding sequence"
  source 1..273: mol_type = other DNA
atgcagctgttcctgctgctgtgcctggtgctgctgagcccccagggcgccagcctgcaccgccaccacccccgggagatgaagaagagggtggaggacctgcacgtgggcgccaccgtggcccccagcagcagaagagacttcacctttgacctgtaccgggccctggccagcgctgcccccagccagagcatcttcttcagccctgtgtccatctccatgagcctggccatgctgagcctgggcgccggcagcagcaccaagatgcagtag

SEQ ID NO: 8454 - DNA, 618 bp, synthetic construct; identical to SEQ ID NO: 7228
  misc_feature 1..618: note = source = /note="Description of Artificial Sequence: Synthetic coding sequence"
  source 1..618: mol_type = other DNA

SEQ ID NO: 8455 - DNA, 30 bp, synthetic construct
  misc_feature 1..30: note = source = /note="Description of Artificial Sequence: Synthetic coding sequence"
  source 1..30: mol_type = other DNA
atgtccttcagcgccaccatcctcttctag

SEQ ID NO: 8456 - DNA, 600 bp, synthetic construct
  misc_feature 1..600: note = source = /note="Description of Artificial Sequence: Synthetic coding sequence"
  source 1..600: mol_type = other DNA
atgtccttcagcgccaccatcctcttcagccccccatctggcagcgaggcccgctgctgctgctgtgcctgcaagtctgagaccaatggaggcaacacaggcagccagggcggcaaccccccacccagcacccccatcaccgtgactggacatggcctggccgtgcagagcagcgagcagctgctgcacgtgatctaccagagggtggacaaggctgtgggcctggccgaggccgccctgggcctggcccgggccaacaatgagctgctgaagaggctgcaggaggaggtgggggacctgcggcagggcaaggtgtccatcccagatgaagatggagagagccgggcccacagcagccccccagaggagcccggccccctgaaggagagccctggagaggccttcaaggccctgtctgctgtggaggaggagtgtgacagcgtgggcagcggcgtgcaggtggtgattgaggagctgcggcagctgggcgccgcctctgtgggccctggccccctgggcttccctgccacccagagggacatgaggctgcccggctgcaccctggccgccagcgaggccgcccccctgctgaacccctag

SEQ ID NO: 8457 - DNA, 633 bp, synthetic construct; identical to SEQ ID NO: 7785
  misc_feature 1..633: note = source = /note="Description of Artificial Sequence: Synthetic coding sequence"
  source 1..633: mol_type = other DNA

SEQ ID NO: 8458 - DNA, 1221 bp, synthetic construct; identical to SEQ ID NO: 7163
  misc_feature 1..1221: note = source = /note="Description of Artificial Sequence: Synthetic coding sequence"
  source 1..1221: mol_type = other DNA

SEQ ID NO: 8459 - DNA, 600 bp, synthetic construct; identical to SEQ ID NO: 7206
  misc_feature 1..600: note = source = /note="Description of Artificial Sequence: Synthetic coding sequence"
  source 1..600: mol_type = other DNA

SEQ ID NO: 8460 - DNA, 411 bp, synthetic construct
  misc_feature 1..411: note = source = /note="Description of Artificial Sequence: Synthetic coding sequence"
  source 1..411: mol_type = other DNA
atgtccttcagcgccaccatcctcttcagccccccatctggcagcgaggcccgctgctgctgctgtgcctgcaagtctgagaccaatggaggcaacacaggcagccagggcggcaaccccccacccagcacccccatcaccgtgactggacatggcctggccgtgcagagcagcgagcagctgctgcacgtgatctaccagagggtggacaaggctgtgggcctggccgaggccgccctgggcctggcccgggccaacaatgagctgctgaagaggctgcaggaggaggtgggggacctgcggcagggcaaggtgtccatcccagatgaagatggagagagccgggcccacagcagccccccagaggagcccggccccctgaaggagagccctggagaggccttcaagtag

SEQ ID NO: 8461 - DNA, 252 bp, synthetic construct
  misc_feature 1..252: note = source = /note="Description of Artificial Sequence: Synthetic coding sequence"
  source 1..252: mol_type = other DNA
atgtccttcagcgccaccatcctcttcagccccccatctggcagcgaggcccgctgctgctgctgtgcctgcaagtctgagaccaatggaggcaacacaggcagccagggcggcaaccccccacccagcacccccatcaccgtgactggacatggcctggccgtgcagagcagcgagcagctgctgcacgtgatctaccagagggtggacaaggctgtgggcctggccgaggccgccctgggcctggcctag

SEQ ID NO: 8462 - DNA, 30 bp, synthetic construct; identical to SEQ ID NO: 8455
  misc_feature 1..30: note = source = /note="Description of Artificial Sequence: Synthetic coding sequence"
  source 1..30: mol_type = other DNA

SEQ ID NO: 8463 - DNA, 519 bp, synthetic construct
  misc_feature 1..519: note = source = /note="Description of Artificial Sequence: Synthetic coding sequence"
  source 1..519: mol_type = other DNA
atgcagctgttcctgctgctgtgcctggtgctgctgagcccccagggcgccagcctgcaccgccaccacccccgggagatgaagaagagggtggaggacctgcacgtgggcgccaccgtggcccccagcagcagaagagacttcacctttgacctgtaccgggccctggccagcgctgcccccagccagagcatcttcttcagccctgtgtccatctccatgagcctggccatgctgagcctgggcgccggcagcagcaccaagatgcagatcctggagggcctgggcctgaacctgcagaagagcagcgagaaggagctgcaccggggcttccagcagctgctgcaggagctgaaccagcccagagatggcttccagctgagcctgggcaatgccctcttcacagacctggtggtggacctgcaggacacctttgtgtctgccatgaagaccctgtacctggccgacaccttccccaccaacttccgggacagcgctggggccatgaagcagatctag

SEQ ID NO: 8464 - DNA, 615 bp, synthetic construct
  misc_feature 1..615: note = source = /note="Description of Artificial Sequence: Synthetic coding sequence"
  source 1..615: mol_type = other DNA
atgcctgggggcaagaaggtggccggcggcggcagcagcggggccacccccaccagcgctgctgccacagcccccagcggcgtgcggcggctggagaccagcgagggcaccagcgcccagagagatgaggagcctgaggaggagggggaggaggacctgagagatggaggagtgcccttctttgtgaacagaggaggcctgcctgtggatgaggccacctgggagaggatgtggaagcacgtggccaagatccacccagatggagagaaggtggcccagaggatccggggggccacagacctgcccaagatccccatccccagcgtgcccaccttccagcccagcacccctgtgcctgagcggctggaggccgtgcagcgctacatccgggagctgcagtacaaccacacaggcacccagttctttgagatcaagaagagccggcccctgaccggcctgatggacctggccaaggagatgaccaaggaggccctgcccatcaagtgcctggaggccgtcatcctgggcatgtaccccagcagccctgagggggagggcagcggcctgctgtgggccagcgccagctgcagcgagagcgagggcggcgtgggctag

SEQ ID NO: 8465 - DNA, 1221 bp, synthetic construct; identical to SEQ ID NO: 7163
  misc_feature 1..1221: note = source = /note="Description of Artificial Sequence: Synthetic coding sequence"
  source 1..1221: mol_type = other DNA

SEQ ID NO: 8466 - DNA, 3837 bp, synthetic construct; identical to SEQ ID NO: 7920
  misc_feature 1..3837: note = source = /note="Description of Artificial Sequence: Synthetic coding sequence"
  source 1..3837: mol_type = other DNA

SEQ ID NO: 8467 - DNA, 261 bp, synthetic construct
  misc_feature 1..261: note = source = /note="Description of Artificial Sequence: Synthetic coding sequence"
  source 1..261: mol_type = other DNA
atgcagctgttcctgctgctgtgcctggtgctgctgagcccccagggcgccagcctgcaccgccaccacccccgggagatgaagaagagggtggaggacctgcacgtgggcgccaccgtggcccccagcagcagaagagacttcacctttgacctgtaccgggccctggccagcgctgcccccagccagagcatcttcttcagccctgtgtccatctccatgagcctggccatgctgagcctgggcgccggcagcagctag

SEQ ID NO: 8468 - DNA, 906 bp, synthetic construct
  misc_feature 1..906: note = source = /note="Description of Artificial Sequence: Synthetic coding sequence"
  source 1..906: mol_type = other DNA
atgcagctgttcctgctgctgtgcctggtgctgctgagcccccagggcgccagcctgcaccgccaccacccccgggagatgaagaagagggtggaggacctgcacgtgggcgccaccgtggcccccagcagcagaagagacttcacctttgacctgtaccgggccctggccagcgctgcccccagccagagcatcttcttcagccctgtgtccatctccatgagcctggccatgctgagcctgggcgccggcagcagcaccaagatgcagatcctggagggcctgggcctgaacctgcagaagagcagcgagaaggagctgcaccggggcttccagcagctgctgcaggagctgaaccagcccagagatggcttccagctgagcctgggcaatgccctcttcacagacctggtggtggacctgcaggacacctttgtgtctgccatgaagaccctgtacctggccgacaccttccccaccaacttccgggacagcgctggggccatgaagcagatcaatgactatgtggccaagcagaccaagggcaagatcgtggacctgctgaagaacctggacagcaatgctgtggtgatcatggtgaactacatcttcttcaaggccaagtgggagaccagcttcaaccacaagggcacccaggagcaggacttctacgtgaccagcgagaccgtggtgcgggtgcccatgatgagccgggaggaccagtaccactacctgctggacaggaacctgagctgccgggtggtgggcgtgccctaccagggcaatgccacagccctcttcatcctgcccagcgagggcaagatgcagcaggtggagaatggcctgtctgagaagaccctgaggaagtggctgaagatgttcaagaagcgctacttccagacctag

SEQ ID NO: 8469 - DNA, 411 bp, synthetic construct
  misc_feature 1..411: note = source = /note="Description of Artificial Sequence: Synthetic coding sequence"
  source 1..411: mol_type = other DNA
atggagaccttccccctgctgctgctgagcctgggcctggtgctggccgaggccagcgagagcaccatgaagatcatcaaggaggagttcacagatgaggagatgcagtatgacatggccaagagcggccaggagaagcagaccatcgagatcctgatgaaccccatcctgctggtgaagaacaccagcctgtccatgagcaaggatgacatgagcagcaccctgctgaccttccgcagcctgcactacaatgaccccaagggcaacagcagtggaaatgacaaggagtgctgcaatgacatgacagtgtggaggaaggtgtctgaggccaacggcagctgcaagtggagcaacaacttcatccgcagcagcacagaggtgatgagaagagtgcaccgggcccccagctag

SEQ ID NO: 8470 - DNA, 1221 bp, synthetic construct; identical to SEQ ID NO: 7163
  misc_feature 1..1221: note = source = /note="Description of Artificial Sequence: Synthetic coding sequence"
  source 1..1221: mol_type = other DNA

SEQ ID NO: 8471 - DNA, 618 bp, synthetic construct; identical to SEQ ID NO: 7228
  misc_feature 1..618: note = source = /note="Description of Artificial Sequence: Synthetic coding sequence"
  source 1..618: mol_type = other DNA

SEQ ID NO: 8472 - DNA, 240 bp, synthetic construct
  misc_feature 1..240: note = source = /note="Description of Artificial Sequence: Synthetic coding sequence"
  source 1..240: mol_type = other DNA
atgtccttcagcgccaccatcctcttcagccccccatctggcagcgaggcccgctgctgctgctgtgcctgcaagtctgagaccaatggaggcaacacaggcagccagggcggcaaccccccacccagcacccccatcaccgtgactggacatggcctggccgtgcagagcagcgagcagctgctgcacgtgatctaccagagggtggacaaggctgtgggcctggccgaggccgcctag

SEQ ID NO: 8473 - DNA, 618 bp, synthetic construct; identical to SEQ ID NO: 7228
  misc_feature 1..618: note = source = /note="Description of Artificial Sequence: Synthetic coding sequence"
  source 1..618: mol_type = other DNA

SEQ ID NO: 8474 - DNA, 3789 bp, synthetic construct
  misc_feature 1..3789: note = source = /note="Description of Artificial Sequence: Synthetic coding sequence"
  source 1..3789: mol_type = other DNA
atgaggctgctgctgctggtgcccctgctgctggccccagcccctggcagcagcgcccccaaggtgcggcggcagagcgacacctggggcccctggagccagtggagcccctgcagcaggacctgtggcggcggcgtgtccttccgggagcggccctgctacagccagaggagagatggcggcagcagctgtgtgggccctgcccggagccacaggagctgcaggacagagagctgcccagatggagcccgggacttccgggcagagcagtgtgccgagtttgatggagctgagttccagggccgccgctaccgctggctgccctactacagcgcccccaacaagtgtgagctgaactgcatccccaagggggagaacttctactacaagcaccgggaggccgtggtggatggcaccccctgtgagcccgggaagagagatgtgtgtgtggatggcagctgccgggtggtgggctgtgaccacgagctggacagcagcaagcaggaggacaagtgcctgcgctgtggaggagatggcaccacctgctaccctgtggccggcacctttgatgccaatgacctgagccggggctacaaccagatcctgattgtgcccatgggcgccaccagcatcctgattgatgaggccgccgccagcaggaacttcctggccgtgaagaatgtgcggggggagtactacctgaatggccactggaccatcgaggccgcccgggccctgcctgctgccagcaccatcctgcactatgaaagaggagctgagggggacctggcccctgagcggctgcacgcccggggccccaccagcgagcccctggtgattgagctgatcagccaggagcccaaccctggggtgcactatgagtaccacctgcccctgcggcggcccagccctggcttctcctggagccacggctcctggagcgactgcagcgcagaatgtggcggcggccaccagagccggctggtgttctgcaccatcgaccacgaggcctacccagaccacatgtgccagaggcagcccaggcctgctgaccggcgcagctgcaacctgcacccctgcccagagaccaagcgctggaaggccggcccctgggccccctgcagcgccagctgtggcggcggcagccagagccgctctgtgtactgcatcagcagtgatggagctggcatccaggaggccgtggaggaggctgaatgtgccggcctgcccgggaagcccccagccatccaggcctgcaacctgcagagatgtgccgcctggagccctgagccctggggcgagtgcagcgtgtcctgtggggtgggcgtgaggaagaggtctgtgacctgccgcggggagcggggcagcctgctgcacacagctgcctgcagcctggaggacaggcctcccctgacagagccctgtgtgcatgaggactgccccctgctgagtgaccaggcctggcacgtgggcacctggggcctgtgcagcaagagctgcagcagcggcacccggcggcggcaggtgatctgtgccatcggcccccccagccactgcggcagcctgcagcacagcaagcctgtggatgtggagccctgcaacacccagccctgccacctgccccaggaggtgcccagcatgcaggatgtgcacaccccagccagcaacccctggatgcccctgggcccccaggagagccctgccagtgacagccggggccagtggtgggccgcccaggagcaccccagcgcccggggggaccacagaggagagcggggggaccccaggggggaccagggcacccacctgagcgccctgggccctgcccccagcctgcagcagcccccctaccagcagcccctgcggagcggcagcggcccccatgactgccgccacagcccccacggctgctgcccagatggccacacagccagcctgggcccccagtggcagggctgccctggggccccctgccagcagagccgctatggctgctgcccagacagagtgtctgtggccgagggcccccaccacgccggctgcaccaagagctatggaggagacagcactggaggcatgcccaggagcagagctgtggccagcacagtgcacaacacccaccagccccaggcccagcagaatgagcccagcgagtgccggggcagccagtttggctgctgctatgacaacgtggccacagctgctggccccctgggggagggctgtgtgggccagcccagccatgactgggccgcccgctggtactttgtggcctctgtgggccagtgcaaccgcttctggtacggcggctgccacggcaatgccaacaactttgccagcgagcaggagtgcatgagcagctgccagggcagcctgcacggcccccggcggccccagcccggggccagcggccgcagcacccacacagatggcggcggcagcagccctgctggggagcaggagcccagccagcacaggactggagctgctgtgcagaggaagccctggcccagcggcggcctgtggaggcaggaccagcagcccggccctggagaggccccccacacccaggcctttggagagtggccctggggccaggagctgggcagccgggcccctggcctgggcggagatgctggcagccctgccccacccttccacagcagcagctaccgcatcagcctggccggcgtggagcccagcctggtgcaggccgccctgggccagctggtgcggctgagctgcagtgatgacacagcccctgagagccaggccgcctggcagaaggatggccagcccatcagcagtgacagacaccggctgcagtttgatggcagcctcatcatccaccccctgcaggctgaagatgctggcacctacagctgtggcagcaccaggcctggccgggacagccagaagatccagctgcgcatcattggaggagacatggctgtgctgtctgaggccgagctgagccgcttcccccagccccgggaccctgcccaggactttggccaggccggggccgccggccccctgggcgccatccccagcagccacccccagcctgccaaccggctgcggctggaccagaaccagccccgggtggtggatgccagccctggccagaggatccgcatgacctgcagagctgagggcttccccccaccagccatcgagtggcagagagatggccagcctgtgagcagccccaggcaccagctgcagccagatggcagcctggtgatcagccgggtggccgtggaggatggcggcttctacacctgtgtggccttcaacggccaggaccgggaccagcgctgggtgcagctgcgggtgctgggggagctgaccatcagcggcctgcccccaacagtgacagtgcctgagggggacacagcccggctgctgtgtgtggtggccggggagagcgtgaacatccgctggagcagaaatggcctgcctgtgcaggctgatggccaccgggtgcaccagagcccagatggcaccctgctgatctacaacctgcgggccagagatgagggcagctacacctgcagcgcctaccagggcagccaggccgtgagccgcagcacagaggtgaaggtggtgtccccagcccccacagcccagccccgggaccccggccgggactgtgtggaccagcctgagctggccaactgtgacctgatcctgcaggcccagctgtgtggaaatgagtactacagcagcttctgctgtgccagctgcagccgcttccagccccacgcccagcccatctggcagtag

SEQ ID NO: 8475 - DNA, 321 bp, synthetic construct
  misc_feature 1..321: note = source = /note="Description of Artificial Sequence: Synthetic coding sequence"
  source 1..321: mol_type = other DNA
atgtccttcagcgccaccatcctcttcagccccccatctggcagcgaggcccgctgctgctgctgtgcctgcaagtctgagaccaatggaggcaacacaggcagccagggcggcaaccccccacccagcacccccatcaccgtgactggacatggcctggccgtgcagagcagcgagcagctgctgcacgtgatctaccagagggtggacaaggctgtgggcctggccgaggccgccctgggcctggcccgggccaacaatgagctgctgaagaggctgcaggaggaggtgggggacctgcggcagggcaaggtgtcctag

SEQ ID NO: 8476 - DNA, 444 bp, synthetic construct; identical to SEQ ID NO: 7729
  misc_feature 1..444: note = source = /note="Description of Artificial Sequence: Synthetic coding sequence"
  source 1..444: mol_type = other DNA

SEQ ID NO: 8477 - DNA, 435 bp, synthetic construct
  misc_feature 1..435: note = source = /note="Description of Artificial Sequence: Synthetic coding sequence"
  source 1..435: mol_type = other DNA
atgcagctgttcctgctgctgtgcctggtgctgctgagcccccagggcgccagcctgcaccgccaccacccccgggagatgaagaagagggtggaggacctgcacgtgggcgccaccgtggcccccagcagcagaagagacttcacctttgacctgtaccgggccctggccagcgctgcccccagccagagcatcttcttcagccctgtgtccatctccatgagcctggccatgctgagcctgggcgccggcagcagcaccaagatgcagatcctggagggcctgggcctgaacctgcagaagagcagcgagaaggagctgcaccggggcttccagcagctgctgcaggagctgaaccagcccagagatggcttccagctgagcctgggcaatgccctcttcacagacctggtggtggacctgcaggacacctag

SEQ ID NO: 8478 - DNA, 540 bp, synthetic construct; identical to SEQ ID NO: 8200
  misc_feature 1..540: note = source = /note="Description of Artificial Sequence: Synthetic coding sequence"
  source 1..540: mol_type = other DNA

SEQ ID NO: 8479 - DNA, 444 bp, synthetic construct; identical to SEQ ID NO: 7729
  misc_feature 1..444: note = source = /note="Description of Artificial Sequence: Synthetic coding sequence"
  source 1..444: mol_type = other DNA

SEQ ID NO: 8480 - DNA, 600 bp, synthetic construct; identical to SEQ ID NO: 7206
  misc_feature 1..600: note = source = /note="Description of Artificial Sequence: Synthetic coding sequence"
  source 1..600: mol_type = other DNA

SEQ ID NO: 8481 - DNA, 153 bp, synthetic construct
  misc_feature 1..153: note = source = /note="Description of Artificial Sequence: Synthetic coding sequence"
  source 1..153: mol_type = other DNA
atgtccttcagcgccaccatcctcttcagccccccatctggcagcgaggcccgctgctgctgctgtgcctgcaagtctgagaccaatggaggcaacacaggcagccagggcggcaaccccccacccagcacccccatcaccgtgactggatag

SEQ ID NO: 8482 - DNA, 75 bp, synthetic construct
  misc_feature 1..75: note = source = /note="Description of Artificial Sequence: Synthetic coding sequence"
  source 1..75: mol_type = other DNA
atgcagctgttcctgctgctgtgcctggtgctgctgagcccccagggcgccagcctgcaccgccaccacccctag

SEQ ID NO: 8483 - DNA, 633 bp, synthetic construct; identical to SEQ ID NO: 7785
  misc_feature 1..633: note = source = /note="Description of Artificial Sequence: Synthetic coding sequence"
  source 1..633: mol_type = other DNA

SEQ ID NO: 8484 - DNA, 36 bp, synthetic construct
  misc_feature 1..36: note = source = /note="Description of Artificial Sequence: Synthetic coding sequence"
  source 1..36: mol_type = other DNA
atgtccttcagcgccaccatcctcttcagcccctag

SEQ ID NO: 8485 - DNA, 444 bp, synthetic construct; identical to SEQ ID NO: 7609
  misc_feature 1..444: note = source = /note="Description of Artificial Sequence: Synthetic coding sequence"
  source 1..444: mol_type = other DNA

SEQ ID NO: 8486 - DNA, 696 bp, synthetic construct
  misc_feature 1..696: note = source = /note="Description of Artificial Sequence: Synthetic coding sequence"
  source 1..696: mol_type = other DNA
atgcagctgttcctgctgctgtgcctggtgctgctgagcccccagggcgccagcctgcaccgccaccacccccgggagatgaagaagagggtggaggacctgcacgtgggcgccaccgtggcccccagcagcagaagagacttcacctttgacctgtaccgggccctggccagcgctgcccccagccagagcatcttcttcagccctgtgtccatctccatgagcctggccatgctgagcctgggcgccggcagcagcaccaagatgcagatcctggagggcctgggcctgaacctgcagaagagcagcgagaaggagctgcaccggggcttccagcagctgctgcaggagctgaaccagcccagagatggcttccagctgagcctgggcaatgccctcttcacagacctggtggtggacctgcaggacacctttgtgtctgccatgaagaccctgtacctggccgacaccttccccaccaacttccgggacagcgctggggccatgaagcagatcaatgactatgtggccaagcagaccaagggcaagatcgtggacctgctgaagaacctggacagcaatgctgtggtgatcatggtgaactacatcttcttcaaggccaagtgggagaccagcttcaaccacaagggcacccaggagcaggacttctacgtgaccagcgagaccgtggtgtag

SEQ ID NO: 8487 - DNA, 1626 bp, synthetic construct
  misc_feature 1..1626: note = source = /note="Description of Artificial Sequence: Synthetic coding sequence"
  source 1..1626: mol_type = other DNA
atggccaagtttggagtgcaccgcatcctgctgctggccatcagcctgaccaagtgcctggagagcaccaagctgctggccgacctgaagaagtgtggggacctggagtgtgaggccctgatcaacagagtgtctgccatgagggactaccggggccctgactgccgctacctgaacttcaccaagggggaggagatctctgtgtatgtgaagctggccggggagcgggaggacctgtgggccggcaagggcaaggagtttggctacttccccagagatgctgtgcagatcgaggaggtgttcatcagcgaggagatccagatgagcaccaaggagagtgacttcctgtgcctgctgggcgtgtcctacacctttgacaatgaagacagcgagctgaatggagactatggagagaacatctacccctatgaggaggacaaggatgagaagagcagcatctatgaaagtgacttccagatcgagcccggcttctacgccacctatgagagcaccctgtttgaggaccaggtgcctgccctggaggcccctgaggacatcggcagcaccagcgagagcaaggactgggaggaggtggtggtggagagcatggagcaggaccgcatccctgaggtgcacgtgccccccagcagcgctgtgtctggagtgaaggagtggtttggcctgggcggggagcaggccgaggagaaggcctttgagagcgtcatcgagcctgtgcaggagagcagcttccgcagcaggaagattgctgtggaggatgaaaatgacctggaggagctgaacaacggggagccccagacagagcaccagcaggagagcgagagcgagattgattctgtgcccaagacccagagcgagctggccagcgagagcgagcacatccccaagccccagagcacaggctggtttggaggcggcttcaccagctacctgggctttggagatgaggacaccggcctggagctgattgctgaggagagcaacccccccctgcaggacttccccaacagcatcagcagtgacaaggaggccaccgtgccctgcacagagatcctgacagagaagaaggacaccatcaccaatgacagcctgagcctgaagcccagctggtttgattttggatttgccatcctgggctttgcctatgccaaggaggacaagatcatgctggatgacaggaagaatgaagaagatggcggcgcagatgagcacgagcaccccctgaccagcgagctggaccctgagaaggagcaggagattgagaccatcaagatcatcgagacagaggaccagattgacaagaagcctgtgtctgagaagacagatgaaagtgacaccatcccctacctgaagaagttcctgtacaactttgacaacccctggaacttccagaacatccccaaggagacagagctgcccttccccaagcagatcctggaccagaacaacgtgattgaaaatgaggagaccggggagttcagcattgacaactaccccacagacaacaccaaggtgatgatcttcaagagcagctacagcctgagcggctggtatgagaacatctacatccgcatctacttcatcttcaagcacaacctcttcctgtag

SEQ ID NO: 8488 - DNA, 1245 bp, synthetic construct; identical to SEQ ID NO: 7247
  misc_feature 1..1245: note = source = /note="Description of Artificial Sequence: Synthetic coding sequence"
  source 1..1245: mol_type = other DNA

SEQ ID NO: 8489 - DNA, 618 bp, synthetic construct; identical to SEQ ID NO: 7228
  misc_feature 1..618: note = source = /note="Description of Artificial Sequence: Synthetic coding sequence"
  source 1..618: mol_type = other DNA

SEQ ID NO: 8490 - DNA, 516 bp, synthetic construct
  misc_feature 1..516: note = source = /note="Description of Artificial Sequence: Synthetic coding sequence"
  source 1..516: mol_type = other DNA
atggagaccttccccctgctgctgctgagcctgggcctggtgctggccgaggccagcgagagcaccatgaagatcatcaaggaggagttcacagatgaggagatgcagtatgacatggccaagagcggccaggagaagcagaccatcgagatcctgatgaaccccatcctgctggtgaagaacaccagcctgtccatgagcaaggatgacatgagcagcaccctgctgaccttccgcagcctgcactacaatgaccccaagggcaacagcagtggaaatgacaaggagtgctgcaatgacatgacagtgtggaggaaggtgtctgaggccaacggcagctgcaagtggagcaacaacttcatccgcagcagcacagaggtgatgagaagagtgcaccgggcccccagctgcaagtttgtgcagaaccctggcatcagctgctgtgagagcctggagctggagaacacagtgtgccagttcaccaccgggaagcagttcccccgctgccagtactag

SEQ ID NO: 8491 - DNA, 633 bp, synthetic construct; identical to SEQ ID NO: 7785
  misc_feature 1..633: note = source = /note="Description of Artificial Sequence: Synthetic coding sequence"
  source 1..633: mol_type = other DNA

SEQ ID NO: 8492 - DNA, 537 bp, synthetic construct; identical to SEQ ID NO: 8033
  misc_feature 1..537: note = source = /note="Description of Artificial Sequence: Synthetic coding sequence"
  source 1..537: mol_type = other DNA

SEQ ID NO: 8493 - DNA, 474 bp, synthetic construct
  misc_feature 1..474: note = source = /note="Description of Artificial Sequence: Synthetic coding sequence"
  source 1..474: mol_type = other DNA
atgcagctgttcctgctgctgtgcctggtgctgctgagcccccagggcgccagcctgcaccgccaccacccccgggagatgaagaagagggtggaggacctgcacgtgggcgccaccgtggcccccagcagcagaagagacttcacctttgacctgtaccgggccctggccagcgctgcccccagccagagcatcttcttcagccctgtgtccatctccatgagcctggccatgctgagcctgggcgccggcagcagcaccaagatgcagatcctggagggcctgggcctgaacctgcagaagagcagcgagaaggagctgcaccggggcttccagcagctgctgcaggagctgaaccagcccagagatggcttccagctgagcctgggcaatgccctcttcacagacctggtggtggacctgcaggacacctttgtgtctgccatgaagaccctgtacctggccgacacctag

SEQ ID NO: 8494 - DNA, 1035 bp, synthetic construct
  misc_feature 1..1035: note = source = /note="Description of Artificial Sequence: Synthetic coding sequence"
  source 1..1035: mol_type = other DNA
atgccacccaggatgctggtggcccccctgcccctgcacttcctgctggccgctgtgtcctctgagaacagaagtggaagacggcagtggcagcaggccgtggccgccggcagcggccctggcaggaacagcagccgggccatccactggagcctgccccgggccctggtgcctgccaccggcacccgggccagcggcagccagaagaggcagaggcctcccaagggccaggaggccctgtggagccggccccacagccgccacagcgctgagagagctgggggcagccacagcgaccccggccgcctgagcgcccccctgggcctgggcctgcccagcggccggggccgcctgacagccatgcctggccgggcccccctgaggacagtgcctggggccctgggcgcctggctgctgggcggcctgtgggcctggaccctgtgtggcctgtgcagcctgggcgctgtgggcgccccccggccctgccaggccccccagcagtgggagggccggcaggtgatgtaccagcagagcagtggaagaaacagccgggccctgctgtcctatgatggcctgaaccagagggtgcgggtgctggatgagaggaaggccctgatcccctgcaagaggctgtttgagtacatcctgctgtacaaggatggagtgatgttccagattgaccaggccaccaagcagtgcagcaagatgaccctgacccagccctgggaccccctggacatcccccagaacagcacctttgaggaccagtacagcattggaggcccccaggagcagatcaccgtgcaggagtggagcgacaggaagagcgcccggagctatgagacctggattggcatctacacagtgaaggactgctaccctgtgcaggagaccttcaccatcaactacagcgtcatcctgagcacccgcttctttgacatccagctgggcatcaaggaccccagcgtcttcaccccacccagcacctgccagatggcccagctggagaagatgtctgaggactgctcctggtag

SEQ ID NO: 8495 - DNA, 321 bp, synthetic construct
  misc_feature 1..321: note = source = /note="Description of Artificial Sequence: Synthetic coding sequence"
  source 1..321: mol_type = other DNA
ggccagcccaaggccgcccccagcgtgaccctcttcccccccagcagcgaggagctgcaggccaacaaggccaccctggtgtgcctggtgtctgacttctacccaggagctgtgacagtggcctggaaggcagatggcagccctgtgaaggtgggcgtggagaccaccaagcccagcaagcagagcaacaacaagtatgctgccagcagctacctgagcctgaccccagagcagtggaagagccacaggagctacagctgccgggtgacccatgagggcagcacagtggagaagacagtggccccagctgagtgcagctag

SEQ ID NO: 8496 - DNA, 672 bp, synthetic construct
  misc_feature 1..672: note = source = /note="Description of Artificial Sequence: Synthetic coding sequence"
  source 1..672: mol_type = other DNA
atgaggctgcagaggccccggcaggccccagctgggggccggcgggccccccggggcggccggggcagcccctacagaccagaccccggccgcggggcccggcggctgcggcgcttccagaagggcggggagggcgcccccagggctgaccccccctgggcccccctgggcaccatggccctgctggccctgctgctggtggtggccctgccccgggtgtggacagatgccaacctgacagcccggcagagggaccctgaggacagccagaggacagatgaaggagacaacagagtgtggtgccacgtgtgtgaaagagagaacacctttgagtgccagaacccccggcgctgcaagtggacagagccctactgtgtgattgctgctgtgaagatcttcccccgcttcttcatggtggccaagcagtgcagcgctggctgtgccgccatggagcggcccaagccagaggagaagcgcttcctgctggaggagcccatgcccttcttctacctgaagtgctgcaagatccgctactgcaacctggagggcccccccatcaacagctctgtgttcaaggagtatgccggctccatgggagagagctgtggcggcctgtggctggccatcctgctgctgctggccagcattgctgctggcctgagcctgtcctag

SEQ ID NO: 8497 - DNA, 408 bp, synthetic construct
  misc_feature 1..408: note = source = /note="Description of Artificial Sequence: Synthetic coding sequence"
  source 1..408: mol_type = other DNA
atgacccccacccccacagctgcctggaccccacctccacccctgcggcccagcgctgctgctgctggggcccagtgccgcagctgccccttccggggcggctgtgcccccagcacagcccggaccccaccagcctgcatgaggcctgctggcccctgtgccccacccacctggccagcccccagcaccaccaccagcacctgcaccagcagaagagctggctgcacagccagcagcgccagctacagcaccctggccgccgcctgcagcctgcggcgcagcggcgtgcgctggccacccagcagcgcctacagcacctgggcctttgccagctgctgtgccagcagcgccagctgccgctgctgctgctgctgctgggccgccggggcctggaccagcgcctggtag

SEQ ID NO: 8498 - DNA, 1542 bp, synthetic construct; identical to SEQ ID NO: 7949
  misc_feature 1..1542: note = source = /note="Description of Artificial Sequence: Synthetic coding sequence"
  source 1..1542: mol_type = other DNA

SEQ ID NO: 8499 - DNA, 1341 bp, synthetic construct; identical to SEQ ID NO: 7099
  misc_feature 1..1341: note = source = /note="Description of Artificial Sequence: Synthetic coding sequence"
  source 1..1341: mol_type = other DNA

SEQ ID NO: 8500 - DNA, 936 bp, synthetic construct
  misc_feature 1..936: note = source = /note="Description of Artificial Sequence: Synthetic coding sequence"
  source 1..936: mol_type = other DNA
atgggcgtgatggccatgctgatgctgcccctgctgctgctgggcatcagcggcctgctcttcatctaccaggaggtgtcccggctgtggagcaagtctgctgtgcagaacaaggtggtggtgatcacagatgccatcagcggcctgggcaaggaatgtgcccgggtcttccacactggaggagcccggctggtgctgtgtgggaagaactgggagcggctggagaacctgtatgatgccctgatctctgtggccgaccccagcaagaccttcacccccaagctggtgctgctggacctgagtgacatcagctgtgtgcctgatgtggccaaggaggtgctggactgctacggctgtgtggacatcctgatcaacaatgcctctgtgaaggtgaagggccctgcccacaagatcagcctggagctggacaagaagatcatggatgccaactacttcggccccatcaccctgaccaaggccctgctgcccaacatgatcagcagaagaacaggccagatcgtgctggtgaacaacatccagggcaagtttggcatccccttccgcaccacctacgccgccagcaagcatgctgccctgggcttctttgactgcctgcgggcagaggtggaggagtatgatgtggtgatcagcacagtgagccccaccttcatccgcagctaccacgtgtacccagagcagggcaactgggaggccagcatctggaagttcttcttcaggaagctgacctacggcgtgcaccctgtggaggtggccgaggaggtgatgaggacagtgcggaggaagaagcaggaggtgttcatggccaaccccatccccaaggctgctgtgtatgtgaggaccttcttccctgagttcttctttgctgtggtggcctgtggggtgaaggagaagctgaatgtgcctgaggagggctag

SEQ ID NO: 8501 - DNA, 594 bp, synthetic construct; identical to SEQ ID NO: 7046
  misc_feature 1..594: note = source = /note="Description of Artificial Sequence: Synthetic coding sequence"
  source 1..594: mol_type = other DNA

SEQ ID NO: 8502 - DNA, 705 bp, synthetic construct
  misc_feature 1..705: note = source = /note="Description of Artificial Sequence: Synthetic coding sequence"
  source 1..705: mol_type = other DNA
atgaaggtgctgctgctgaccggcctgggcgccctcttctttgcctactactgggatgacaactttgaccccggcggcctggactacctggtgctgaaccacatcggcggggccccagctggcacccgggcccggagcccccaggccacccgctggctgatgcaggtgaactttgtgtcctatgtgcagctgaccagccgggccctgcccagcctgacagacagcaagggcagcctggtggtggtgagcagcctgctgggccgggtgcccaccagcttcagcaccccctacagcgctgccaagtttgccctggatggcttcttcggcagcctgcggcgggagctggatgtgcaggatgtgaatgtggccatcaccatgtgtgtgctgggcctgcgggaccgggccagcgctgctgaggccgtgcgcagcagcaccagccggccccggcagcctgagcacagaggagtgcccctgcagagccagacagccatgttcctgcccccaacagtgcctggggcccggaccctgacagagacccccctgcggggctggccccagcccaagatgaagagcagccggcagaagagcaagacagagaagaatgatggccacctggagcctgtgacagcctgggaggtgcaggtgccccgggtgcggcggctgtgccggggcctggcccggccccacctgtttggacatgactag

SEQ ID NO: 8503 - DNA, 228 bp, synthetic construct
  misc_feature 1..228: note = source = /note="Description of Artificial Sequence: Synthetic coding sequence"
  source 1..228: mol_type = other DNA
atgaaggtgctgctgctgaccggcctgggcgccctcttctttgcctactactgggatgacaactttgatcctgccagcctgcagggcgcccgggtgctgctgactggagccaatgccggcgtgggggaggagctggcctaccactacgcccggctgggcagccacctggtgctgacagcccacacagaggccctgctgcagaaggccggctggaccaccagctgctag

SEQ ID NO: 8504 - DNA, 225 bp, synthetic construct
  misc_feature 1..225: note = source = /note="Description of Artificial Sequence: Synthetic coding sequence"
  source 1..225: mol_type = other DNA
atgcagcccagcgagatggtgatgaaccccaagcaggtgttcctgtctgtgctgatcttcggcgtggccggcctgctgctcttcatgtacctgcaggtgtggattgaggagcagcacacaggccgggtggagaagaggcgggagcagaaggtgaccagcggctggggccctgtgaagtacctgcggcctgtgccccgcatcaagccccaggtgtcccatgcctag

SEQ ID NO: 8505 - DNA, 861 bp, synthetic construct; identical to SEQ ID NO: 7232
  misc_feature 1..861: note = source = /note="Description of Artificial Sequence: Synthetic coding sequence"
  source 1..861: mol_type = other DNA

SEQ ID NO: 8506 - DNA, 459 bp, synthetic construct
  misc_feature 1..459: note = source = /note="Description of Artificial Sequence: Synthetic coding sequence"
  source 1..459: mol_type = other DNA
atgcaggtgaactttgtgtcctatgtgcagctgaccagccgggccctgcccagcctgacagacagcaagggcagcctggtggtggtgagcagcctgctgggccgggtgcccaccagcttcagcaccccctacagcgctgccaagtttgccctggatggcttcttcggcagcctgcggcgggagctggatgtgcaggatgtgaatgtggccatcaccatgtgtgtgctgggcctgcgggaccgggccagcgctgctgaggccgtgcggggcgtgaccagggtgaaggccgcccctggccccaaggccgccctggccgtcatccggggcggggccaccagggctgctggggtcttctacccctggaggttccggctgctgtgcctgctgcggcgctggctgccccggccccgggcctggttcatccggcaggagctgaatgtgacagctgctgctgcctag

SEQ ID NO: 8507 - DNA, 2856 bp, synthetic construct
  misc_feature 1..2856: note = source = /note="Description of Artificial Sequence: Synthetic coding sequence"
  source 1..2856: mol_type = other DNA
atgagggtgctggcctgcctgctggccgccctggtgggcatccaggccgtggagcggctgcggctggctgatggcccccacggctgtgccggccgcctggaggtgtggcatggaggccgctggggcaccgtgtgtgatgatggctgggacctgagagatgctgctgtggcctgccggcagctgggctgcggcggggccctggccgcccctgggggcgccttctttggagagggcgccggccctgtgtggctgtctgagctggcctgcagaggaaatgaaggccagctgggcctgtgccaccaccggggctggaaggcccacatctgcagccatgaagaagatgctggggtggtgtgtgccggccagagggtggccaacagcagagatgacagcaccagccccctggatggagccccctggccaggcctgctgctggagctgagccccagcacagaggagcccctggtgacccacgcccccaggcctgctggcaacccccagaatgccagcaggaagaagagcccccggcccaagcaggccaagagcacccgggcccccctgctgaccaccggggccccccggcaggagcggctgcggctggtgtctggcccccaccgctgtgccggccgcctggaggtgtggcatggaggccgctggggcaccgtgtgtgatgatggctgggacctgagagatgctgctgtggcctgccgggagctgggctgcggcggggccctggccgcccctgggggcgccaggtttggacctggagctggccctgtgtggatggatgatgtgggctgcggcggcggggagcaggccctgcgggactgccccaggagcccctggggccgcagcaactgtgaccacagtgaagatgctggcctggtgtgcaccggccctgccccccggctgcggctggctgatggcccccacggctgtgccggccgcctggaggtgtggcatggaggccgctggggctctgtgtgtgatgatgcctgggacctgagagatgctgctgtggcctgccgggagctgggctgcggcggggccctggccgcccctgggggcgccttctttggagagggcagcggccccatcatcctggatgacctgcgctgcagaggaaatgaaacagccctgcgcttctgcccagcccggccctggggccagcacgactgccaccacagagaagatgctggagctgtgtgtgatggcatgcccctgggctacgtgcccccaacagcccccacagacagcaacaacagcaccccccgggaggccgccagcaggcctcccagcaccatgaccagccaggcccctggaacagctggggtgtccccacctccagccagccccaccgtgctgtgggagcccggccctgaggccggcagcccccagctgcggctggtggccggccccagcaaatgttctggccgcctggaggtgtggcatgaccagcgctggggcaccgtgtgtgatgacagctgggacatgagggacagcgctgtggtgtgccgggagctgggctgcggcggcccccagcagcctgaccctgctgctggccgcttcggctggggcgccggccccatctggctggatgatgtgggctgtgtgggcacagaggccagcctgagtgactgcccagctgccccctggggcaagcacaactgtgcccacaatgaagatgtgggcgtgacctgcaccggccccccaggcctggacagcatcagtgaccccttctcctggagctggatccctggcctgggccgggacagagatgcctggctgcctggagagctggccaccaagcccagcgcctctgtgacagcctctgtgctggagaagaccaccaccaaggcccctgggaagatgcccaagagcaccaagaagtgggtgaccaagaatgccaagaggcccaccacccagccccctgtgatgcccaccaccaagcacagccgggcccagagccccccagacctgaccagccagaccacagctgccctgaccacagaggccagccggcggcccaccagcgagttcacccggcggcccaccacagaggccccccagcgctggaccagccacaccacagccaccctgaccccccaggccccccgggagaggaccaccaagaccatggccatgctgaccacccagggcccccaggagatgaccagcgagagcaccatcaagagcatcccccaggccagcctggagcccagcgctgagatccctgagggcagccctgagagccccaaggaccctgcccccagccccagcgtgtccaccaccggggagagcggcctcttccgggtgcggctggctgatggccccaacagatgtgccggccgcctggaggtgtggcacgccggccgctggggcaccgtgtgtgatgacaactgggacctgagagatgccaccgtggcctgctgggagctgggctgcggcaaggtgcggccccgggtgggcaagacccactacggccctggcaccggccccatctggctggatgacatgggctgcaagggcagcgaggccagcctgagtgactgccccagcggggcctggggcaagcacaactgtgaccatgaagaagatgtgggcctgacctgcaccggctacacagattatgatgactacccaccctggacctgggaccccaccagccgggaggacctggccaagggcaccaccacagctggggtgcccggccacaccctgccctggaggaccaccaggaggcctggcagcagcagccctgccatccggcggctgcctgacacagagcctgaggccggggcccccagaggagatgcccccaggagcaggacagcccgggtggccgccccaccctag

SEQ ID NO: 8508 - DNA, 8430 bp, synthetic construct; identical to SEQ ID NO: 6956
  misc_feature 1..8430: note = source = /note="Description of Artificial Sequence: Synthetic coding sequence"
  source 1..8430: mol_type = other DNA

SEQ ID NO: 8509 - DNA, 291 bp, synthetic construct; identical to SEQ ID NO: 7562
  misc_feature 1..291: note = source = /note="Description of Artificial Sequence: Synthetic coding sequence"
  source 1..291: mol_type = other DNA

SEQ ID NO: 8510 - DNA, 1890 bp, synthetic construct
  misc_feature 1..1890: note = source = /note="Description of Artificial Sequence: Synthetic coding sequence"
  source 1..1890: mol_type = other DNA
atgcagcaggacggcctgggcgtgggcaccagaaatggcagcggcaagggccgctctgtgcaccccagctggccctggtgtgccccccggcccctgcgctacttcggcagagatgcccgggcccggcgggcccagacagctgccatggccctgctggccggcggcctgagccggggcctgggcagccaccctgctgctgctggaagagatgctgtggtgtttgtgtggctgctgctgagcacctggtgcacagccccagcccgggccatccaggtgacagtgagcaacccctaccacgtggtgatcctcttccagcctgtgaccctgccctgcacctaccagatgaccagcacccccacccagcccatcgtcatctggaagtacaagagcttctgccgggacagaattgctgatgccttcagccctgcctctgtggacaaccagctgaatgcccagctggccgccggcaaccctggctacaacccctacgtggagtgccaggacagcgtgaggacagtgcgggtggtggccaccaagcagggcaatgctgtgaccctgggggactactaccagggccgccgcatcaccatcactggaaatgctgacctgacctttgaccagacagcctggggagacagcggcgtgtactactgcagcgtggtgtctgcccaggacctgcagggcaacaatgaggcctatgcagagctgattgtgctggactggctgtttgtggtggtggtgtgcctggccgccttcctgatcttcctgctgctgggcatctgctggtgccagtgctgcccccacacctgctgctgctacgtgcgctgcccctgctgcccagacaagtgctgctgcccagaggccctgtatgctgctgggaaggccgccaccagcggcgtgcccagcatctatgcccccagcacctacgcccacctgagccctgccaagaccccacctcctccagccatgatccccatgggccctgcctacaacggctacccaggcggctacccaggagatgtggacaggagcagcagcgctgggggccagggcagctatgtgcccctgctgcgggacacagacagctctgtggcctctgtgcgcagcggctaccgcatccaggccagccagcaggatgacagcatgagggtgctgtactacatggagaaggagctggccaactttgaccccagccggcccggcccccccagcggccgggtggagcgggccatgtctgaggtgaccagcctgcatgaagatgactggaggagccggcccagccggggccctgccctgacccccatcagagatgaggagtggggcggccacagccccaggagcccccggggctgggaccaggagcccgcccgggagcaggccggcggcggctggagggcccggcggccccgggcccggtctgtggatgccctggatgacctgaccccacccagcacagctgagagcggcagccgcagccccaccagcaatggaggccgcagccgggcctacatgccacccaggagccgcagcagagatgacctgtatgaccaggatgacagccgggacttccccaggagccgggacccccactatgatgacttccgcagccgggagcggcccccagctgaccccaggagccaccaccacaggacccgggacccccgggacaatggcagccgcagcggggacctgccctatgatggccgcctgctggaggaggccgtgaggaagaagggcagcgaggagcggcggcggccccacaaggaggaggaggaggaggcctactaccccccagcccccccaccctacagcgagacagacagccaggccagccgggagcggcggctgaagaagaacctggccctgagccgggagagcctggtggtgtag

SEQ ID NO: 8511 - DNA, 591 bp, synthetic construct
  misc_feature 1..591: note = source = /note="Description of Artificial Sequence: Synthetic coding sequence"
  source 1..591: mol_type = other DNA
atgagccggcggagcatgctgctggcctgggccctgcccagcctgttacggctcggggctgcccaagagacagaggaccctgcttgctgcagtcccatcgtacctcgcaacgagtggaaagcacttgcgtccgagtgtgcccagcatctctccctgcccttacgttatgtggtggtcagccatacggcagggagttcctgtaatactcccgcttcttgtcaacagcaagcacgcaacgttcagcactaccacatgaagactttaggatggtgtgacgtcggctacaactttctgatcggagaggacggcctggtatacgaaggtagaggttggaatttcaccggtgcccattctggccatctctggaacccgatgagcattgggatttcctttatgggcaattacatggatagggtgccgacccctcaggccatcagggcagcacagggcctattagcatgtggcgtggcccagggggccctgcggtctaactacgtgttaaagggacatcgtgacgtgcagcggacactgtctcccggaaaccagctctatcacctcatccagaattggcctcactaccgctcaccctag

SEQ ID NO: 8512 - DNA, 1056 bp, synthetic construct
  misc_feature 1..1056: note = source = /note="Description of Artificial Sequence: Synthetic coding sequence"
  source 1..1056: mol_type = other DNA
atggaggccttcgccctgggccccgcccggcggggccggcggcggacaagggccgctggatccctgctctcacgagccgccatcctactgtttatcagtgcttttctcgtgcgagttccttcatcagtcggacatctggtgcgattaccgagggctttccgcctgaccaaggattccgtcaaaattgtcggctccacaagcttccccgtgaaggcatacgttatgcttcaccaaaagtccccacatgtcctctgcgttacccagcagctgcgtaacgccgagctgatagacccttccttccagtggtacggacctaaggggaaggtggtgagcgtggagaatagaacagcccaaatcacatccacgggcagccttgtctttcaaaattttgaggaaagtatgtctggaatttacacctgctttcttgagtacaaacccacagtagaggaaatagtgaaacgactccagctgaagtacgccatttacgcctatcgcgagcctcactattactaccaattcaccgctcgataccacgcagccccgtgcaactctatctacaatatcagcttcgagaagaaactcctgcaaattttgtctaaacttctactcgacctctcgtgcgagatttcactcctcaagtcagaatgtcacagggtgaagatgcaacgggccggattgcagaacgagctatttttcgccttcagtgtgagcagtctagatactgagaaagggcccaaacgttgcacagatcacaactgcgaaccgtacaagaggttattcaaagctaaaaatctgatcgagcggttctttaatcagcaggtagagatcttaggaagacgggccgagcaactgccacagatatattacattgagggcaccctgcaaatggtctggattaatcgctgcttccccgggtacggaatgaatgtgcaacagcatccaaagtgcccggaatgttgcgtcatctgctccccggggtcctataatccccgcgacggaatccactgtctgcagtgtaactcaagtctggtttacggagcaaaaacctgcctgtag

SEQ ID NO: 8513 - DNA, 420 bp, synthetic construct
  misc_feature 1..420: note = source = /note="Description of Artificial Sequence: Synthetic coding sequence"
  source 1..420: mol_type = other DNA
atggagaccaacgtgttccacctgatgctgtgcgtgaccagcgcccggacccataaaagcacttctctttgtttcgggcactttaacagttacccatctctgccgcttatccacgacctactcctcgaaatcagcttccagctgtctgccccacacgaagacgccaggctaacaccagaggagctagagcgtgctagcctgctgcagatacttcctgagatgctgggcgccgaacgcggcgatattcttcgcaaggcagactcatcgaccaacattttcaatcctcggggaaacctaagaaagtttcaagacttcagcggccaggaccccaatatactactgtcccacctgttggctcgaatttggaaaccttacaagaaaagagaaacaccagactgcttctggaaatattgtgtatag

SEQ ID NO: 8514 - DNA, 606 bp, synthetic construct
  misc_feature 1..606: note = source = /note="Description of Artificial Sequence: Synthetic coding sequence"
  source 1..606: mol_type = other DNA
atgggcagcggccggcgggccctgagcgccgtgcccgccgtgctgctagtcctgacgttgcctgggctacccgtctgggcgcagaatgacacggagccaatagtcctggaaggtaaatgcttagtggtatgcgacagcaatccagctacggacagtaaaggctcttcttctagccccttaggaattagcgtacgcgccgccaactctaaggtggcctttagcgcagtgagatccactaatcacgaaccctcagagatgagcaataagacacgaattatttatttcgaccaaatcctcgtcaatgtggggaacttcttcacccttgagtccgtgtttgttgccccccgaaagggtatctatagttttagcttccatgttatcaaggtgtaccagtctcaaacaatccaagttaatcttatgctgaatggcaagcctgttatcagtgcattcgctggggataaggacgttacaagggaagctgcaaccaatggtgtgcttttgtatctggataaggaggacaaggtttacctgaagcttgaaaagggaaacctggttgggggatggcagtactcaacttttagcggctttctggtcttcccattatag

SEQ ID NO: 8515 - DNA, 264 bp, synthetic construct
  misc_feature 1..264: note = source = /note="Description of Artificial Sequence: Synthetic coding sequence"
  source 1..264: mol_type = other DNA
atgaaggtgctgcgggcctggctgctgtgcctgctgatgctgggcctggcactgcgaggggcagcttcacgcactcacagacattcgatggaaattcgaacaccggatatcaatcctgcatggtacgcctctcgaggaatccggcccgtcggcagattcggacgccgcagagcaacactcggagatgtgcctaaacctggactccgcccccgattgacatgttttcccctcgagggcggtgcaatgtcatcccaggacggctag

SEQ ID NO: 8516 - DNA, 1098 bp, synthetic construct
  misc_feature 1..1098: note = source = /note="Description of Artificial Sequence: Synthetic coding sequence"
  source 1..1098: mol_type = other DNA
atgcccggcggcaagaaggtggccggcggcggcagcagcggcgccacacccacaagcgccgcggccactgctcccagcggagttcggcggcttgaaacgagtgaaggaacatcggcccagagagatgaggaacctgaggaagagggcgaggaggacttgagggacgggggcgtaccctttttcgtcaatagaggtggactgcccgtggacgaggcaacctgggagcggatgtggaagcacgtcgccaaaattcaccctgatggagagaaggtggcccaaagaatcaggggcgccactgaccttcccaaaattcccatcccctcagtgccgacatttcaaccttcaaccccagtgcctgaaagactggaagccgtccagagatatattcgggagctacagtataatcatacagggacccaatttttcgagattaaaaagtctcgacctctcaccgggctcatggacttagcaaaggaaatgacgaaagaggcactgcccatcaagtgtctggaggcagtgatcctggggatttacttaacaaatagtatgccaacattggaaagattccctatttcttttaagacttacttctctggcaactacttccggcatatcgtgctgggggtgaactttgcaggccggtacggcgctctcggaatgtcaagacgagaggacttaatgtacaagcctcccgcttttcgcacactgagtgaactagttcttgactttgaggctgcttatgggagatgctggcatgtgctgaagaaggtgaagcttggccaaagcgtgtcccatgacccccatagcgtcgaacagattgagtggaaacatagtgtcctagacgtggaaagattgggccgggacgattttcgaaaagagcttgagcgccacgccagggacatgaggttgaagatcggaaagggcaccgggcccccgtcaccgaccaaagacaggaagaaggatgtatcatccccacagagggctcagtcttcaccccacaggcgcaactctaggagcgaacgacgcccctcgggggacaagaagacatcagagccaaaagcaatgcccgacttgaacggatatcagatccgcgtctag

SEQ ID NO: 8517 - DNA, 1377 bp, synthetic construct
  misc_feature 1..1377: note = source = /note="Description of Artificial Sequence: Synthetic coding sequence"
  source 1..1377: mol_type = other DNA
atggcctgggccagccggctgggcctgctgctggccctgctgctgcccgttgtaggtgcatcaacacctggcacggtggtgcggttgaataaagccgctttatcatatgtgtccgagatcggcaaggcccctttgcagcgggctctacaggtgactgtgccccactttttagactggtcaggcgaggcactgcagccaacccgcatccggatactcaacgtccatgttccccgcctgcatttaaaattcattgccggctttggtgttcgactgctggccgccgccaactttaccttcaaggtgttccgggcccctgaaccgctcgagctcacgctgcccgttgagcttctggctgatactagagtgacacaatcatccattagaacaccggtggtcagcatatccgcttgttccctgttctccggtcacgccaatgaattcgacggcagtaattcaacgtcccacgctctgttagtgctggtccagaagcacatcaaagcagtgctgagcaacaaactttgcttgtctattagcaatctggtccaaggcgtgaacgtccacctgggcacgcttattggactgaatcccgttgggccagagtcacagatccgttactcaatggtctccgtccccaccgtgacctctgactatatttcgctggaggtgaacgcggtcctgtttttgctggggaagcccattatactgcccacagacgcaactccctttgttctgccaagacatgtaggaacggaaggtagcatggccaccgtaggcctgagccaacaactgttcgactccgccctcctgctgttacagaaagcgggtgcgctgaatctcgacattacaggccagctccggagcgatgacaatctgctgaataccagcgctctaggccgcctcattccggaggtggccagacaatttccagaaccaatgccggtcgtgctgaaagtgagactgggcgcaacccctgtggctatgttacatacgaacaacgcaacgctccggttgcagcccttcgtggaagtcctggcgaccgcatccaattcagcattccagtccctgttttctctagacgtcgtggtgaatttgcggctgcagctatcggtgtccaaagtcaagctccaggggacaacctcggtgctgggggatgtccaactgaccgtcgcttctagcaacgtcggattcatagatacggaccaggtgcggacgttgatgggaacagttttcgaaaaaccattgctcgatcacctcaacgcgctgttggccatgggaatagctcttcccggtgtggtgaaccttcactacgttgctccggagatattcgtatacgaaggatatgtggttatctcatcaggtttgttttaccagagctag

SEQ ID NO: 8518 - DNA, 1815 bp, synthetic construct
  misc_feature 1..1815: note = source = /note="Description of Artificial Sequence: Synthetic coding sequence"
  source 1..1815: mol_type = other DNA
atgatgcgggccgtgtgggaggccctggccgccctggccgccgtggcttgcctggtaggagctgtgagggggggcccaggactctcaatgtttgcggggcaagcagcgcaaccagatccttgttcagatgaaaatggacacccccggagatgcattccagactttgtcaatgccgcctttggcaaggacgtgcgggtgtcttcgacttgcggacgtcctcccgccaggtactgtgttgtgagtgaacggggagaggagaggctgcgatcctgtcatttgtgcaatgctagtgaccccaaaaaagctcaccctcccgcttttctgactgatttaaataacccccataacctgacatgttggcagtcagagaattatctgcagtttccgcacaatgttacccttactttaagcctaggaaaaaaattcgaggttacttacgttagtctgcagttttgcagtcctcggcctgagtcaatggcgatctataaatctatggattacggccgaacatgggtgccattccaattttactcaactcagtgcagaaagatgtacaatcgacctcacagggccccgattaccaagcagaatgagcaagaagcagtatgtaccgattcgcacactgatatgcggcctctgagcgggggcttgattgcattctccactctcgatggccggccatctgcacacgacttcgacaacagtcccgtgttgcaggactgggtcactgcaacagacattagagtggcattttcccgccttcatacctttggcgacgagaacgaagacgactccgagcttgctagggattcctacttctacgctgtgtccgacctgcaggtagggggccggtgcaagtgcaacggccacgcagctaggtgcgtgcgggatcgggatgacagcctggtttgcgactgcagacacaatacggccggtcctgagtgcgatcggtgcaaaccttttcattacgatcggccctggcagcgggctaccgctagggaggccaacgagtgtgtggcgtgcaactgcaacctgcatgccaggcggtgtaggtttaatatggagctctataagctgtcaggacggaagtctggaggtgtatgtttgaactgtcgtcacaacaccgccgggcggcattgccattattgcaaggagggctactatagggatatgggcaaacccattacgcaccggaaagcttgtaaggcttgtgactgccaccctgtcggagcagctggcaagacatgcaaccagacaaccgggcagtgcccctgtaaggacggggtcaccggcattacttgtaatcgttgcgctaagggttaccagcaaagtcggtccccaatcgccccatgtattaaaattcccgtggcgcctcccacaacggccgcaagctcagtcgaggagccggaggattgtgactcttattgtaaggcaagtaaggggaagttaaaaattaatatgaagaaatattgtaaaaaagattatgcagtccaaatccatatcctgaaggctgataaggcgggagattggtggaagttcactgtgaacatcatctctgtctacaagcaggggacaagccgcattagaaggggcgaccagtcactgtggatacgctcccgcgacattgcctgtaagtgtccaaaaataaaaccgctgaaaaaatacttgctgttgggcaacgctgaagatagccctgaccagtctggcatagtggccgacaaaagttccttggtcatccagtggcgtgacacttgggcaaggcgacttcgtaaattccagcagcgcgagaaaaagggtaaatgtaaaaaggcctag

SEQ ID NO: 8519 - DNA, 675 bp, synthetic construct
  misc_feature 1..675: note = source = /note="Description of Artificial Sequence: Synthetic coding sequence"
  source 1..675: mol_type = other DNA
atgcccggccgggcccccctgcggaccgtgcccggcgccctgggcgcctggctattgggagggctctgggcatggactctgtgtggtctatgtagtctgggtgccgttggagctccgaggccttgccaggctcctcagcagtgggaaggtaggcaggtgatgtaccagcagagttccgggcgcaactcccgggctctgttatcttacgacggattaaaccagagggtgcgggtgctggacgagagaaaggcactaataccgtgcaaaaggttatttgagtatattttgctttataaggacggagtgatgtttcagattgatcaggctactaagcaatgcagcaagatgaccttgacccagccttgggaccccctcgacatcccacagaactccacattcgaagaccagtacagcatcgggggacctcaagagcagattacagtacaggagtggtctgatcggaagtccgcacgcagttatgaaacttggataggaatctacactgtcaaggattgttacccagtgcaggaaacattcacgatcaactatagcgttatcctgtctacccgtttcttcgatatccagctgggcattaaggatccctcagtcttcacccccccctctacctgccagatggcccagctggagaaaatgtccgaagattgctcctggtag

SEQ ID NO: 8520 - DNA, 5106 bp, synthetic construct
  misc_feature 1..5106: note = source = /note="Description of Artificial Sequence: Synthetic coding sequence"
  source 1..5106: mol_type = other DNA
atgggcttcctgcccaagctgctgctgctggccagcttcttccccgccggacaggcatcatggggagtctcgagtccgcaggacgtccaaggggttaaaggaagttgtctgttgatcccatgcatattctccttccccgcagacgtagaggtgccagatggtatcaccgcgatatggtactacgactacagtggccagcggcaagtggtatcgcactccgcggaccccaagttggtcgaagccagatttcggggccgcacagagttcatggggaatcctgaacacagggtttgcaatttactccttaaagatctgcaacccgaagacagcggatcttataactttcgtttcgagataagtgaggtgaaccgttggagcgacgtcaaaggaaccctggtgaccgtcaccgaggagcctcgagtccctacaattgcttcccccgttgagctcctcgagggaactgaggttgatttcaactgctcaaccccctatgtctgcttgcaagagcaggttcgtctgcagtggcaagggcaggatccagcgaggtctgtgaccttcaactcacagaagtttgagccgactggcgtggggcacctcgaaacattgcatatggccatgtcatggcaggaccatggccgcattctgaggtgccagctgagcgtcgctaaccacagggcccagagcgagatccacctccaggtcaagtatgcacccaaaggggtgaagatcctgctgtcaccgagcggaaggaacatattgccgggagaactcgtgactcttacttgccaggtcaactcttcctatcccgccgtgagcagcattaagtggctaaaagacggggtgcggctgcagactaagacgggcgtgctgcatctcccacaggccgcctggtcggacgccggagtgtacacctgccaggccgagaatggcgtggggtctttggtgtccccccccatctcactgcacatcttcatggcggaggtccaagtctctcccgccggaccgatccttgaaaaccagactgtgacccttgtatgtaatactcctaatgaggcaccatctgatttgagatacagctggtacaagaatcacgtccttctcgaagatgctcactcacatacgctacgtttacacctggccaccagagccgatacaggattttacttttgtgaagtgcagaatgtgcatggatctgaacggtccggccccgtaagcgtggttgtgaaccaccccccccttactcctgtgctcacggctttcctagagacccaagcaggattggtaggaattctgcactgtagcgtggtgtccgagcccctggcaaccctagtcttgtcacatggtgggcacatcctagcaagtacctctggagattctgaccattctcctcgattctcaggcacgagcggtccaaactcactccggttggaaattcgggacttagaagagaccgacagtggagaatacaaatgtagcgccacgaactctctcggtaatgccacttcaactctggacttccacgcgaacgctgcacgactacttatatcacccgccgccgaggttgtcgaaggccaggcagtaaccctgagttgcagatccgggctgagccccacgcccgacgctcgtttcagttggtacttaaatggggcactgctccatgagggccccggatcctcgctcctgctccccgcagcttcttccaccgacgctggaagttatcattgtagggcccgggacggacactccgcatctggcccttcttctccggcagtgctcacagttctgtatcccccaaggcagcctacctttaccacccgcctggacctagacgccgcaggagcgggcgctggccggcgaggcctactgttgtgtcgcgtggacagcgacccacccgctaggttgcagttgcttcataaagatagggtggtcgctacgagcctaccttcaggcggcgggtgttcaacctgcggcgggtgttcacccagaatgaaggtgactaaagccccaaatctgttaagagtagagatccacaaccctctcctcgaggaggaggggctctacctctgcgaagcttccaacgctctgggcaacgctagcaccagtgctacatttaacgggcaagcaactgtgctagcaattgctccttcgcacaccttgcaggagggcaccgaggcaaaccttacctgtaatgtatctcgcgaggcagccggctcgccagctaacttttcgtggttcaggaatggtgtgctctgggctcagggaccgttggagacagtgaccctgttgccagtggcacggaccgacgctgctctgtatgcctgtagaatccttactgaggctggcgcccagctatccacaccagtgctgctatcagtcctctatcctccggaccggcccaagctttccgcacttctcgacatgggccagggccacatggcccttttcatttgtaccgtggattctcgtcctctggccctgctggccctgtttcacggcgaacacctgcttgcgacctcccttggtccccaggtacccagtcacggaagattccaggctaaggcagaggcaaattcccttaagctggaggtacgcgaactgggattgggggattcggggtcctaccgttgcgaggctaccaatgtgttgggctcctctaacacaagcctgttctttcaagtgcgaggagcttgggttcaggtttcaccgagtccagagttacaggaagggcaggcagtggttctgtcatgtcaggtgcacacaggcgtccctgagggaacgagctacaggtggtacagggatgggcaacctttacaggagtcgacatctgccaccctgcgcttcgccgcgatcactctgacacaggccggcgcttaccactgtcaggcccaggctcccgggagcgcaaccacgagtctcgcagctcctatctcgctccacgtcagttatgccccaaggcacgtgaccctgacaaccctgatggataccggacctggcaggcttggcctactgttgtgtcgagtggactctgaccctccagcccagctgaggttgctacacggagaccgcctagtagcaagcaccctgcagggggttggagggcccgagggatcgtctcctcggttgcacgtagccgtagcccctaataccctgcgtttggaaattcacggggccatgctcgaggacgaaggagtctacatctgtgaagcctcaaacacattgggccaggcttcggcatctgccgatttcgatgcccaagccgtgaacgtgcaagtgtggccgggagccactgtaagagaaggacagctggtgaatctgacctgtctcgtctggacgacacatcctgcccagcttacctacacctggtatcaggatgggcaacagcgattggacgcacattccatccccctgcctaacgtgactgtccgcgacgccacatcttataggtgcggtgtggggccgcccggtcgtgccccccgcctgtcccggcctatcacacttgacgtgctgtatgcccccaggaatctgaggcttacctatctcctggagtcacatggtggtcagttggccctggtcctttgtaccgttgattctaggccacccgcacaattagcactctcacatgccgggaggctgcttgcatcttccacagcggcatcagtgcccaacacactgcgcttggaactgcgagggccacagccccgtgatgagggtttttacagctgttccgcccgatcacccctgggccaggccaacacatccttggaactgcgcttagagggcgtgcgggttatcctggcccctgaggccgccgtcccagaaggagctcctattacagtgacttgcgcagatccagcggcgcacgcccccacattgtacacatggtatcacaatggccgctggcttcaggagggcccagctgccagcctgtcctttctggttgccactagggctcatgccggcgcttactcttgtcaagcccaagatgctcagggtacccggtcttctagaccagctgcactccaggtcttgtatgccccccaggacgccgtcctctcaagcttccgggattcaagagcacggtcaatggcggttatacagtgcacagtggactcagagcctcccgctgaactggccctgagccatgacggtaaagtattagccacctcgtccggtgttcattccctggcaagcggaactggacacgttcaggtggctagaaatgcccttcgcttacaagtgcaggacgttcctgcaggcgacgatacgtacgtgtgcaccgcccaaaacctgttgggctctattagtacgataggacgcctgcaggtggagggggcacgcgtagtcgccgagcctgggttggatgtacctgagggggctgcactcaatctgagctgcagactgttgggaggtccaggacccgttggcaactctactttcgcatggttttggaatgacaggcggctgcatgcagaaccggtgccaaccctcgccttcacccacgttgcacgagctcaggctgggatgtatcattgtctggctgaactgccaaccggggcagctgccagtgcgcctgtgatgcttagagtgctgtaccccccaaagacccctacaatgatggtgtttgtagagccagaaggaggcctgagaggcattttagactgcagggtggatagtgaaccactggcgagcttaaccctccacctgggatctcgtttggtggcctcgtcacagcctcaaggagcccctgcagagccccacatccacgtcctggcctctcccaatgccctcagggtagatatcgaagccctgcgtccttccgaccagggtgaatacatctgtagtgctagcaacgtgctcggttccgcttcgactagcacttacttcggagttagagctcttcatcgactgcaccaatttcagcagctgctttgggtgctcggtttactggtcggactactgctgctgttgcttggcctgggcgcatgctacacctggagttctctcatactgatgcagcctcacgtcagaccccaaccagtgccgcatccgtgggccgaccagtggtgttgtctccccagcggtggagaaagcggccaaaacctgtag

SEQ ID NO: 8521 - DNA, 708 bp, synthetic construct
  misc_feature 1..708: note = source = /note="Description of Artificial Sequence: Synthetic coding sequence"
  source 1..708: mol_type = other DNA
atgaccgtgctggcccccgcctggagccccaccacctacctgctgctgctcctgctgctgagctccggactgtcgggtacgcaggattgctctttccaacactccccaatttcgtcggacttcgctgtgaagataagggaactgtcagattaccttctccaggactacccagtgactgtagcctccaacctgcaggatgaggagctctgtggaggcctttggagacttgtgttagcgcagcggtggatggaacgcctcaaaaccgtcgccggcagcaagatgcaggggctcctggaaagagtgaacaccgagatccatttcgtgactaagtgcgcttttcaaccgccccccagttgtttacggttcgtgcagaccaacattagccgtctcctgcaagagaccagcgagcagctcgtggcactgaagccatggataactcgccaaaatttttcccgctgtctggaactccagtgccagcccgactcttctactctgcctccaccttggtcaccccgtccccttgaagccaccgcaccaacggccccacagccccccctgctgctgctgctgctgctgcctgtcggattgttgttactggctgctgcttggtgtcttcactggcagcgtactaggcggaggaccccaaggcccggtgagcaggtgccgccagtaccaagccctcaggatctcctgctggtggaacactag

SEQ ID NO: 8522 - DNA, 3297 bp, synthetic construct
  misc_feature 1..3297: note = source = /note="Description of Artificial Sequence: Synthetic coding sequence"
  source 1..3297: mol_type = other DNA
atgaccctgcaggagctggtgcacaaggccgccagctgctacatggatagggtggccgtctgtttcgacgaatgtaataatcagctccccgtttactatacctacaagacagtggttaatgccgccagtgagctcagcaatttccttctcctgcattgcgattttcagggaatccgcgagatcggactgtattgtcagcctgggatcgatctcccaagctggattttggggatacttcaggtgcctgctgcctatgtgcccatagaaccagattcaccaccctccctatctacccactttatgaagaaatgtaaccttaagtatatactggtcgagaagaagcagattaacaaatttaagagtttccacgaaactctgttgaactatgacacttttacagtcgaacataatgatctggttctgtttcgccttcattggaaaaacacagaggtcaatctaatgcttaacgacggaaaagagaagtacgagaaagaaaaaataaagtcaatcagcagtgagcacgtcaacgaggagaaagcagaggagcacatggacctgagactaaaacattgtctggcgtatgtgttgcacacctcaggaacgaccggtatacctaagatagtccgagtcccccataaatgtatcgtaccaaacatccagcacttccgcgttctgttcgatatcacacaagaggacgtgctcttcctggcttcaccactgacatttgatccgagtgttgtcgagatttttttagcattgtcctccggtgcttcactgctgattgtccccacctctgtgaagctcctgccctccaagctggcgtccgtccttttctcgcaccatagagtgaccgtcctgcaggctacgcccacacttttgcggcgctttgggtctcagcttattaagtcgacggtcctttcagcaactacatcactccgtgtcctcgcccttggaggtgaagccttcccctccctcacagtcctgcggtcctggcgcggtgagggaaataagacacagatttttaatgtttacggcattacagaggtgagcagctgggctaccatctatcggatccccgaaaagaccctgaacagcaccctcaaatgtgagctgccagtgcagttaggctttccacttctgggaaccgtggttgaagtgcgggatacaaacggttttacgatacaagaggggagcggccaagtctttctgggagggagaaatcgggtctgcttcctggatgacgaagtgaccgtacccctcgggacaatgagggccacaggggattttgtgacagtgaaggatggtgagattttttttcttggcaggaaagactcccagatcaaacgtcacggtaagcgactgaacatcgagttggtacagcaagtcgccgaagagctacaacaggtcgagtcttgcgctgtcacctggtacaaccaggagaaattgatcctctttatggtctcgaaagacgcctcagtcaaggagtacattttcaaagagctccagaagtatctgccaagccatgccgtaccggacgagctggtcttaattgattcactgccctttaccagccacggaaagatcgatgtttctgagctgaataagatttatttaaattacataaacctcaaatctgaaaataagctgagcggcaaggaagacctgtgggagaagttgcagtatttatggaaaagtacccttaatctgccagaagatctcctcagagtgccagacgaatccctgtttctcaattctgggggcgactccctcaagtccatccgcttgttgtccgagatcgaaaaattggttggcacgagtgtgccagggttactggaaattatcctgtctagctctattctcgaaatctataatcacattctgcagacagtcgtcccggacgaagatgtaacctttcgcaagtcttgcgctacgaaacgcaagctgtctgatattaatcaagaagaggccagcggaacgagcctgcatcaaaaggcaatcatgacttttacctgccataacgaaattaacgcgttcgttgtgctttcccgcgggagtcagatcttgtcactcaacagcacacgcttcttgaccaaactgggccattgctcgtcagcatgtccctccgactcggtcagccagactaacatacagaatctaaaaggcctaaacagtcccgtgttaataggaaagagcaaggatccctcctgcgtagccaaggtgagcgaagaaggcaaacctgccatcggaactcagaaaatggagcttcacgtgcgatggagatctgataccggaaagtgtgtggacgcttcgccgctggttgtcattcctacctttgacaagtctagcactaccgtatacatcggctctcattctcacaggatgaaggccgttgatttctattcggggaaggtcaagtgggaacagatcctgggagataggatagagtccagcgcttgcgtctctaagtgcgggaacttcatagtggttggatgctataacggcctcgtgtatgtcctgaagagcaactctggcgagaaatattggatgttcaccaccgaggatgcagtaaagtcctcggctaccatggaccctacaactggactcatttacatcggcagccacgaccagcatgcttatgcactagatatctatagaaagaaatgcgtgtggaagtctaaatgcgggggtacagtgtttagtagtccatgcctgaatctgatcccacaccacttatacttcgcgaccttgggaggacttttgctggccgtcaatcctgccaccggaaacgtaatctggaagcacagctgcggtaaaccattattctctagcccacaatgttgttctcagtatatctgtatcggatgtgtggacgggaacctcttatgctttactcattttggtgagcaggtgtggcagttctccacaagcggcccgatattctcctcaccctgcaccagtccgtccgagcagaagatcttctttggatcacatgactgttttatttactgttgcaacatgaaagggcatctccagtggaagtttgagacaacaagcagagtctacgctacgcccttcgccttccataactataacggtagcaacgaaatgctcctggcagccgccagcacggatggaaaggtgtggattctggaaagtcagagtggccagctgcaatcggtttacgaactccccggtgaggtgtttagctcgcctgtggttctggagtcaatgctaataataggatgccgagacaactacgtatactgtctggacctgctggggggcaaccagaagtag

SEQ ID NO: 8523 - DNA, 774 bp, synthetic construct
  misc_feature 1..774: note = source = /note="Description of Artificial Sequence: Synthetic coding sequence"
  source 1..774: mol_type = other DNA
atggccagcaagatcggcagccggcggtggatgctgcagctgatcatgcagcttggatctgtgctcctaactaggtgccctttctggggttgtttttcacagctgatgttgtacgcggaaagagctgaggcacgcagaaaaccagatatacctgtgccctacttgtactttgacatgggagcagccgtgttgtgtgcctcctttatgtctttcggcgttaagagaaggtggtttgccctcggtgccgcgcttcagcttgccatttctacgtatgcagcctacatcgggggatatgtccactatggcgactggctgaaggtgagaatgtattcccgtaccgtggcaatcataggagggtttctggtccttgcttccggcgccggggaattatatcggcgcaagcctcggtctcgcagtttgcaatccaccggccaagtgtttctgggcatctatttgatttgtgtagcctacagcctacagcatagcaaggaggacagattggcttatttgaatcatctcccgggaggcgaactgatgatacagctgttttttgtgttgtatggaatactcgcactagcttttttgtccggttattacgtcaccctggccgcccagatcctcgcagtgctgcttccccccgtcatgttgctcatcgatggcaacgtggcatactggcacaatacaaggagggtggagttctggaaccagatgaagctgctgggtgagtcagttgggatctttggcacggccgtgatccttgctacagatggctag

SEQ ID NO: 8524 - DNA, 2118 bp, synthetic construct
  misc_feature 1..2118: note = source = /note="Description of Artificial Sequence: Synthetic coding sequence"
  source 1..2118: mol_type = other DNA
atggagaagccccggagcatcgaggagacccccagcagcgagcccatggaagaggaagaggatgacgatctggagctgttcgggggatacgactcattcaggagttacaacagcagtgttgggtccgagagcagttcatatcttgaggagtcaagcgaagccgaaaatgaggaccgggaagcaggcgaactcccaacttcccccctgcacctgttatctcccggcacaccacgtagcctggacggcagcggcagcgagcccgcggtatgcgagatgtgcggaatagtcggtacgagggaggcctttttctcaaagaccaagagattctgtagcgttagctgcagcagatcttatagttcaaacagcaaaaaggcctctatactcgcccgactacagggcaaacctcccacaaagaaagcgaaggtgctgcataaggctgcctggtcagcgaaaatcggtgcatttctacactcgcaaggaactggacagctggccgacggcacccctaccgggcaggatgcgctcgtactggggtttgactggggaaaattcctgaaggaccacagctacaaagccgcccccgtctcctgtttcaagcatgtacctctatacgatcaatgggaagacgttatgaaggggatgaaggttgaggtgcttaatagcgacgccgtgctgccctcaagggtctattggattgccagtgtaatccaaacagccggttatagggtgttgcttcgctacgaaggtttcgagaatgatgcctctcatgacttttggtgcaatctgggtaccgtggacgtgcatcccatcggttggtgcgcaatcaactccaaaattctcgtacccccaaggacaatacatgcaaagttcactgattggaagggatatctaatgaagcgcctggtcggtagtagaaccttacccgttgatttccacattaaaatggtggaatcaatgaagtaccctttccgacaaggaatgcgactggaggtggtagacaaatcacaggttagccgcacaagaatggctgtggtggacactgtcatcggtgggagactaaggttgctgtatgaggacggtgactctgacgacgatttttggtgtcacatgtggagtcctctcatacatccagtgggctggtcgcgcagggtgggtcacggaattaagatgtcggagcgcagatcagacatggcgcaccatccaacattcagaaaaatttattgtgatgctgtcccttatctttttaaaaaagtgcgtgccgtatacacggagggcggatggtttgaagagggaatgaagctagaagcaatcgaccccctcaatctgggaaatatatgcgtggctactgtgtgcaaagtcctgctggacgggtatctgatgatctgcgtggacggaggcccaagtactgatggactggactggttttgctaccacgcatctagccatgccatctttcctgctaccttttgccagaaaaatgacattgagctaactcctccgaaaggctatgaagcacaaacttttaattgggagaattacttggagaagacgaagagtaaagctgctccttcgagactgttcaatatggattgccctaatcatggcttcaaagtgggcatgaaactggaagccgtcgatcttatggagccaagacttatatgtgtggccactgtgaaaagggtggtccacagactgcttagcattcactttgacggctgggactcagagtatgatcagtgggttgattgcgagtctccagatatatatcctgtcggctggtgcgagcttaccggctatcaactgcagcctcctgtggccgcagagcctgccacgcccttaaaagcgaaagaggccacgaaaaagaaaaaaaagcaattcggcaaaaagaggaaacggatccctccgaccaagacccggcccctgcgccagggatctaaaaaacctctgttggaagatgacccgcagggggcacgcaagatctcatccgagcccgtcccaggcgagatcatagccgtgcgtgtcaaggaagaacatctggatgtggcttcacctgacaaggcctcgtccccggaactgcccgtcagtgttgagaatattaaacaagagactgatgattag

SEQ ID NO: 8525 - DNA, 2103 bp, synthetic construct
  misc_feature 1..2103: note = source = /note="Description of Artificial Sequence: Synthetic coding sequence"
  source 1..2103: mol_type = other DNA
atgagccggcggacccggtgcgaggacctggacgagctgcactaccaggacactgacagcgatgttcctgaacaaagggacagcaagtgcaaggtgaagtggacccacgaagaagacgagcagctcagggctctcgtccgccagttcggacaacaggactggaaatttcttgcatcacactttcctaatcgtaccgaccagcaatgccagtataggtggttaagggtgctgaacccagacttggtgaagggcccatggacaaaggaggaggaccagaaggtgatcgagctggtaaagaaatacgggaccaagcagtggacgctgatcgccaagcatctcaaagggcgtcttggaaagcagtgtcgcgaacgatggcacaaccatctcaaccccgaagtaaaaaagagctgttggaccgaggaggaggataggatcatttgtgaagcccacaaggttctggggaacaggtgggctgagatcgccaagatgcttccagggcgaacagataacgcagtcaagaaccactggaactctacaatcaaacggaaagtagatacaggaggattcctgtctgagtctaaggattgtaaaccgccagtttatctgctccttgaactcgaagacaaagacgggctgcagtccgctcaaccgacagagggacagggcagtttactcacaaattggccaagtgtacctcccactataaaggaggaggaaaattccgaagaagaactggcagcggctactacaagtaaagaacaagaacctatagggacagatctggacgccgtgcgcacccctgaacccctcgaggagttccccaaacgcgaagatcaggaagggtccccccccgaaacctccctcccttataagtgggttgttgaagccgcaaacttactgatccctgccgtcgggtcttctctgtctgaggcccttgatctaattgagagcgacccggatgcatggtgtgacctgagtaaatttgacctcccagaagaaccttcagcggaggatagtattaataacagcctggtgcaattgcaggctagtcaccagcagcaggtcttaccacctagacagccttcagccctggtgccctccgtcactgaatacaggctggatggtcataccatctcagatctgtctcgaagctcacggggtgaactcatcccaatttcgccctctactgaggtgggaggttcagggattggaactcccccatcagtcctcaagcgccagcgcaaacgccgggtggccctgtctccggtcaccgagaactccaccagcctgtcctttttagatagttgcaactccctgacgccaaagagcacacctgtgaagacactaccttttagcccttcgcagttcctcaacttttggaataagcaagacacactcgaactggaatccccaagtctcacctccacccccgtgtgctcccagaaggtggtggttacaacgcctctacacagggacaagacccctctgcaccagaagcatgcagcctttgtgactcccgaccagaagtactccatggacaacactccccatacccctaccccattcaaaaatgctctggaaaaatacggaccgctgaagccactgccccagaccccgcacctagaggaggatctcaaggaggtccttagatctgaagccggcattgagctgatcatcgaagacgacatcagacctgaaaaacagaagcgtaagcccggcttacgacgaagcccaattaagaaagttcgaaaatcattggccctcgatatagtagacgaagacgtgaagctcatgatgtcaaccctgcctaagtccctcagcctgcccactactgctccctcaaactcgtcttcactgacattgtccggcatcaaggaagataatagcctactgaatcagggctttctacaggctaagcctgaaaaggcggcagttgcccaaaagccacgttcccattttactactccagcccccatgtcctctgcatggaagacagtggcatgcggcggcacccgcgaccagctgttcatgcaggagaaagccagacagcttctgggcaggctgaaaccatctcacacatcccggaccttgatcctgtcctag

SEQ ID NO: 8526 - DNA, 528 bp, synthetic construct
  misc_feature 1..528: note = source = /note="Description of Artificial Sequence: Synthetic coding sequence"
  source 1..528: mol_type = other DNA
atgctgcggaccgaggtgccccggctgccccggagcaccaccgccattgtgtggagctgtcatttaatggctacagctagcgccatggccggtccatcttcggagacaacatcagaggaacagttgattacacaggaaccaaaggaggcaaattccactacaagccagaagcagtcaaaacaaagaaagagaggccgccacggtcccagacgctgccatagcaattgtcgtggcgactcatttgccacttatttccggagggtcttgaagcaggtccatcagggactgtccctgtcccgggaggctgtctccgtcatggacagccttgtgcatgacatcttggacaggatcgcaaccgaggccggaagactcgccaggtctaccaaaagacagaccattacggcatgggagactaggatggctgtgcgtctgctgctgccaggccaaatggggaaattggctgaatccgaaggcaccaaggccgtgcttagaacttccctgtacgccattcaacagcagagaaagtag

SEQ ID NO: 8527 - DNA, 624 bp, synthetic construct
  misc_feature 1..624: note = source = /note="Description of Artificial Sequence: Synthetic coding sequence"
  source 1..624: mol_type = other DNA
atggcccccttcgagcccctggccagcggcatcctgctgctgctgtggctcatcgccccctctcgggcctgcacgtgcgttccccctcatccccagactgccttttgtaactccgaccttgtgatccgggccaaattcgttgggactcccgaggtgaaccaaaccacgctctatcagagatatgagatcaaaatgactaaaatgtataagggattccaggccctgggggatgcagctgacataagattcgtctatacaccggctatggagagtgtctgtgggtactttcaccgatcgcataacaggtccgaagaattcctgatcgcaggtaaattacaggacggactgctgcatatcacaacatgctctttcgttgcgccttggaatagcctgagcctagcacagaggcgtggcttcacaaagacctatacagtggggtgcgaagaatgcaccgttttcccctgtttatccattccctgcaaattacaatcgggcacacattgcttgtggactgatcagctcctgcagggctccgaaaaaggtttccagagcaggcacctcgcatgcttgcctagagaacccggattatgcacctggcagtctctgaggtcccagattgcttag

SEQ ID NO: 8528 - DNA, 1686 bp, synthetic construct
  misc_feature 1..1686: note = source = /note="Description of Artificial Sequence: Synthetic coding sequence"
  source 1..1686: mol_type = other DNA
atggccgaccacaaccccgacagcgacagcaccccccggaccctgttgcgcagagtgctggatacagctgatcctaggacgccgcggagacctaggtccgcgcgcgccggtgcaaggcgcgccttgctagaaacagcttcgcctagaaagctgagcggtcagactcgcaccattgcccgggggcggtctcacggcgccaggagtgttggacggagcgcccacattcaggccagcggccacctggaggaacagacccccagaaccctcctcaagaatatcctgctcacagccccagaatcttctatactcatgcctgaaagcgttgtgaaacccgttcccgccccccaggctgtccaaccctcaagacaggagagcagctgtggctccctggaactgcaactgcccgagctcgaaccacctactactttagcacccggccttttggcgccggggcgacgtaagcagcggttacgcctgagtgttttccaacagggagtggatcagggtctttcactttcccaagagccgcaggggaacgctgacgccagtagccttacacggagccttaatttaaccttcgctacacctcttcaaccccagtcagtgcagagacccggattagcgcgtagacctcccgcccgcagagcggtcgacgtgggagccttccttcgggatctccgcgacacctcactggccccaccaaacatagtgctcgaggatacccagcccttttctcaacctatggtcggaagccctaacgtgtaccattccctcccctgtacacctcacactggtgccgaagacgcagagcaggctgcaggcaggaaaacccagtcaagcgggcctggcctccagaagaactcacccgggaagcccgcccaattcctggctggggaagccgaggaagtgaatgcttttgcgctggggtttctctccacctcttcaggcgtgtcaggcgaggacgaggtcgagccattgcacgatggcgtggaagaggccgaaaagaagatggaggaagaaggggtgtccgtctcagagatggaggcaactggagcccaaggccctagtagagtggaagaggctgaaggtcacaccgaggtgactgaggctgaagggagccagggcacggcagaagccgatggacccggtgcttcctcaggggacgaggacgcaagcggcagagccgcctctccggaatcggcctcctctacccctgagtctttacaggctagaagacaccaccaatttttagaaccagctcctgcaccaggcgcagcagtcctatcatcagaacctgctgaaccactgctggtgcgccatcctccgaggcctcgcacaaccggacccaggccaaggcaagacccacacaaggcgggccttagccattacgtgaagctcttttctttctatgccaagatgcctatggagcgcaaggctctcgaaatggtcgaaaagtgcttagacaagtattttcagcatctgtgcgacgacctggaagtctttgccgcccacgcaggcagaaaaacagtgaagcccgaagacctggaactgcttatgcggaggcagggactggtgaccgatcaggtatctttacatgtgctcgtggaacggcatctgcccctggaatataggcagctcctgattccatgtgcatattcgggaaactcagttttccctgctcagtag

SEQ ID NO: 8529 - DNA, 1134 bp, synthetic construct
  misc_feature 1..1134: note = source = /note="Description of Artificial Sequence: Synthetic coding sequence"
  source 1..1134: mol_type = other DNA
atgaccgacgacgagagcgagagcgtgctgagcgacagccacgagggttcagagctggaattacccgtcatccaattgtgcgggcttgtggaagaactctcttatgtgaactctgccctcaagacggaaacggaaatgtttgagaaatactacgcaaagttagaaccgcgagatcagcgccctcctcgcctgagtgagattaagataagcgccgccgactatgcccagttccgcgggaggcgtagaagtaagtccaggactgggatggaccggggagttggtttgaccgcagaccagaagcttgaactggtccagaaggaagttgctgatatgaaagacgacttgcggcataccagagccaatgcggagagggacttgcagcatcatgaagccataatagaggaggcggaaatccgctggagtgaagtcagccgcgaggtccacgagttcgaaaaggatatactcaaagcaattagcaaaaagaagggcagcattttagcaacacaaaaagtgatgaagtacatcgaagacatgaatcgtaggcgcgacaacatgaaagagaagctacgtctcaagaacgtctcactcaaagtgcaacgcaaaaaaatgctcttgcagctgcgccagaaagaggaggtgtcagaggccttgcatgatgtggacttccagcagctgaaaatcgagaatgctcagttcctggagactattgaagcacgaaatcaggagctgactcagcttaaactgtcgtctggtaacactctgcaggtcctgaatgcctacaaatcgaaactacacaaggcaatggagatctatctgaatctcgacaaagagatactgctgaggaaagagttgctagagaaaatcgaaaaggagaccctgcaagtggaagaagacagggccaaggccgaagcagtgaacaagcgattaaggaaacagcttgccgaatttcgtgccccacaagttatgacttatgttcgggagaagatattgaacgctgaccttgaaaaatcaatccggatgtgggagcgcaaagttgaaattgctgagatgtccctgaaaggtcaccggaaggcctggaacagaatgaaaattaccaatgaacagctgcaggcagattacctggctggcaagtag

SEQ ID NO: 8530 - DNA, 1548 bp, synthetic construct
  misc_feature 1..1548: note = source = /note="Description of Artificial Sequence: Synthetic coding sequence"
  source 1..1548: mol_type = other DNA
atggaggcccgggagcccggccggcccacccccacctaccacctggttcccaacaccagccagagccaagtggaagaggacgtgagctccccaccccagcggtcttctgaaaccatgcagctcaaaaaggagattagcctgttaaatggcgtgtctctggtcgtaggaaacatgataggttctggaattttcgtctcccccaaaggcgttctggtacataccgcctcatatggtatgtcattgatcgtttgggccatcgggggtctttttagtgtcgttggagccctgtgctatgctgagctgggtaccacaattaccaagtccggcgccagctacgcatacatcctggaggcatttggggggtttatagcctttatccgcctctgggtgagtctgctcgtggttgaacccaccggccaggccattatcgctattacttttgcaaactacatcattcagcctagttttccttcatgtgaccccccgtatctcgcgtgccgcctcctggcagccgcctgcatctgcctgctgacatttgtgaactgcgcctatgtaaaatggggcaccagagtgcaggatactttcacctacgctaaagtggttgcactgatcgcaatcattgtgatggggttagtcaaactgtgccaggggcactccgagcattttcaggatgcttttgaaggatcatcatgggatatggggaatttgtccctggcactgtactcggccctgttcagttattccggctgggatactctgaatttcgtgacagaggaaattaaaaatcctgagcgcaatctgcccttggccatcgggattagcatgccaatcgtcaccctgatatacatcctgacgaatgtcgcatattatacagtgttgaatataagcgatgttctcagctctgacgcagtggctgtgacctttgccgaccagacgtttggaatgttcagttggactatccccatagcagtggcactcagttgttttggtggactgaatgcctcaatctttgcaagttcccggttattcttcgtcgggtcccgagagggccatctgccagacctactgagcatgatacacattgagcgttttacacccattccggccctgctattcaattgtactatggcattaatctatctcatcgtggaagatgttttccagttgatcaattatttttctttcagctactggttcttcgtgggtttgtccgtggtgggacaactatacctacgctggaaggaaccaaaacgcccgcgcccactcaagctgagtgtgttcttcccgatcgtgttctgcatctgctccgtcttcctggtcattgtgccattgttcactgacaccattaattccctcatcggaatcggcattgccctgtctggcgttccgttttattttatgggggtttatctacctgaatcccgacgacccctgttcataaggaacgttttggcagctatcacccggggaacccagcagttatgtttctgtgtgctcaccgaacttgacgttgccgaagagaagaaggacgagagaaaaacggactag

SEQ ID NO: 8531 - DNA, 1623 bp, synthetic construct
  misc_feature 1..1623: note = source = /note="Description of Artificial Sequence: Synthetic coding sequence"
  source 1..1623: mol_type = other DNA
atgaacggcgaggccatctgcagcgccctgcccaccatcccctaccataagttggccgatttacgctatctgagcagaggcgcgtccggaaccgtgtcttcagctcgccacgccgactggagagtgcaggtggcggtgaagcacctacacatacacacaccactgcttgatagcgagaggaaggacgtccttagggaggctgagattctgcacaaggcacgatttagctatatcctgcctatcttgggtatctgcaatgagcctgagttcctcggtatagtgacagagtatatgcccaacgggagtcttaatgagctgctgcatcggaagacggagtatccagatgtcgcttggcctctcagatttcggattctgcacgaaatcgcactgggagtgaactatcttcataatatgaccccgcccctgttacaccacgacctgaaaacacagaacattcttcttgacaatgaatttcacgtgaagatcgccgattttggcctgagcaaatggagaatgatgtcattgtcccagtcgaggtcttcaaagagcgcacccgagggaggaacaattatctatatgcctcccgaaaattatgagcctggccagaagtccagagccagtattaaacatgatatatattcctatgccgtcattacctgggaggtcctctccagaaagcaaccattcgaagacgtgacaaaccccctccagatcatgtactcagtctcacaagggcatcggcctgtgattaatgaagagtcacttccgtatgacatcccccatagggccaggatgatctcactcatcgagtcaggctgggcccagaaccccgatgaacgacccagtttcctgaagtgtttgatcgagctggagccagttctgagaacctttgaagagattaccttcctcgaagctgtgatccagttaaagaaaacaaagctgcagtctgtctcaagcgcgatccatctgtgcgataagaagaaaatggagctgagcctgaatataccggttaaccacgggcctcaggaggaaagttgtgggtcaagtcagctgcacgagaattccggtagccccgagacttctcgctctttgccagctcctcaggacaatgacttcctgagccgcaaggcccaggattgctacttcatgaagcttcaccactgtccaggtaatcattcatgggactccacaattagcggcagccaaagggcggcattttgtgaccacaaaactactccctgtagctccgctattatcaacccattatctaccgccggcaactcggagcggttacagcctgggatcgctcaacagtggatccagagcaagagagaagacattgttaatcagatgacagaggcctgtctgaatcagagcctcgatgctctgctctctcgtgacctcataatgaaggaggattacgagctggtaagcactaaacctacacgtaccagtaaagtccgccaactgcttgacacaactgatatccagggggaggagtttgctaaagtaatcgtgcagaagctaaaggacaacaaacagatgggactccagccatatcccgagatccttgtcgtctcccgcagcccatctcttaatctgttacaaaacaagagcatgtag

SEQ ID NO: 8532 - DNA, 2079 bp, synthetic construct
  misc_feature 1..2079: note = source = /note="Description of Artificial Sequence: Synthetic coding sequence"
  source 1..2079: mol_type = other DNA
atgcgggcctgcgccggcagcacccgggaggccggcagcggcgcccaggatttgagtactttgctttgccttgaggaaagcatggaggagcaggatgaaaagccaccagaacctccaaaggcctgcgctcaagattccttccttccccaggaaattatcatcaaagtggagggcgaagatacaggatcccttacaatcccttcacaggaaggagttaattttaagatcgtaaccgtggacttcacaagggaagagcagggcacatggaatccagcccagcgcacactggaccgcgacgttatactggaaaatcatcgcgaccttgtgtcctgggacctcgccaccgctgtgggcaaaaaggattctacctcgaagcaacgcatcttcgacgaggaacccgctaatggagttaaaatcgaaaggttcaccagggatgacccctggcttagctcctgcgaggaggtggatgattgcaaggaccaattggaaaaacaacaagagaaacaggagatcttactgcaggaggttgcctttacccagcgaaaggccgttattcacgagcgtgtgtgtaagagtgatgaaaccggtgagaagtctggtctgaactcctctctattctcctctcccgtgatccccatcagaaatcattttcataaacacgtgtcccatgccaagaaatggcacctgaatgcggctgtgaactctcatcagaaaataaatgaaaatgaaactctgtatgagaacaatgagtgtgggaaacccccccaaagcattcacctgatccagtttacacgaacccagacgaaggacaaatgttacggcttctccgatcgaatacagtctttttgccacgggaccccactgcatatacacgaaaaaatccatggaggaggcaagacctttgattttaaagagtgtggacaggtgctgaatcctaagatttctcataacgaacagcagagaattccatttgaagagagtcagtataaatgttctgagacctcacacagttcttcacttactcagaacatgaggaataacagtgaagagaaaccattcgaatgcaatcagtgtggtaagtcattttcctggtcctctcatctggtggcacatcaaagaactcatacaggcgagaagccatatgaatgctcggaatgcgggaagtccttctcgcgaagctctcatcttgtcagtcaccagaggactcacaccggcgagaaaccatacaggtgtaatcaatgtggaaagtccttttctcagagttacgtgttggtggtgcaccaacggacgcatactggagaaaagccttacgagtgtaatcagtgtgggaaaagcttccggcagagttacaagctgatagctcaccaacgaacacataccggcgaaaaaccctacgagtgtaatcagtgcggaaagtctttcatccagagctataaactgatcgctcaccagagaatacacactggcgaaaaaccctacgagtgcaatcagtgtggaaaaagtttcagccaatcatacaaactcgtggcccaccagaggacacataccggcgagaaaccatttgagtgtaaccagtgcggcaaaagctttagttggagcagtcagctggtcgcccatcagcgcactcataccggagaaaaaccatacgaatgtagtgaatgcggcaaatcctttaatcgctcgagtcacctggttatgcatcagcggattcatactggcgaaaagccctacgaatgcaatcagtgtggtaaatctttcagccagagctacgtgctggttgtgcatcaaagaacccatacgggagagaagccctacgagtgctcccaatgcggtaaatcatttcgccaatcgagctgcttaacgcaacaccaacggacccataccggagaaaagcctttcgagtgtaatcagtgcgggaagacattttccctatccgcgcgactgattgtgcatcagcgcacccacaccggggagaagccctttacttgtatccaatgcggcaaagcttttatcaactcatacaaattgattaggcaccaggccacacatacagaggaaaaactctatgaatgtaactag

SEQ ID NO: 8533 - DNA, 942 bp, synthetic construct
  misc_feature 1..942: note = source = /note="Description of Artificial Sequence: Synthetic coding sequence"
  source 1..942: mol_type = other DNA
atggacaacaagaagcggctggcctacgccatcatccagttcctgcacgaccagctacggcacggtggcttgtcttctgacgcgcaggaaagcctagaagtagccatccagtgtctggagactgcttttggtgtgactgtagaggatagtgatctggcactgccccagacactcccagagatcttcgaggcagcagccaccggaaaggagatgccccaggatctgaggtctcccgcaagaacaccaccttcagaggaggacagtgcggaggctgagaggctgaaaaccgagggcaacgagcagatgaaggtagagaatttcgaggccgctgtgcatttctacggaaaggctattgagctgaatccagccaatgctgtgtacttttgtaaccgcgcggccgcctattcaaaacttggcaattatgctggggctgttcaggactgtgaacgagctatttgcattgacccagcttattctaaagcatatggccggatggggctcgccctcagctcccttaataaacacgtggaagctgtggcttattacaaaaaagcccttgagctggaccctgataacgagacctataagtctaatttgaagattgcagaactcaaactaagggaggccccttctcctactggcggggtaggcagctttgacatcgccgggctgctaaacaaccccggattcatgtctatggcctctaatctgatgaataatccacaaattcagcagttgatgagtggtatgataagcggtggcaataatccactcggaactcccggtacatccccgtctcagaacgatctggccagtctgatacaggccggccagcaattcgcccagcaaatgcagcagcagaacccagagctgatagagcagctcagatcgcaaattagaagcagaacaccctccgcgagtaatgacgaccagcaggagtag

SEQ ID NO: 8534 - DNA, 1584 bp, synthetic construct
  misc_feature 1..1584: note = source = /note="Description of Artificial Sequence: Synthetic coding sequence"
  source 1..1584: mol_type = other DNA
atgtaccagcccgaggacgacaacaacagcgacgtgaccagcgacgacgacatgacccgaaacagaagggagtcgtcccctcctcactctgtgcattccttctctggcgatagagattgggacagaaggggcaggtctagagacatggaacctcgcgatcgatggtctcacacacgcaatccgcgcagcaggatgcctccacgcgatctttccctgccggtggttgccaagacttccttcgagatggacagagaggacgacagagattcaagggcttatgagagcagatcccaggacgcagaatcctatcagaatgttgtggatctggcggaagatcgtaaaccccataacacgatccaggacaatatggaaaactacagaaagcttttgagcctgggatttctagctcaggactctgttcccgcagaaaaaaggaatacagagatgctagacaacttaccatccgcagggtctcagttcccggatttcaaacatttaggcaccttcttagtattcgaggagcttgtaacgttcgaagatgtgcttgtggacttttcccccgaggagctctcaagcctttctgcagcccaacgaaacctgtacagagaagtaatgctggagaattacagaaatctagtgtcactggggcatcaattttctaagcccgacattatctctagactggaggaggaggagtcctatgcaatggagactgactcccggcatacagtgatttgtcagggagaaagccatgacgacccattggagcctcaccaggggaatcaggagaagcttctaacccccataactatgaacgacccaaagaccctaacgccggagcgaagttatggttctgacgagttcgaaaggtctagcaacctgtctaaacagagcaaggaccccttgggcaaggatccgcaggaaggaactgctcctggaatctgcacttcgccacagagcgcctcacaggaaaacaagcataatcggtgtgaattctgtaaacggaccttttccacccaggtcgcgctgagacgccacgaaagaattcacactggaaaaaagccatacgagtgcaaacagtgtgccgaagctttctacctaatgccccatttaaacagacatcagaaaacacactccggtagaaagacgagcggatgtaatgagggtcgaaaacccagcgtccagtgtgcgaacctgtgcgagagagttagaatccatagccaggaggattactttgaatgcttccagtgtgggaaggccttcttacagaacgtacatcttctgcaacatttaaaggctcacgaagccgcaagagtgctgccaccaggattatcccactctaaaacctacctaattaggtaccagcggaaacatgactatgtgggcgaaagggcttgccagtgttgtgactgtggacgggtattttcaagaaatagctacctgatccaacattatcggacgcacacgcaagagcgcccatatcagtgtcagctttgtggaaaatgttttggccgtcctagttacctaacgcagcattaccagctccacagtcaggaaaagacagtcgagtgcgatcactgctag

SEQ ID NO: 8535 - DNA, 444 bp, synthetic construct
  misc_feature 1..444: note = source = /note="Description of Artificial Sequence: Synthetic coding sequence"
  source 1..444: mol_type = other DNA
atggccctgaagcggatccagaaggagctgaccgacctgcagcgggacccaccggcccagtgctccgccggacccgtgggggatgatctgttccattggcaagctaccatcatgggccccaacgattcaccgtatcagggaggggtgttttttcttactatacacttccctacagactatccgtttaaaccgcccaaagtcgcgttcaccactaagatctatcatcccaacatcaacagtaatgggtccatctgtttggatattctgaggtcacagtggtcgcccgctctgacagtgtcaaaagttctgctctccatatgctccctcttgtgcgaccccaatccggatgaccccttggtccctgagatcgcgcacacctacaaagcagatcgagaaaagtataaccgcctcgcccgtgagtggacccagaaatacgccatgtag

SEQ ID NO: 8536 - DNA, 3072 bp, synthetic construct
  misc_feature 1..3072: note = source = /note="Description of Artificial Sequence: Synthetic coding sequence"
  source 1..3072: mol_type = other DNA
atgttccacctgcggacctgcgccgccaagctgcggcccctgaccgcctcacaaactgtgaagacattctcccaaaatagacccgccgcggctagaacctttcagcaaattcggtgttactcagcacccgttgccgccgagcccttcctgtccggaacttcttccaattatgtggaggaaatgtattgcgcatggttagaaaaccccaaatccgtgcataaatcttgggacattttctttagaaatacaaacgctggcgctcctccagggaccgcataccaatcgcccctccccctgtctcggggaagcttggcagctgtggcccatgcccaaagcctggtggaggcccagcctaacgtggacaaactcgtcgaggatcacctcgccgtgcagtcactgatacgggcctatcagatcagaggccaccatgtcgcacagctggaccctctcggcatcctggacgccgacctcgactctagtgtgccagcggatatcataagctcgactgacaaactcggattctatggtcttgatgagtctgacctggataaggttttccacttacccacaacgacatttattgggggtcaggagagcgctctgccacttagggaaatcatcagacgtctggaaatggcttactgccagcatatcggcgttgaatttatgtttattaacgacttggaacagtgccagtggatacggcagaagttcgaaaccccagggatcatgcagttcaccaatgaagagaagcgtacactcctcgcccgtctggtgcggagcacacggtttgaggagtttcttcaacggaaatggagttcagaaaaaagattcggattggaaggctgcgaagtcctgattccagccctgaagacgattatcgacaagtcttccgagaatggcgtcgattatgtaattatgggtatgccacaccggggacgactgaatgtcctggcgaacgtcatcagaaaagaacttgagcagatcttttgtcagttcgactccaagcttgaggccgccgacgagggcagtggagacgtgaagtaccacctgggaatgtaccatcggcgaatcaaccgcgtaaccgaccgaaacatcaccctaagcctcgtcgccaatccctcccacctggaagccgcagaccctgtagtcatgggcaaaacgaaagccgagcagttctattgcggggacactgagggaaaaaaggtaatgagtatcctgttgcatggcgatgcggcatttgctggacagggaatagtgtacgaaaccttccacctttcagatttgcccagttacaccacgcacggtactgttcacgtagttgtaaacaatcaaataggctttactacagatccaaggatggcaaggagctccccatatccaacagatgtggccagggtggttaatgctccgatcttccacgtgaatagtgatgatcccgaggccgtaatgtacgtgtgcaaagtcgccgctgaatggaggagcaccttccataaagacgtcgtcgttgacctcgtctgttacagaaggaatgggcacaacgagatggatgaacctatgttcactcagcccctgatgtacaagcaaattcgaaagcagaagccggtactgcagaagtatgcagagttgcttgtcagccagggcgtggttaatcaacccgagtatgaggaggagatctcgaagtacgataagatctgcgaggaggcgtttgcacggtccaaagacgagaaaattctgcacataaagcactggctggattctccgtggcccgggttctttaccctggatgggcaacctcgctcaatgtcttgtccgagcacaggacttacggaggacatcctcacgcacatcggaaacgtcgcctcaagtgtgccggttgagaactttaccatacatggcgggcttagccgtatcctgaaaacccggggtgagatggtgaaaaatcgaacggtagattgggctttagctgagtacatggctttcggatctcttctgaaagaaggcatccacatacggttgtccggtcaggacgtggaacgcggtacgttttcacacagacaccacgtgctacatgatcaaaatgttgacaaaaggacttgcatcccaatgaatcatttgtggcccaatcaagccccttacaccgtctgcaactcctccctgagcgaatatggggtgttgggcttcgaactgggtttcgccatggcctcaccaaacgctctggtactctgggaagcacagtttggtgacttccacaacaccgctcaatgtatcatcgatcaattcatttgccccggccaggccaaatgggtgagacagaacggaattgtccttttgttaccccatggcatggagggaatgggacctgagcatagtagtgcaaggcctgagcggttcctacagatgtgcaacgacgatccagatgtgctgccggacctcaaggaagcaaatttcgatatcaaccagttgtatgactgtaattgggtggtagtgaactgctcaaccccaggcaactttttccatgtattgcgtcgccagatattattgccgtttcggaaacctctgatcatttttaccccaaagagccttttgaggcaccctgaagctcgatccagttttgacgagatgttacccggcacacactttcaaagagtcattcctgaagacggacccgctgcacagaaccccgagaacgtgaaacgcctgttgttctgtaccgggaaagtctactacgacttaacgagggagagaaaagcgagagacatggtggggcaagtcgccattaccaggatagaacagctgagtcccttcccctttgacctgctgctcaaagaagtgcagaaataccccaatgcagaactagcttggtgccaggaggagcataaaaatcagggctattatgactacgttaagccccgcctgcgcacaacgatttccagagcaaagccggtgtggtatgccgggagggacccggcagcggccccagccacaggcaacaagaaaacacacctgacggaactgcagcgcctgctcgacaccgcctttgatctggatgtgtttaaaaacttttcctag

SEQ ID NO: 8537 - DNA, 2667 bp, synthetic construct
  misc_feature 1..2667: note = source = /note="Description of Artificial Sequence: Synthetic coding sequence"
  source 1..2667: mol_type = other DNA
atggagggcgacgactgcgagttccggtacggcgacggcaccaacgaagctcaggataatgattttccgaccgtggagcgcagccgcttgcaggagatgctgagcctcttaggactggagacttaccaagtgcaaaagctctctctgcaagatagcttgcagattagcttcgatagcatgaagaattgggcgccccaggttcctaaggatctgccctggaatttcttacgcaaactgcaggctcttaatgctgacgctagaaatactaccatggtactggatgtgctgccagatgctagaccggtggagaaggagagccagatggaggaagagataatctactgggaccctgccgacgatctagccgcggacatctactccttttcagagctgcccacccctgacactcctgttaatcctcttgacctgttatgtgcactgctgctgagcagcgactcattcctgcagcaggagattgcattgaagatggccctatgccagtttgctcttcctctggtgctccccgatagtgaaaaccattaccataccttccttctgtgggcaatgaggggcattgtcaggacctggtggtcacagcccccacgcggcatggggtccttccgagaagacagtgtggtcctgtcacgggccccggccttcgcgttcgtgaggatggatgtgtcgtccaacagcaaatctcaattgcttaatgcggtcttgtcccctggacaccggcaatgggactgcttctggcacagagacctgaacttaggcacaaacgccagagagatttcagacggcctcgtggagatcagctggttttttcccagcggccgagaggaccttgacatattccccgagcctgtagccttcctgaacttgcgaggagatatcggctcacattggctccagttcaagttactcaccgagatctcaagcgcggttttcatactgactgataatatatcgaagaaagagtacaagctcctctactccatgaaggaaagtacaaccaaatactattttatcttatcaccataccgtggcaagaggaacacaaatttacgctttttgaacaagctgattcccgtgttgaagatcgatcactcacatgttctagttaaggtgtcttctaccgatagcgatagcttcgtgaagcgtatccgcgccattgtggggaacgtgctgcgcgcaccatgtcgaagggtgtcagtggaagatatggcacacgccgcccggaaactggggctgaaagttgacgaagattgcgaggagtgccagaaggccaaggatcggatggagcggataactagaaaaattaaagattctgatgcataccgccgtgatgaactcaggttacagggtgacccttggaggaaggccgcccaagtggagaaggagttctgccagctccagtgggcagtggacccacctgagaaacatcgcgccgagctcagacgtcgtctgctggaacttaggatgcaacagaacggccatgacccatcctcaggcgttcaagaatttatcagcggaattagcagtcccagtctgtccgaaaaacagtactttctgcggtggatggagtggggacttgccagagttgcccagccacgtctgcgtcagcctcccgagactctcttgacgctgcggcctaaacacggcggaaccaccgacgttggtgagcccctgtggccagagccattaggcgtggaacattttctccgcgaaatgggccagttttacgaggctgagtcttgtctggtcgaggctggcagacttccagcaggccagcggcggtttgcgcattttcccggattggcatccgaactattgttaacgggcttgccactggaactcattgacggctccacactgtccatgcctgtgcggtgggtgacaggcctgctgaaagagttgcacgtgagactggagcgaagatctcgcctggtggtcctatcaaccgttggcgtgccagggaccggcaagagcactctgctcaataccatgttcggccttcggttcgccactggaaaatcttgcggcccacgtggcgcttttatgcagttgatcactgtagcagaaggcttttcgcaagaccttggatgtgatcacatactagtgatcgacagtgggggtcttatcgggggagccctcacttcagccggagatcgattcgaactggaggctagtctggctacactgctcatgggcctcagcaacgtcactgtgatttcacttgccgaaacaaaggatattcctgccgccattctccacgcctttttaaggttagagaagacaggtcacatgccaaactatcagttcgtgtatcagaacctgcacgacgtgagcgttccaggacctcgcccaagagacaagcgccagcttctcgacccgcccggcgatctcagccgggctgctgcccaaatggaaaagcagggtgacggtttcagggctcttgccgggctcgccttttgtgaccccgagaaacagcacatatggcacattcctggactgtggcatggagccccacctatggccgctgtctcattggcgtacagcgaggctatcttcgagcttaaacgatgcctcctcgaaaacatccgcaacgggctgagcaatcagaataaaaacatccagcagctgatcgagctggtccgccgtttgtag

SEQ ID NO: 8538 - DNA, 3744 bp, synthetic construct
  misc_feature 1..3744: note = source = /note="Description of Artificial Sequence: Synthetic coding sequence"
  source 1..3744: mol_type = other DNA
atgatgcgggagtgggtgctgctgatgagcgtgctgctgtgcggcttggcaggccccacccacctttttcaaccgagcctcgttttggatatggctaaggtgctcttagataattactgcttccccgaaaaccttctcggaatgcaagaagctattcagcaagcaattaagagccacgagatactctctatttcagaccctcagactctggcctccgtgctgaccgccggggtgcagtcctcactcaacgatcccaggctagtcatctcttatgaaccaagtactccggaaccaccgccccaggtgcccgcgctgacaagcctgtccgaggaggagttgttagcgtggctccaaagaggcctgcggcacgaagtgttggagggcaatgttggatacctgcgggtggatagtgtgcccggtcaggaagtgctgtctatgatgggtgagtttctggtagcgcatgtgtggggcaatctgatggggactagcgcattggtgctggatctgcggcactgcactggtggacaagtgagcggcatcccctacatcatcagctatctccatccaggcaatacaatcctgcatgtcgacacaatctacaaccgaccctctaacactactactgaaatttggacattgcctcaggtactcggagagaggtacggcgccgacaaggacgtcgttgttctgactagtagccagactcggggagtcgccgaggacattgctcacattctgaaacagatgcgtcgtgcgattgtggtgggagagcgaaccggaggtggtgcgttggatttgcggaagctccgcattggtgagtcggatttcttcttcaccgtgccagtctctaggagtttgggaccccttggcggcggatctcagacatgggaggggtcaggcgtccttccttgcgtcggcactcccgcagagcaggctctggaaaaagccctggcgatcttgactcttaggtccgcactccccggagtggtgcactgcctgcaagaggtgctcaaagattactacacactcgtggaccgggtgcccaccctgctgcaacatttggcatctatggatttctctactgtggtgtcagaggaagatctcgtaaccaagcttaacgcgggacttcaggccgcatcagaggatccacgcttgctggtccgagcaattggaccaacagaaacaccctcttggcctgccccagatgcagccgcggaagattcgccaggggtggcccccgaattgcccgaggacgaggccatccgccaagccctggttgactccgtgtttcaggtgtctgtgctgcccggaaatgtcggatatctacgtttcgattctttcgctgacgcatcagtattgggagtgctcgctccttatgtcctgcgtcaggtttgggagcctctccaggacacggagcacctgattatggacctcaggcataatcccggggggcccagttccgccgttccgctcttgttgtcttactttcaggggcccgaggcagggcccgtccacctatttaccacatatgatcggagaacgaatataactcaggaacattttagccacatggagctgcccggccctcgctactccactcagagaggcgtctatctgctgactagtcatcgtacagcaaccgctgcagaggagtttgcatttctcatgcaaagcctcgggtgggcgactctcgtcggggagattactgctggtaatctgttgcatactcgtactgtacccctcctggatacccccgagggctccctggccttgaccgtacctgttctgacattcatcgataatcatggagaagcttggctcggtggtggcgtcgtgcccgatgcgatagtactcgccgaggaggcactcgataaagcgcaggaggtgctggagtttcatcagtctctcggggccctcgttgagggcacaggacatcttctcgaagcacactacgcccgcccagaggtcgtcggccagacctctgctttgttgagagccaaactcgcccagggggcttatagaaccgcggttgacctggagagccttgctagccagctgacagcagacctgcaggaggtgagcggcgatcataggctcctcgttttccattctcccggagaactggtagtggaggaggcacctcccccaccgcccgccgtaccgtccccggaggagctcacatacttgatcgaggccctgttcaaaacagaagtactccctggccagctggggtatcttaggtttgatgcaatggccgagctggagaccgtcaaggctgtcggtcctcagttggtgaggctggtgtggcagcagttggtggacacagcagcgctggtaatagacctcaggtacaatcctgggtcctacagtaccgcaatccccctgctgtgctcttatttcttcgaggccgaaccacggcagcatctttacagtgttttcgaccgggccacatcgaaagttacagaggtctggaccctgccccaggttgccggccagcgatacgggtcacacaaggacctgtacatcttgatgtcacataccagtggaagtgcagccgaggcctttgcgcacactatgcaggacctccagcgagctactgttattggcgagcccacagcaggcggtgcactaagtgtagggatttatcaggtgggatccagcccactgtacgcctccatgcctacccagatggccatgagcgccacgacggggaaagcctgggacctggcgggtgtggagcccgatatcacagtgccaatgagtgaggccctttccattgctcaggatatagtagctctaagagcgaaagtcccgaccgtactacagaccgccggtaaactcgtggcagataactacgcctctgctgaactgggggccaaaatggctacaaagctcagtggcttgcagtcgcgctattcgagggttacaagtgaggtggcattagcagaaatccttggggcagacctgcaaatgctgtccggggacccacatctcaaggctgcccacattcctgagaacgccaaagatcgaattccggggatagtgccgatgcagattccctctccggaagtctttgaggaacttattaagtttagctttcacacaaatgtgctggaggacaatatcgggtacctcagatttgacatgttcggggacggtgagctcctaactcaggtgagtaggctattggtggagcacatttggaaaaagatcatgcacaccgatgcgatgattattgacatgcgctttaacattggtggacccacgtccagtatcccgatcctgtgcagctactttttcgatgaaggccccccagtgttgctggacaagatttattcgcgtccagatgacagcgtttcagaactttggacccatgctcaggtcgtgggagagcggtatgggagcaagaaaagcatggtgattttaacctcatccgtcactgctggaactgctgaggaattcacctacattatgaaaaggttgggtagggcattggtgattggggaggttacatccgggggatgccagccaccccagacctaccacgtagacgatactaacctctatctcaccatcccaaccgccagaagcgtcggggcatcagacggatccagctgggagggcgtgggagttacaccacacgtcgtagtccccgcagaagaagccttggcacgggccaaagagatgctgcaacacaatcagctgagagtgaagaggagcccaggtctgcaggatcacctgtag

SEQ ID NO: 8539 - DNA, 885 bp, synthetic construct
  misc_feature 1..885: note = source = /note="Description of Artificial Sequence: Synthetic coding sequence"
  source 1..885: mol_type = other DNA
atgaacagcgagctggactactacgagaagttcgaggaggtgcacggaatactgatgtataaggacttcgtgaaatactgggataacgttgaggcttttcaggctcgtcccgacgacttggtgatcgccacatacccaaagagtggtactacgtgggtatcagaaattgtctacatgatttataaggaaggtgatgtcgagaagtgtaaggaggacgtgatttttaacaggatccccttcctcgagtgtcggaaagagaaccttatgaacggcgtaaaacagctcgatgagatgaatagccctcgcattgtaaaaactcatcttcccccggaactgcttcccgcaagtttttgggaaaaagactgtaaaatcatatacctgtgccgcaatgccaaagatgtggccgtttcattctactatttctttctgatggtggcggggcatccaaaccccgggagctttcccgagtttgtagaaaaatttatgcagggccaagttccttatggttcttggtacaagcatgtgaagagttggtgggaaaaagggaaatccccacgtgtgctgtttctgttttatgaggacctgaaggaagatatccgaaaagaagtgatcaagctcatccattttctggaacgcaagcccagcgaggagctagtcgacagaattatacatcacacttcatttcaagagatgaagaataacccctccactaactacaccaccctgccagacgagattatgaatcagaagctgtccccttttatgcgcaagggcataaccggagactggaagaaccactttactgttgcattaaatgaaaagttcgataagcattatgaacagcagatgaaagagtcgacactaaagtttagaaccgagatctag

SEQ ID NO: 8540 - DNA, 1446 bp, synthetic construct
  misc_feature 1..1446: note = source = /note="Description of Artificial Sequence: Synthetic coding sequence"
  source 1..1446: mol_type = other DNA
atggcctacaacgacaccgaccggaaccagaccgagaagctgctgaagagggtccgggagcttgaacaggaagtccagaggttgaaaaaggagcaagctaagaacaaagaagatagcaacattcgggaaaattccgcaggagcaggaaaaacaaagcgagccttcgacttttctgcacacggtcgccgtcatgttgcgctgcgcattgcgtacatgggatgggggtaccaaggttttgcaagtcaagagaacaccaacaacaccatagaggaaaagctgttcgaagcactgacaaaaacaagattggttgaatctaggcagaccagtaactaccaccggtgtggccgcacggataaaggggtttctgccttcggtcaggtgattagtctggacctgcgctcacagttcccaaggggccgggattctgaggattttaacgtgaaagaagaggctaatgctgctgccgaagagattcggtacacccacatattgaaccgagtgctcccacctgacatccgcattttggcatgggcccctgttgaacctagcttttccgctaggttttcctgtttggaaaggacctacaggtatttcttcccacgggctgatctcgacatcgtcactatggactacgcagctcagaaatacgtaggaacacacgatttccgaaatctctgcaaaatggatgtcgccaacggggtgattaatttccaacgaacaatcctttcggcccaagtccagctggttggacagagccctggggagggtaggtggcaggaacccttccaactttgccagttcgaagtcactggccaggcttttctgtatcaccaggtgcggtgcatgatggccattctcttccttatcgggcagggcatggaaaagccagagattattgacgaattgctgaatattgaaaaaaaccctcagaaaccccagtattcaatggccgtggagtttcctctggttctgtatgactgtaaattcgagaatgtgaagtggatatacgatcaggaggcacaagagttcaacattactcatctgcagcagctctgggctaaccatgccgtcaaaacacatatgttgtatagtatgctacagggcttagataccgtacccgtgccgtgtggtatcggaccaaaaatggacggcatgacggaatggggcaatgtcaagccatctgtgatcaaacagacctcagctttcgttgaaggcgtgaagatgaggacatataagcccctgatggatcggcctaaatgtcaaggactggaatcccggatccagcattttgtgcggcgtggcaggatagagcatccacaccttttccacgaagaggagaccaaggctaagcgcgattgtaatgataccctggaagaggagaatactaatctggagactccaacaaaacgcgtttgcgttgataccgagattaagtctattatctag

SEQ ID NO: 8541 - DNA, 618 bp, synthetic construct
  misc_feature 1..618: note = source = /note="Description of Artificial Sequence: Synthetic coding sequence"
  source 1..618: mol_type = other DNA
atgagcaacttcctgcacctgaagtacaacgagaagagcgtgagcgtgacaaaagccctcactgtaaggttcctgactaagaggtttattggagagtacgcgtcgaattttgaaagtatctataagaagcacttgtgcctggagcggaaacaattaaacctagagatttatgatccttgctcccaaactcagaaagccaagttcagcctgacatccgagctccattgggccgatggattcgtgatagtttacgatatatctgacaggagctcttttgccttcgcgaaagctctcatttatagaatccgggagccacagacaagtcattgtaagagagcggtcgaaagcgccgtcttccttgtgggaaataaaagggacctgtgccacgtgagggaagtaggctgggaagagggccagaagttggccctggagaaccgctgccagttctgtgagctctccgcagccgagcagagtcttgaggtggagatgatgttcatcaggattatcaaggacatcctaattaactttaagctcaaggagaaaagaagaccatcgggtagtaaaagtatggcaaagctaatcaataacgtgttcgggaaacgccggaaaagcgtatag

SEQ ID NO: 8542 - DNA, 1008 bp, synthetic construct
  misc_feature 1..1008: note = source = /note="Description of Artificial Sequence: Synthetic coding sequence"
  source 1..1008: mol_type = other DNA
atgggcaaggtgaaggtgggcgtgaacggcttcggccggatcggccgccttgtaacccgcgcagccttcaattctggtaaggtcgacattgtggcaataaacgatccctttatagatctcaattacatggtttacatgtttcagtacgacagcacccatgggaagttccacggcaccgtcaaggctgagaacggcaagcttgtgattaacggcaaccctattaccatttttcaagaacgagatcccagcaagataaaatggggcgatgcaggggccgaatacgtcgtggagtccacaggagtatttaccactatggaaaaggccggtgcgcacctgcaagggggagcaaagagggtgattatatccgccccatcagccgatgctccaatgtttgtaatgggcgtgaatcacgaaaagtatgacaacagtctgaaaatcatctccaatgcaagctgtaccaccaactgcttagctccattggccaaagtaattcacgacaactttggcatagtcgaaggcctcatgaccactgtccatgctattaccgccactcagaaaacagtggacggaccctctggcaagctgtggagagatggcagaggggcgctgcagaacattataccagcatccaccggggccgccaaagctgttggaaaggtgattcccgagctgaatggcaaacttactggaatggcctttcgtgtgcccacggctaacgtttctgtcgtcgatttaacctgccgattggaaaagccagccaagtacgacgacatcaaaaaggtggttaagcaggcatccgaaggccccttaaagggtatcctgggatatactgaacaccaggtagtgtcatcggattttaatagcgacactcacagcagcacttttgacgccggggccgggattgctctgaacgaccacttcgtgaaactgatctcatggtacgataatgagtttggctattctaacagggtagttgacctaatggcacatatggcaagtaaggagtag

SEQ ID NO: 8543 - DNA, 597 bp, synthetic construct
  misc_feature 1..597: note = source = /note="Description of Artificial Sequence: Synthetic coding sequence"
  source 1..597: mol_type = other DNA
atggacagcctgctgatgaaccggcggaagttcctgtaccagttcaagaatgtgagatgggctaaaggacggcgagagacctatttgtgctacgtggttaagcggagagacagcgctacctcattcagcttagacttcggatatctccgtaacaagaatgggtgccatgtagaactgctgtttctcagatatattagtgactgggatctggatcccggcagatgttatcgcgtgacttggtttacttcctggtccccctgctatgactgcgccaggcacgtggctgacttcctgagggggaatcctaacctctcactccggatttttacagcccgcctttacttttgtgaggatagaaaagcagaacctgaggggctgaggcgtcttcaccgggcaggggtgcagatcgcaatcatgacatttaaggactacttctactgttggaacacattcgtagagaaccacgagcgaacatttaaagcttgggagggcctgcatgagaactccgtgaggctgtctcgtcagctaaggagaatccttctgcccctgtacgaggtcgacgacctccgggatgctttccggaccttggggctttag

SEQ ID NO: 8544 - DNA, 5472 bp, synthetic construct
  misc_feature 1..5472: note = source = /note="Description of Artificial Sequence: Synthetic coding sequence"
  source 1..5472: mol_type = other DNA
atggccctgagcagcgcctggcggagcgtgctgcccctgtggctgctttggtcggccgcgtgcagcagggccgcctccggggacgacaacgcattcccatttgacatagaaggcagcagcgccgtcggtcgacaggatccccccgagacaagtgaacctcgagtggccctcgggagactcccacctgcagccgagaagtgtaatgcaggattctttcatactctgtctggggaatgtgttccttgcgactgcaacggcaatagcaacgaatgtctggacggaagcggctactgcgtgcattgccagcggaataccacaggtgaacattgtgaaaaatgtctcgacggatatatcggagatagcattagaggtgcccctcagttttgccagccatgcccatgtcctttaccacacttggcgaattttgcagagtcgtgctatagaaaaaatggcgcggttaggtgtatctgcaatgagaattacgcgggccctaactgtgagcggtgcgcgcctggatattacgggaaccccctcctgatcggaagtacatgtaagaagtgtgactgcagcggcaactctgaccctaacctaatctttgaagattgtgacgaagtgactggccagtgcagaaactgtctgagaaacacaaccggctttaaatgtgaacggtgcgcccctggctactatggagatgctaggatcgccaaaaattgtgctgtctgcaactgtggtgggggaccctgcgattctgtgacaggggagtgcttagaagaggggttcgagccacctaccggaatggactgcccaaccatctcatgcgataagtgtgtgtgggatctgactgatgctctgaggcttgctgcactcagtattgaggaggggaagagcggggtcctctccgttagctccggggctgcagcgcaccggcatgtgaatgagatcaatgcaactatatatttgttgaagactaagttatccgagcgggaaaatcagtacgccctgcggaaaatacagattaataatgcagagaataccatgaagtccttgttgtccgatgtcgaagagttggtggaaaaggaaaaccaagcgagcaggaagggccagctcgtacagaaagaaagcatggacactattaatcacgcttcgcagctggtagagcaggcccacgatatgcgcgataagatccaggaaattaacaacaagatgctgtactatggagaggaacatgaactgtcacctaaggagatatccgaaaaactggtgttagctcagaagatgctggaagagatacgcagccggcagcctttcttcactcaaagggagctggtggacgaagaagctgacgaggcctacgagctcctctctcaagccgagagttggcagcgtttgcataatgagacccgcactctgtttccagtagtgctggagcagctggacgattataatgccaagctgtccgacctgcaggaggctctggatcaggctctcaactacgtgcgcgacgcagaagatatgaatagagctaccgccgccaggcaacgcgaccacgaaaagcagcaagaacgcgtccgggaacagatggaggtggtcaacatgagtctctctaccagcgccgattctttgaccactccacggcttaccctcagcgaactagatgatatcatcaaaaatgcatcaggaatctacgcagagatcgatggggccaagtcagagctgcaggttaagctgagcaacctatccaatttgtctcatgacttagtgcaggaagccatcgaccatgcacaggacctccagcaggaggccaatgaactctctagaaagttgcattcttctgacatgaatggtctggtgcagaaagcactcgacgcctccaacgtttatgaaaatatcgtcaactatgttagcgaagcaaatgaaaccgcggagttcgccctgaatactactgataggatatacgatgccgtctcaggaatcgacacccaaattatctatcacaaggatgagagtgagaacctgctcaaccaggcacgagagctgcaggcaaaagcagaatccagttccgatgaagcagtggcggacaccagtcgccgagtgggcggagccctggcacgaaagtccgccttaaagacaaggctgtccgacgcagtaaaacagttgcaggcagccgaacgtggagacgcacagcagcggctcgggcaaagccgccttatcaccgaagaagccaatcggaccacaatggaagtgcaacaggctacagctccaatggccaacaacctgaccaactggagccagaacctgcagcactttgactcttccgcctacaatacagctgtgaattctgccagggacgcagtgagaaatctgaccgaggtcgtgccccagctcttagatcagctacggacagtagaacagaaaaggcctgcctcaaacgtgagtgcgagcattcagaggattagagaactgatagcccagaccaggagtgtagcaagcaaaattcaagtatctatgatgtttgacgggcagtcggccgtggaggtgcactctagaacaagcatggacgatctcaaggctttcacttccctcagcttgtacatgaagcctcctgtgaagcgcccggaactgactgagacggctgatcagttcatactgtatcttggaagcaaaaacgcgaagaaggaatatatggggctcgccattaaaaatgacaatctcgtatatgtttacaatctcggcaccaaagacgtagagatacccttagactctaagccagtatcatcttggccagcatactttagcatcgttaaaatcgagcgggtaggcaagcacggcaaagtgttcctgaccgtacccagcctctcctcaacggctgaggagaagtttattaaaaagggggagttcagcggagacgattctctgcttgacctcgaccccgaggatacagtattctatgtcggcggggtgccctccaatttcaagcttccaacatcgctgaatctgcctgggtttgttggctgcctggagctggcaaccctaaacaacgacgttatctcgctatacaatttcaaacatatctataacatggacccgtcgacatcagtcccgtgcgccagggacaaactcgcatttactcagtccagggccgcatcttacttcttcgacggctctgggtatgcggtagtgcgggatatcacacgtagggggaagtttggacaggtaacgagattcgacattgaagtgaggactcccgccgacaatggccttatcttgctgatggtgaacgggagcatgttctttcgcttagagatgagaaacggttacctccacgtcttttacgactttggttttagcggcggacccgtgcatttggaggataccctgaagaaagcccaaattaacgatgctaaatatcatgaaatcagcatcatttaccacaatgataaaaagatgatcttggtggttgataggcgccacgtaaaaagcatggataacgaaaaaatgaaaatccctttcaccgatatctacatcggtggtgctccgcctgagatcctacagtcccgcgcactgagagctcacctgccgctcgacatcaatttccgtggctgtatgaaggggttccagtttcaaaaaaaggatttcaatcttcttgaacagacagagacccttggtgtgggatacgggtgccccgaggactccctgatcagccggagagcctactttaacggtcagtccttcatcgcatctattcagaagatttcatttttcgacggctttgagggcggcttcaacttccgtaccctgcaacccaacggcctcttgttctattacgccagcggctctgacgtgttttccatcagcctcgataacggaacagtcataatggatgttaaagggattaaagtgcagagcgtggacaaacagtataacgacggcctgtcccacttcgtgatttctagtgtgagcccaaccaggtacgagctgattgttgacaaatctagagttggttccaaaaaccctactaagggcaaaattgagcaaacacaggcaagcgagaaaaagttctacttcggcggctcacctatctctgctcagtacgcaaacttcacagggtgtatctcaaacgcgtacttcactcgggtggaccgcgatgtcgaggttgaggatttccagagatatactgaaaaagtgcacactagtctgtacgaatgtccaattgaatcttctcctttatttttactacataagaaagggaagaacctgtccaaacccaaagcttcacagaataagaaaggcgggaagtccaaggacgcgcctagttgggaccctgtggctctcaaattgcctgaacgcaatacccctcgaaatagtcattgccatctctctaattctcctagggctattgagcatgcatatcaatatggcggtactgctaactcaagacaggagttcgaacacctaaagggagatttcggcgctaaatcccagttcagcatcaggctgcgaaccaggtcatcacatggtatgatcttttatgttagtgatcaagaagagaacgattttatgaccctgtttcttgcacacggcagactcgtgtatatgtttaacgtgggccacaagaagttaaaaatcagaagccaggagaagtataacgatggactgtggcacgatgtaatcttcattcgagaaagatcctctggacgccttgtgatagacggcctccgggtcttagaggagtccctcccgcctactgaggccacctggaaaattaaggggcctatttacttgggaggggttgcccctggaaaggctgtgaagaatgttcagatcaactcaatttacagtttctccgggtgcctctccaatcttcaactcaatggggcctccatcacttcagctagccagactttctcagtgacaccctgcttcgaagggcctatggaaaccggcacctacttttccacagagggagggtacgtggttctggatgaaagtttcaacatcggacttaagttcgaaatagcgtttgaggtacgcccgaggtcctcaagcggcaccctggtgcacggccactcggtcaacggcgagtacttgaatgtgcacatgaagaatggtcaggtgattgtgaaggtcaataacgggatcagggactttagtaccagtgttacacctaaacagtctctttgtgacggcagatggcaccgtatcacggtgattcgtgactctaatgtcgtccagttggatgtcgactccgaagtcaaccatgtagtgggcccattgaatccaaaaccaatcgaccacagagagcctgtgttcgttggcggcgtgccagagagtctgcttacacccagactggcgcccagtaaacctttcacaggttgtatcaggcattttgtgatcgacggacaccctgtctcgttctctaaggccgcgctggtgagcggagcggtgtcaatcaactcttgccccgccgcctag

SEQ ID NO: 8545 - DNA, 1434 bp, synthetic construct
  misc_feature 1..1434: note = source = /note="Description of Artificial Sequence: Synthetic coding sequence"
  source 1..1434: mol_type = other DNA
atgaccagcaagttcctgctggtgagcttcatcctggccgccctgtccctatctactacattcagtctgcagcccgatcaacaaaaagtgctgctggtgagtttcgatgggttcagatgggattacctgtacaaggtccccacaccgcactttcattatataatgaaatacggcgtccacgttaaacaggttacaaatgtgttcattactaaaacctatcccaaccactacaccttggtcacgggcctctttgctgaaaatcatgggatcgttgctaacgacatgttcgacccgatacggaacaagtccttttccctcgaccatatgaatatctacgactccaaattctgggaagaggccacaccgatttggattacaaaccagcgggcaggtcatactagcggcgcagcgatgtggcctgggacagacgtaaagattcacaagaggttccctacgcattacatgccttacaacgaatctgtttctttcgaagaccgggtagcaaaaattatagaatggttcacgtccaaggaaccaatcaatctggggctgctgtactgggaggatccagacgatatgggacaccatctcggtcccgattctcccctgatgggccctgtgatcagtgacatagataaaaaacttgggtacttaatccagatgttaaagaaggctaagttatggaataccctgaacctgatcatcacatcagatcatggcatgacccagtgcagcgaagaacgtctgatcgagctagatcaataccttgacaaagaccactacacattgatcgaccagagcccagtcgcagcaatattgcccaaggagggaaagtttgacgaggtctatgaagctctcacccacgcacatccgaacctgaccgtgtataagaaagaagatgtccccgagcgctggcattacaagtataatagcagaatccagcccattatcgccgtggccgacgagggctggcatatattgcagaataaatctgatgatttcttactgggaaatcacgggtatgacaatgcgctggccgacatgcaccccatattcttggcccacggcccagcattccggaagaatttctcaaaggaggcgatgaattccacagacctatacccccttttgtgccacctgctgaacatcacagctatgccccataatgggtctttctggaatgttcaggacctcttaaatagcgccatgccacgtgtggtgccttatactcagtctactattctgctgcccggcagtgtgaagcctgccgaatatgatcaggagggtagttacccttactttattggggtgtctctgggatccattatcgttatcgtcttcttcgtcatttttattaaacatctcatacactcacagataccggcattgcaggacatgcatgctgagatcgcccagcccctccttcaagcctag

SEQ ID NO: 8546 - DNA, 1254 bp, synthetic construct
  misc_feature 1..1254: note = source = /note="Description of Artificial Sequence: Synthetic coding sequence"
  source 1..1254: mol_type = other DNA
atgcggttcgcctggaccgtgctgctgctgggccccctgcagctgtgtgccctggtgcattgcgcgccccctgctgcaggtcagcaacaaccccctcgtgaaccacccgctgcacccggagcctggaggcaacagatccagtgggagaacaatggtcaagtgttcagtctgctgagcctcggatcccagtaccaaccccagaggagaagagaccccggggctgccgtgcctggcgctgccaatgcctcggctcaacagccaagaaccccaattcttctcattcgggacaataggacagctgctgctaggaccaggaccgccgggtcctcaggagtgaccgccggtagacctaggccaacggcgcgccactggtttcaagccgggtattccacatcccgcgccagagaggcaggtgcctctcgggccgagaaccagacagcacccggagaagttcctgccctgagtaatctgagaccaccctcccgcgtggatggtatggtgggagacgacccttacaatccttataaatactcagacgataatccctactacaactattatgacacatacgagaggccacggcccggaggaaggtaccgaccaggttacggcactggatacttccagtatggcctccccgacctcgtcgccgacccctattatatacaggcatccacttacgtgcagaaaatgtcaatgtataatctccggtgtgcagccgaagagaactgtctggcctccactgcatacagggcggacgtgcgggattatgaccaccgggtcctgctgaggtttccacagcgagtgaagaatcaaggcacttctgacttcctgccttctaggcctagatacagctgggaatggcactcctgtcatcagcattaccatagtatggacgagttcagccattacgacctgctggatgccaatactcaacggagagtggccgaaggtcacaaggcatctttttgtctcgaggacacatcgtgcgactatggatatcatcgtagattcgcgtgtacggcccacactcaggggttgagccccggctgttatgacacctatggtgcagacatcgattgccaatggatagatataacggatgtgaagccggggaactatatcctgaaagtgtcagttaatccgtcgtacctggttccagaaagcgactatacgaataacgttgtgcggtgtgacatccgatataccggtcatcatgcttacgccagcggctgtacaatatcaccatactag

SEQ ID NO: 8547 - DNA, 879 bp, synthetic construct
  misc_feature 1..879: note = source = /note="Description of Artificial Sequence: Synthetic coding sequence"
  source 1..879: mol_type = other DNA
atgggcgagaagagcgagaactgcggcgtgcccgaggacctgctgaatggactgaaggtgaccgacacccaggaagccgagtgtgctggccctcctgtcccagatccaaaaaaccagcactcacaaagcaagctgttgagagatgacgaggcacatcttcaagaagatcagggagaggaggagtgctttcacgattgttccgctagtttcgaagaggaaccaggtgcagataaggttgaaaacaaaagcaatgaagatgtgaacagttccgagctcgacgaggaatacctgatcgaactcgagaagaatatgagtgacgaggagaaacagaagaggagagaagagtcaacgcgccttaaagaggaggggaacgaacagtttaagaagggggactacatcgaagccgagtcgtcctactcccgcgccttggagatgtgcccttcatgttttcagaaagagcgtagcatccttttctccaacagagcggccgctcgaatgaagcaggataagaaggaaatggccattaatgattgttctaaggcgatccagctgaacccctcctacattagggccattctgaggcgggccgaactgtacgaaaagactgacaaacttgatgaagcgttagaggactataaatccatcctggaaaaagacccctcaattcatcaggcccgagaggcctgtatgcgcctgccaaagcagatcgaagaacggaatgaaagacttaaggaagaaatgctcggaaagctcaaggacctggggaacctggtgctgagacctttcggactgtccaccgagaatttccagatcaagcaagatagtagtaccggttcatactcaatcaattttgtccagaaccccaacaataaccggtag

SEQ ID NO: 8548 - DNA, 2316 bp, synthetic construct
  misc_feature 1..2316: note = source = /note="Description of Artificial Sequence: Synthetic coding sequence"
  source 1..2316: mol_type = other DNA
atgagcggcttcttcaccagcctggacccccggcgggtgcagtggggagctgcatggtatgccatgcattcgcgcatcctgcgaactaaacctgtggaatccatgctggagggcaccggcacgactaccgcccatggcacaaagcttgcccaggtcctgaccactgtcgatctcataagtcttggcgtggggtcctgcgtgggcaccggcatgtacgtggtttccggtctggtcgctaaagaaatggctggacctggagttatagtgagttttatcattgcggccgtggcaagcattctgtctggggtctgctacgcggagtttggtgtgcgcgttcctaaaacgacggggtctgcctatacttatagttatgtcacggtgggagagttcgtagctttcttcattgggtggaacttgatcctagagtacctcattgggacagcagctggcgctagtgcactgagctccatgttcgactcacttgccaaccatacgatttcccgatggatggctgattccgtgggtactttaaacggcttaggcaagggggaagagagttaccctgacctcctggcgcttctcattgcagtcatcgtgacaatcattgttgccttaggggtgaagaactctattggattcaacaacgtgctaaatgtgcttaatttggctgtctgggtgttcattatgattgcaggactgttcttcatcaatggcaaatactgggcagaagggcaattccttccccatggctggtctggcgtgctccagggcgctgctacgtgcttctatgcctttataggattcgatatcatcgcaacaactggggaagaggccaagaaccccaacaccagtatcccctatgcaattactgcatcattagtcatttgtcttaccgcttacgtctccgtaagcgttattcttaccttgatggttccctattataccattgatacggaatcacctttgatggaaatgttcgtggcccatggtttctatgcggcaaagttcgtcgtcgctatcggcagtgtggcgggtctgactgtgagtcttttggggagcctgtttcccatgccacgagtgatctacgcaatggccggggatggactcctgttcagatttctggctcacgttagttcgtacaccgaaacccccgtggtggcatgtattgtaagtggctttctggccgcactgctggccctccttgtgtctctccgtgatctgattgagatgatgagcattggcaccctgttagcctacacccttgtatccgtttgcgtgttactcctgagatatcaacccgagagtgatatcgatggtttcgttaaatttctgagtgaagaacataccaagaagaaggagggaatactggccgactgcgagaaggaagcctgttcgcctgtgagcgaaggtgacgagttctcaggccccgctacaaacacgtgcggagctaagaacctacccagcctgggggataatgagatgctgataggaaagtccgacaagtcaacctacaacgtgaaccacccgaactacggaaccgttgacatgactactggcatcgaagctgacgaatccgagaacatctacctgattaaactcaaaaagctaatcggccctcactattatacaatgcgaattcgccttggcctgcctggcaaaatggaccgcccaacggcagctacaggacacacggttactatatgcgtgctgctgctgtttatcctgatgttcatcttttgcagttttattatttttggatccgactatatcagcgaacagagctggtgggcgattctgctggttgtcctgatggtgttgctcattagcacactggtctttgtcatcctccagcagcccgagaatcccaaaaagctcccatacatggctccgtgcttgccattcgtgccagctttcgccatgctggtgaacatctacctaatgctcaagctctccacaataacctggattcgctttgcagtgtggtgcttcgtcggacttctcatttacttcggctacggcatctggaactctacccttgaaatttctgctcgtgaggaagcccttcaccagagcacctatcaacggtatgacgttgacgatcctttctctgtggaggaggggttctcctatgccaccgaaggagagagccaggaagactggggtggaccaactgaagacaaaggcttctactatcagcagatgtctgatgcaaaggccaatgggcggacatccagtaaagccaagtcgaagtctaagcacaagcagaactctgaggcccttattgcaaatgacgaattggattattccccagaatag

SEQ ID NO: 8549 - DNA, 513 bp, synthetic construct
  misc_feature 1..513: note = source = /note="Description of Artificial Sequence: Synthetic coding sequence"
  source 1..513: mol_type = other DNA
atgggcaacgaggccagctaccccctggagatgtgcagccacttcgacgccgacgagataaaacgcctgggaaaaaggtttaaaaagctcgatttggacaactccgggtcgctgagcgtggaggagttcatgtctctgccagaactccagcaaaatccccttgtgcaacgtgtgatcgatattttcgatacagatggcaacggagaggttgattttaaagaattcatcgagggtgtttctcagttcagcgtcaaaggcgataaggagcagaagcttaggtttgcattccgcatctatgatatggataaggacggttacatttcaaatggggaattgtttcaggtgcttaagatgatggttggcaacaatctgaaggacacacagctccagcagatcgtcgataaaaccattattaacgccgacaaagatggcgacggtcgtatatcctttgaggagttttgtgccgtagtagggggcttggatattcataaaaagatggttgtagacgtttag

SEQ ID NO: 8550 - DNA, 1218 bp, synthetic construct
  misc_feature 1..1218: note = source = /note="Description of Artificial Sequence: Synthetic coding sequence"
  source 1..1218: mol_type = other DNA
atgagcagcagcgtgaagacccccgccctggaggagctggtgcccggatccgaagagaagcctaagggtagatccccactgtcttggggatctcttttcggccatagatctgagaagatagtatttgcaaagagcgacggagggactgacgagaatgtgctgacagttaccattactgagaccaccgtgatcgaaagcgatctgggagtctggtcatcgagggctcttctatacctcacattgtggtttttctttagcttttgcactctatttttaaataagtacattttgtcgctgcttggaggggagccttccatgctgggagcagtgcagatgctgagcacaaccgtgattggatgtgtgaaaacccttgtaccatgttgtctctaccagcataaagctcggctcagctacccccctaattttctcatgaccatgctgtttgtcggcctcatgcggttcgccactgtagtgctgggtctggtctcattaaagaacgtcgcagtcagtttcgccgagaccgtcaaatcctcagcccccatattcacagttattatgagtcggatgattttaggagaatatacaggactgctggtgaatctgagcctgattcctgtcatggggggcctcgccttatgtaccgctaccgagatctcttttaatgtcctggggtttagtgccgccctcagtacgaacatcatggattgtcttcagaacgtgttctccaaaaagttacttagtggcgacaagtatcggttctcagccccagagttacaattctacacatcagcagccgccgtggctatgctggttccagctcgcgtgttcttcaccgatgtacccgtgatagggaggtcggggaagtctttttcatacaaccaggacgtcgtgctcctcctacttacagatggggtgctgtttcacttgcagtccgttacagcatatgcactcatgggaaagatctcccctgtaacattctccgtggctagtacagtcaagcatgccctaagcatatggttatccgtgatcgtgtttggtaacaaaatcacctctctctcagctgtcggtaccgccctggtaaccgtgggagtgctcctgtataacaaagcgaggcagcaccagcaggaggccctccagagcctggccgccgctacggggcgtgccccagacgataccgtggagcctctcttaccccaggatcctaggcaacatccatag

SEQ ID NO: 8551 - DNA, 1131 bp, synthetic construct
  misc_feature 1..1131: note = source = /note="Description of Artificial Sequence: Synthetic coding sequence"
  source 1..1131: mol_type = other DNA
atgctgaagaagatcagcgtgggcgtggccggcgacctgaacaccgttacaatgaagctgggatgcgtgctgatggcctgggccctgtacctaagcctcggggttttatgggtggctcaaatgttgctggcagcctccttcgagaccctccagtgcgagggaccagtttgcacggaggagtcttcctgtcacacagaggacgatctaaccgatgctagggaagcggggtttcaggtaaaggcctacaccttctccgagccatttcacctgatagtcagctacgactggctgatccttcagggacctgctaagcccgttttcgaaggagacctcctcgtcctaaggtgtcaggcttggcaagattggcccctcacacaagttaccttctatcgagacggatccgcactcggtcctccggggcccaatcgagagttttctatcacggtggtccaaaaagcagatagtggccattaccactgcagcgggatctttcaaagtcctggtcctgggatacctgaaacagcgtccgtggtcgcaattacagtgcaggaactgtttcccgcacctatcctccgggcagttccgtctgcggaacctcaagctggaagtccaatgactctgtcttgccaaaccaagttacctttgcaacgttcggcagcccgccttttatttagcttctacaaggatggtcggatagtccagagccgcggtctgagttcggagttccagatcccgactgcctcggaggatcatagtggcagctactggtgcgaggcagccacagaggataaccaggtctggaagcagagcccccaactggaaattagagtgcagggggcttctagctctgcagccccccctaccctcaaccccgccccacaaaagtcagccgcgccgggcaccgctccggaggaagcaccgggccccttgcctccccccccaaccccctcatccgaagatcccggctttagctcgccactcggaatgccagatccccacctgtatcaccagatggggttgctgctgaaacatatgcaggacgttcgtgtgctcctagggcatcttttaatggagctgagagagctgagcggccacagaaaacctggtaccactaaagcaactgcagagtag

SEQ ID NO: 8552 - DNA, 1572 bp, synthetic construct
  misc_feature 1..1572: note = source = /note="Description of Artificial Sequence: Synthetic coding sequence"
  source 1..1572: mol_type = other DNA
atggcccggaaggccctgaagctggccagctggaccagcatggccttggcggctagcgggatctacttttacagtaacaaatacctagaccccaatgactttggtgctgtgcgcgtgggccgggcggttgcaaccaccgcagtgatttcttacgattatctgacctcattgaaaagcgtcccgtatggatcagaggagtacttacagctgagaagtaaagtccacttaagatctgctagaagactttgtgagctctgttgtgccaatcgtggaactttcataaaagttgggcagcacctgggggctcttgattatttgctgcctgaagagtacacttccactctgaaggtcctgcacagccaggccccacaaagcagcatgcaggaaatcagacaggtgatcagagaggatctggggaaggaaatccacgatctgtttcagtcatttgacgacacccccctgggcaccgccagcctggctcaggtccataaagcagtgctccatgacgggcgtacagtggctgttaaagttcagcatcccaaagtcagggctcagagcagcaaggacatcctgctcatggaggtgctggtgctcgctgtgaaacaattgtttcctgaattcgagttcatgtggctggtagacgaggccaagaaaaacctccctttggagctggacttcctaaacgaaggccgcaatgcagagaaagtcagccagatgctgcgacacttcgattttcttaaagtcccccgcatccactgggacctttcgaccgagcgggtgctcctgatggagttcgtggatgggggccaggtaaacgatcgggattatatggaaaggaataaaatcgatgtgaatgagatctctagacacctggggaagatgtactccgaaatgatttttgtgaacggttttgtccactgcgacccccatcccggtaacgtcctggtgcgcaaacaccccgggaccggtaaagcagagatcgtgctgctggaccatggcttgtatcagatgctgaccgaggagtttaggttaaactactgccacttgtggcaatcccttatctggacggacatgaaacgggtaaaagaatatagccagcggctcggggccggggacttgtatccactgttcgcctgtatgttgacagcccggtcatgggattctgttaatcggggcattagccaagctcctgtgacagcaacagaggatctcgaaatccggaataatgcagccaattacttgccccagatcagccatctgttgaatcatgtccctaggcagatgctcttgattctgaagactaacgacctgcttagagggattgaagctgcactcgggaccagagcatccgcaagtagctttctcaacatgagtcgatgttgcatccgagcattggcagagcataaaaagaagaatacttgtagcttctttagaagaactcaaattagtttcagcgaggcctttaatctgtggcagataaacctgcatgagttgattctgcgggtcaaaggattgaagttagctgaccgcgtgctggccttaatctgttggctttttcctgcgcccctctag

SEQ ID NO: 8553 - DNA, 1197 bp, synthetic construct
  misc_feature 1..1197: note = source = /note="Description of Artificial Sequence: Synthetic coding sequence"
  source 1..1197: mol_type = other DNA
atgtggctgctgctgaccatggccagcctgatcagcgtgctgggcacaactcatggtctgtttggaaagctgcatcccggctctcctgaagtgacaatgaacatatcccaaatgatcacctactggggctaccccaatgaagagtatgaagttgtcaccgaggatggatacatcctggaagtaaataggatcccatacggcaagaagaactcgggcaataccgggcaaagacccgtcgtgttcttacagcacggcttgctggcttctgcgaccaactggatttctaacctccctaacaatagccttgcatttatacttgccgatgctggctatgatgtgtggctgggcaattccaggggaaatacctgggcaaggagaaacttatattacagccctgatagtgttgaattctgggcatttagcttcgacgaaatggccaagtatgatttgcctgcaacaattgacttcattgtgaaaaagaccggacagaagcagttgcattacgtgggacacagccaaggcaccaccataggcttcatcgccttctctactaatccaagtctagctaaacggatcaaaacgttctatgctctggcacctgtggcaaccgtgaagtacaccaaatccctgattaataaactgcgcttcgtgcctcaatctttattcaaatttatcttcggcgacaagatcttttatccccacaatttctttgatcagttcctggccactgaagtctgtagtcgagaaatgctcaatctcctttgcagtaatgccctgttcattatctgtgggtttgactccaaaaactttaataccagccgattagacgtttacctgtcacataaccccgctggcacctccgtccagaatatgtttcattggacccaggctgtgaagtctgggaaatttcaagcttacgattggggatcgcctgtccaaaacaggatgcattacgaccagagccaacctccatattataatgtcaccgccatgaatgtgcccatcgccgtgtggaatggaggaaaggatctcctggctgacccacaggacgtggggctccttctgcctaagctgccaaacctgatctatcataaggagatccctttttacaaccacttagactttatttgggccatggacgccccacaggaggtttacaatgatatcgtgagcatgatttcagaggacaaaaagtag

SEQ ID NO: 8554 - DNA, 555 bp, synthetic construct
  misc_feature 1..555: note = source = /note="Description of Artificial Sequence: Synthetic coding sequence"
  source 1..555: mol_type = other DNA
atgcggggccagggccggaaggagagcctgagcgacagccgggacctagacgggagctatgaccagttgactgattcagtagacgacgagttcgagctgagtacagtttgccacaggcctgaagggctggaacaattgcaggagcagaccaaattcacaaggaaagaactgcaggtgctgtaccggggattcaagaatgagtgccccagcggaattgtcaatgaggagaattttaaacagatctattcacagttttttccccagggagattcctccacgtatgcgacatttctcttcaacgctttcgacaccaaccatgatggaagtgtatcatttgaggaaatgctcgatatcatgaagagcatctacgatatgatggggaaatatacctatcccgccctcagagaggaagcacctcgggaacatgtcgagtcctttttccagaaaatggacagaaataaagacggagtggtgacgattgaggaatttatcgagtcatgccagaaggtgcagctgccagccctctacatcacccttacctggacccaggcatag

SEQ ID NO: 8555 - DNA, 3900 bp, synthetic construct
  misc_feature 1..3900: note = source = /note="Description of Artificial Sequence: Synthetic coding sequence"
  source 1..3900: mol_type = other DNA
atgagcctgcaggagatgttccggttccccatgggcctgctgctgggatccgtgctactggtggcttcggctcccgcaacgttggagcccccggggtgcagcaacaaggagcaacaagtcactgtcagccacacatacaagatcgacgtgccaaagtcagcactcgtgcaggtagatgctgacccgcaaccactctcagatgatggcgccagtttgctggccttgggagaggcacgcgaggagcaaaacatcatttttagacacaatatccggctgcagacgccgcagaaagattgcgagctcgctggctctgtccaggacttgcttgccagggtgaagaagctggaagaggagatggtggagatgaaggaacagtgttctgcccagcgctgctgtcagggtgtcaccgatctctcaaggcactgttccggccatgggaccttctctctggaaacttgctcgtgccactgcgaggaagggagagaaggccccgcttgcgagagattggcatgcccgggcgcttgcagtggccacggtaggtgcgtggatgggagatgtctgtgtcacgagccttatgtaggggcagactgcggttatcccgcgtgtccggaaaattgtagcggccatggtgaatgtgtgcgtggggtgtgtcagtgccacgaggacttcatgagcgaggactgtagcgaaaaaagatgtcccggcgattgcagtggacatggcttttgtgatacaggcgagtgttactgtgaggaaggctttaccggactcgactgcgctcaggtggtcacgccccaggggcttcagctgctaaagaacaccgaggattcattgttggtatcttgggagcccagctcacaggttgaccactacttgttgagttattaccccttaggcaaggaactctcaggtaagcagatccaagtccctaaggaacagcactcttatgagatcctcgggctgttgcccggcacgaaatacattgtgactttgcgcaacgtgaaaaacgaggtctcaagtagtccccagcacctgctggccacaaccgacttagccgtcctggggactgcttgggtcacggatgagactgaaaatagtcttgacgtggaatgggagaatccctctacagaggtcgactactacaagctcaggtacggcccaatgactgggcaggaggtcgctgaggtgaccgtgcccaaatcctccgacccaaaatcgcggtacgacatcacaggcctccatcctggcactgaatacaagattacagttgttccaatgagaggtgaattggaaggcaaacccattcttctgaatggtagaactgagattgactcaccgactaatgtggtgacggacagggtgacagaagatactgctacagtgagctgggatccagtgcaggcagtgattgacaagtatgtagtacgttacacctcagcagatggtgatactaaagaaatggccgttcacaaggatgaatccagcacagttctcacaggtctgaagccaggcgaagcctacaaagtttacgtctgggccgaacgcggcaatcaggggtctaaaaaagccgatacgaacgctctgaccgagattgatagccccgccaacctggtcaccgaccgcgtgactgaaaatactgctaccataagctgggatccagtgcaggcaacaatcgataagtatgtggtgagatacacttctgctgacgaccaggaaaccagagaggtgttggttggcaaggaacagtcctctacagtcctgaccggcctgcgcccaggagtagagtacaccgtgcatgtatgggcacaaaaaggagaccgcgaaagcaagaaggccgataccaatgcccccacagatatcgactcccccaaaaaccttgtcactgatagagtcaccgagaatatggcaacggtgtcatgggacccggttcaagcagccattgacaaatatgtggttaggtacaccagcgctggcggcgaaactagagaggtgccagtcggcaaagagcagtcatctacagtgctcactggtctgcgacccggcatggaatatatggtccatgtgtgggcacagaaaggagaccaggagtccaagaaggcagacacaaaagcacaaaccgatatcgactcaccccagaacctggttactgatcgcgttacagagaatatggcaacagtgagctgggacccagtcagggccaccatcgaccgctacgtcgtcagatacactagcgccaaggatggagagacacgtgaagtccctgtaggaaaagaacagtcgagcacggtgctaacagggctgcggcccggagtagagtacacggtgcatgtgtgggcccagaagggggctcaggagagtaaaaaggcagacaccaaggctcagacagacatagactcaccccagaatctcgtgacggactgggttacggaaaacaccgctacggtttcttgggatccagttcaggccactattgaccgctacgtcgtgcactatacctcagccaatggggagacacgggaggtgccagtgggaaaggagcagtcatcaaccgtgctgaccgggttacgacccggcatggaatacacagtacatgtatgggctcagaaaggcaatcaggaaagcaagaaggctgacactaaagcccagactgagattgacggacccaagaacctggtgacagactgggtgacggagaacatggcaacagtatcatgggaccccgttcaggcaacaatagataagtacatggtacgctacacctccgccgatggtgagaccagggaggtccctgttggcaaggagcatagctctacagtgctgacgggcctccgtcctggcatggaatatatggtgcacgtgtgggcccagaagggcgcccaggagtcaaagaaggccgacaccaaagcccaaaccgagctggacccgccgagaaacttacggcctagtgcagtgactcagtctggcggaatcctgacatggacacccccctctgcccagattcacggctatatcctaacttatcagttcccagacggcactgtaaaggaaatgcagttaggtagagaggatcagcggttcgccctacagggcctggagcagggtgcaacgtaccccgtatccctagtggcttttaagggtggtcgcaggtcacgtaacgtcagtactactcttagcaccgtcggcgctcgctttccccacccttccgactgctcgcaggtgcagcagaattccaacgccgcatccgggctctatacaatatacttacatggcgacgccagtaggccactgcaggtgtactgtgacatggaaaccgacggcgggggttggatagtcttccaacggcggaataccgggcaattggattttttcaagaggtggcgcagttacgtcgaagggtttggagatcccatgaaggagttttggctggggctggacaagctccataacttaactaccggaactcctgccaggtatgaggtacgagtcgacctgcagaccgctaacgagagtgcctatgcgatttatgattttttccaggtagcctcttcaaaggaacgctataagctcacagttggaaaatacagggggaccgcaggtgacgccctgacctatcacaatggctggaagtttacaacgttcgatagggacaatgacatcgctctatctaattgcgctttgacacatcacggggggtggtggtacaagaattgtcacctggcaaaccctaatggcagatatggtgagaccaaacacagcgagggagttaactgggaaccatggaagggccacgagtttagtataccttacgtggagctgaagattaggcctcacgggtattccagagagcccgtcctgggcaggaagaagaggacccttagagggcgcctgcggaccttctag

SEQ ID NO: 8556 - DNA, 1662 bp, synthetic construct
  misc_feature 1..1662: note = source = /note="Description of Artificial Sequence: Synthetic coding sequence"
  source 1..1662: mol_type = other DNA
atgacccggggcggccccggcggccggcccggcctgccccagccccctccgctccttttgctcctcctcctgctgccgctgctgctggttactgccgaaccccccaagcccgcaggcgtttattacgcaacagcgtattggatgcccgccgaaaaaaccgttcaggtaaagaatgtgatggataagaatggcgatgcctacggcttttacaataacagcgtgaaaacgactggctggggaattctcgaaataagggcagggtacggaagtcagacgctcagcaacgagatcatcatgttcgtcgctgggttcctggaaggataccttaccgccccgcatatgaatgatcactacaccaacctatatccacagttgattacgaaaccgagtatcatggacaaagtccaggactttatggaaaagcaagataagtggacccgtaagaacatcaaggaatataagacagatagcttctggcggcataccggctatgtgatggcccagatcgatggcttgtacgtcggcgctaagaaacgcgcgatcctcgaaggtaccaagcccatgacattattccagatccagtttctcaacagcgtcggcgatttgctcgacctgattccatcactttcccccaccaaaaatggatcactgaaggtcttcaagagatgggatatgggtcactgctctgctctgattaaggtgctgcctggattcgagaacatcctgtttgctcactcctcatggtacacctatgcagcaatgcttaggatttacaagcattgggatttcaatgtgattgacaaggacacgagttcaagcagactgtcgttttcatcttaccctggttttttggaaagtctggacgatttctatatcttgtctagcggacttatcttgctgcagactaccaatagtgtgtttaacaaaacgttactcaagcaggtgatcccagaaactctgctttcttggcaacgggttcgtgttgcaaacatgatggcggatagcggaaaacgctgggcagacatattttcaaaatataactccggcacctataacaaccagtacatggtcttggacctgaagaaggtgaagttaaatcattccctggacaaggggacactgtacatcgtagaacagattccaacatacgtagagtatagcgagcaaacggacgtgttgcgtaaaggctactggcctagttacaacgtgccatttcatgagaagatatataattggagcgggtacccattactggtgcagaaactagggctcgattactcgtatgatctggccccacgagctaaaatatttaggcgggatcagggcaaagtgaccgatacagcctctatgaagtatattatgcgatataataattataagaaagacccatacagccggggtgacccttgcaacacaatttgctgccgcgaggatcttaattcgcccaacccatcacctggaggatgttatgacaccaaggtcgccgacatatatctggctagccagtacacctcctatgcaatctctggcccaactgtgcagggaggtctgccggtgttcagatgggaccgatttaacaagactctccatcaggggatgcctgaggtttataactttgactttatcactatgaagccaattctgaagcttgacataaagtag

SEQ ID NO: 8557 - DNA, 2271 bp, synthetic construct
  misc_feature 1..2271: note = source = /note="Description of Artificial Sequence: Synthetic coding sequence"
  source 1..2271: mol_type = other DNA
atgagccggcccggcaccgccacccccgccctggccctggtgctgttagccgtgacactggctggggtgggcgcccagggtgctgcactggaagatcctgactactatggtcaagagatctggtctagggagccctactacgcccgaccggagcccgagctagaaactttctccccacctctgccagcagggcccggcgaagagtgggaacggcgtcctcaggagccacgtccccccaagagggccacaaagccaaaaaaagctcccaagagggagaagagcgcccctgagcctcctcctccggggaagcattccaacaagaaagtcatgcgcactaagagcagcgaaaaggctgcaaacgatgaccatagtgtgagggtggctcgagaggatgtccgcgagtcatgtccacccttggggctagaaactctgaagattacagacttccagttacacgcttccacggtcaagcgttacggactgggcgctcaccggggcagattgaacatacaagcaggcataaacgaaaatgacttctatgatggagcctggtgtgccggcagaaatgatctgcagcaatggattgaggtcgacgcccggaggttgaccaggttcactggtgtcattacgcagggtcgcaattccctgtggctaagcgactgggtaacctcatacaaggtgatggtctccaacgatagccatacttgggtgactgttaagaacggctcaggagatatgatttttgaaggcaactcggagaaagagatccctgtcctgaacgaactgccagtgcccatggttgcacgttacattcgcatcaaccctcagtcctggtttgacaacggtagcatctgtatgcggatggaaatcctcggttgtccgttaccagaccctaataattattaccaccggagaaatgagatgacaacgacagatgatcttgactttaaacatcataattataaagaaatgcgacagttaatgaaggtcgtgaatgagatgtgccctaacattacccgtatttataatattggtaagagtcaccaaggactgaagctttatgccgtggagatctcggaccatcccggggaacatgaggttggcgaaccagaatttcactatattgccggcgcgcacggcaatgaagtgctgggtcgggagctactactattgctggtgcagttcgtgtgccaggaatacttggcgagaaacgcgaggatcgttcacctcgtggaagagacaaggatccatgtgctgccttccctcaacccagacggttacgaaaaagcttatgagggcggatcggagctggggggttggtcgctcggacgttggacccacgacggtatcgacatcaacaataatttccctgacctgaacacgctcctgtgggaggctgaggacagacagaacgtgccaaggaaagtcccaaatcactacattgcaatcccagaatggtttttgtccgagaacgcgacagtagcggccgagactagagccgtgattgcttggatggagaagatcccctttgtcctaggcggtaatctgcagggtggtgagctggtggtggcttatccttacgacctggtgcgttcaccatggaagacacaggagcatacaccaactccagatgatcacgtgtttagatggctggcatatagttacgcaagcacacataggcttatgacagatgcaaggaggcgagtctgtcatacagaggattttcagaaggaggagggcactgtcaatggagcaagctggcacaccgtggccgggagcctgaacgacttcagctacctacataccaattgcttcgagctcagtatctatgttggatgtgacaaataccctcatgagtcccaactcccagaagagtgggagaataacagagaaagcttaatcgtatttatggagcaggtgcaccgcggaatcaagggcctagttcgggattcccatggtaaagggattcctaatgcaattattagcgttgaggggatcaatcacgacattcgcactgctaatgacggggactattggcgcctactcaaccccggcgaatacgtggtgaccgctaaggctgaagggttcaccgcctcgactaaaaattgcatggtcgggtacgatatgggtgccaccagatgcgatttcactctgtctaagactaacatggctcgcattcgggagatcatggagaaatttggtaagcagcctgtatctctgcccgctaggcgcttaaaactgcggggacaaaagaggcgtcaaagaggttag

SEQ ID NO: 8558 - DNA, 702 bp, synthetic construct
  misc_feature 1..702: note = source = /note="Description of Artificial Sequence: Synthetic coding sequence"
  source 1..702: mol_type = other DNA
atggccaccccccccttccggctgatccggaagatgttcagcttcaaagtaagccgctggatggggctcgcttgcttccggtccctagcagcatctagcccaagcatccgccagaagaaactgatgcacaaactgcaggaagagaaggccttccgggaagagatgaagatattccgcgagaagatagaggactttagagaggagatgtggactttccgaggcaagatacatgcctttagggggcaaatcttgggcttttgggaagaagaacggcctttttgggaagaggagaagacattttggaaagaagaaaagtccttttgggaaatggaaaaatcctttcgcgaggaagagaagactttctggaaaaagtatcggaccttctggaaagaagataaagcgttctggaaagaagacaacgctctctgggaaagggacagaaacctcctgcaggaggacaaagccctgtgggaggaagaaaaagctttgtgggtggaagaacgggcgctgctggaaggggagaaagctctgtgggaagacaagacctctttgtgggaagaagagaatgccctctgggaggaggagcgagctttttggatggagaacaacggccacatcgctggggagcaaatgctcgaggacggaccacacaacgcaaatcggggccagagattgctcgctttttccaggggacgggcttag

SEQ ID NO: 8559 - DNA, 696 bp, synthetic construct
  misc_feature 1..696: note = source = /note="Description of Artificial Sequence: Synthetic coding sequence"
  source 1..696: mol_type = other DNA
atgatgctgagctgcctgttcctgctgaaggccctgctggccctgggttctttagagagctggatcactgcgggcgagcacgctaaagagggggaatgcccacctcataagaacccatgcaaagagctgtgccagggagacgaattgtgtcccgccgagcagaaatgttgtaccacaggttgcggcagaatttgccgcgatatccccaaaggacgcaaaagggactgtccgagggtgatccgcaagcagagctgtctgaagagatgcattaccgatgaaacatgcccaggagtgaaaaagtgctgtactcttggctgtaataaaagctgcgtagtgcctatcagcaagcagaagcttgctgaatttggaggggaatgtcccgcggaccccctgccatgcgaggaactgtgcgacggtgacgctagctgtccccaaggtcataagtgctgcagcacaggttgcggtcgcacctgtctaggtgatatcgagggcggacgagggggggattgcccaaaggtgctggtggggttatgtatcgtgggatgcgtgatggacgaaaactgccaggccggggagaaatgctgtaagagcggatgtggccgattctgcgtgccaccggtgctgcctccaaaattaacaatgaatcccaattggaccgtgcgctcggactcagaactggagatccctgtgccctag

SEQ ID NO: 8560 - DNA, 1050 bp, synthetic construct
  misc_feature 1..1050: note = source = /note="Description of Artificial Sequence: Synthetic coding sequence"
  source 1..1050: mol_type = other DNA
atgggccccatcagcgcccccagctgccggtggcggatcccctggcaaggtctgctcctgacggcatcattgtttacgttttggaatcccccaactacagcacaactgaccatcgaggccgtgccgtcaaacgccgcagaaggtaaggaagtgctgctgttagtacataatctacctcaggatcctagaggctataactggtataagggagagaccgtggacgcaaaccgccgaattataggttacgtgatctccaaccagcagattacacctggcccagcttattccaacagagagactatttatcctaatgctagccttttaatgaggaatgtgacccgtaacgatacaggctcttatacacttcaggtcatcaaactgaatctgatgagcgaggaggttacggggcagtttagcgttcaccctgaaacccctaaaccttcaattagttccaataacagcaatcccgtggaggataaggatgccgtcgcctttacatgcgaacccgaaacccagaacacaacatacctgtggtgggtcaatggacagagcctcccagtgtctcctagactgcagctaagcaatggaaacagaactctaactttactaagcgttaccagaaacgacgttggtccttacgagtgcgagatccagaacccggcctctgctaatttttccgaccccgttaccttgaatgtgctctacggacctgatgcccctaccatctctccgtcagacacatactatcacgctggggtcaacctgaacttgtcatgtcatgctgcatccaacccaccctcacaatatagctggtccgttaatggaacattccagcagtatactcagaagctgttcatccctaatattaccacaaaaaactcaggcagctacgcctgtcacactacaaattcggcaactggccgtaataggactactgtcaggatgatcactgtatctgatgccttagtccagggaagttctcccggactttcggctcgcgcgacggtgtccatcatgattggcgtgctggctagggtggccctgatctag

SEQ ID NO: 8561 - DNA, 510 bp, synthetic construct
  misc_feature 1..510: note = source = /note="Description of Artificial Sequence: Synthetic coding sequence"
  source 1..510: mol_type = other DNA
atgaccgccggccggcggatggagatgctgtgcgccggccgggtgcctgctttactgctgtgtctggggtttcatcttttacaggccgtcttgagcactacagtgatcccatcttgcattccaggagaatcctctgataactgcaccgcactggtgcagactgaagacaacccccgagttgcccaggtgtctatcactaaatgttcatctgacatgaacggctattgtctgcatgggcagtgcatctatcttgtcgatatgtcccagaattattgcaggtgcgaagtgggatacacaggggtgagatgcgaacatttttttttgactgtgcaccagccattaagcaaggagtacgtagcgctgactgtgatcctgattatcctgttcctgatcacggttgtgggttctacttactatttctgcaggtggtaccgtaacaggaaatccaaggagcccaagaaggaatatgaacgagtgacctcgggagatcctgagcttcctcaggtctag

SEQ ID NO: 8562 - DNA, 273 bp, synthetic construct
  misc_feature 1..273: note = source = /note="Description of Artificial Sequence: Synthetic coding sequence"
  source 1..273: mol_type = other DNA
atgaagctgagcgtgtgcctgctgctggtgaccctggccctgtgctgttaccaggccaacgccgaattttgtccagctctggtcagtgaactcttggattttttcttcatttcagaacctctgtttaaactcagcctggccaagtttgacgcaccgccggaggccgtcgctgccaagctgggagtgaaacggtgtacagatcagatgtccctacagaagagatcactcattgcagaagtgctagtgaagatcctgaaaaagtgcagcgtatag

SEQ ID NO: 8563 - DNA, 429 bp, synthetic construct
  misc_feature 1..429: note = source = /note="Description of Artificial Sequence: Synthetic coding sequence"
  source 1..429: mol_type = other DNA
atgccccggtgccggtggctgagcctgatcctgctgaccatcccccttgcgctggttgcgaggaaagaccccaaaaaaaacgaaactggggtcctgaggaaacttaaaccagttaatgcgtccaatgctaatgtgaaacagtgtctctggttcgccatgcaagaatacaacaaggaatcagaagacaaatatgtcttcctagtggtaaaaactctgcaggcacaactccaggttactaatctgttagagtatctgatcgatgtggagattgcacggagcgattgcaggaagcccctgtcaaccaacgaaatatgtgccattcaggagaactcaaagctgaagagaaagctgtcatgcagttttctggtgggcgccctgccttggaacggcgaatttacagttatggaaaaaaaatgcgaagacgcatag

SEQ ID NO: 8564 - DNA, 438 bp, synthetic construct
  misc_feature 1..438: note = source = /note="Description of Artificial Sequence: Synthetic coding sequence"
  source 1..438: mol_type = other DNA
atgggcatcggctgctggcggaaccccctgctgctgctgatcgccttggtgttgtccgcaaaattaggccactttcaaagatgggaaggctttcagcagaagttgatgagtaagaagaacatgaacagcacactgaatttctttatccagagctataacaacgcctcaaacgatacatatctctaccgcgtgcagaggctcatccgctcccaaatgcagctcacaacgggagttgagtacatcgtgaccgtgaaaatcggatggaccaaatgtaagcggaatgatactagcaattcatcttgtccactgcagagtaaaaagctgcggaaaagcctgatctgtgagagtctgatctacacaatgccatggataaattatttccagctgtggaataattcctgcctcgaagccgaacatgttgggcgcaatctccgatag

SEQ ID NO: 8565 - DNA, 552 bp, synthetic construct
  misc_feature 1..552: note = source = /note="Description of Artificial Sequence: Synthetic coding sequence"
  source 1..552: mol_type = other DNA
atgaagctgctgttccccatcttcgccagcctgatgctgcagtaccaggttaacacagagtttatagggctccgtagatgcctgatgggcctggggcgttgtcgtgatcattgcaacgtggatgaaaaggaaatccagaaatgtaagatgaaaaaatgttgtgtggggcctaaggtagtcaaactgattaagaattatttgcagtacggaactccaaatgtactgaatgaagatgtacaagagatgctgaaaccagcaaaaaatagctccgcagtgattcagcggaaacatatactttccgttctgccacagataaaatctacctcttttttcgcaaacacaaatttcgtgatcatccctaacgctactcctatgaattccgcgacaatctccactatgaccccaggccaaataacatataccgccacaagtaccaagtcgaacacaaaggaaagtcgggactccgctactgcctcccccccccccgcacctcccccaccgaacatattgcctactccatccctggagctggaagaggccgaagaacaatag

SEQ ID NO: 8566 - DNA, 609 bp, synthetic construct
  misc_feature 1..609: note = source = /note="Description of Artificial Sequence: Synthetic coding sequence"
  source 1..609: mol_type = other DNA
atgcggggccaccccagcctgctgctgctgtacatggccctgaccacatgcctcgatacaagcccatctgaggagacagatcaagaagtgttcttgggcccacccgaggctcagtcttttctgagctcccatacaaggattcctcgcgcaaaccactgggacctggaactcttaacaccgggtaacctggaacgtgagtgtctggaagagcgctgttcctgggaggaggcccgtgaatacttcgaggacaataccctgacagaacggttttgggaaagctacatatataatggtaaggggggacgcggcagagtcgatgtcgcgtcactggcagtagggctcaccggtggcatactcctgattgtgctggcaggcctcggtgccttctggtatctccgctggagacagcaccgtggccagcaaccttgtccacaggaggcgggactaatatctcctctgtcacccctgaaccccttaggaccccctactccattgcctccgcctcccccaccaccacccggactgcctacctatgaacaggccttggctgcatctggcgtgcatgacgctcccccgccaccctatacttccctccgacgaccccactag

SEQ ID NO: 8567 - DNA, 558 bp, synthetic construct
  misc_feature 1..558: note = source = /note="Description of Artificial Sequence: Synthetic coding sequence"
  source 1..558: mol_type = other DNA
atgcggctgctgatcctgacctgcctggtggccgtggccctggccaggcccaagctgcccttaaggtatcccgaaaggctgcagaatccatctgaaagctcggagcccatcccattggaaagccgtgaagaatacatgaatggtatgaaccggcagaggaacatcctgcgagagaaacaaacagatgagatcaaggatacaaggaatgagagcactcaaaactgcgtggtcgccgagcccgagaagatggagtcaagcataagcagtagtagcgaggagatgtctctaagtaagtgcgctgaacaattctgcagacttaatgagtataatcagttgcagctgcaggcggcacatgcccaagagcagataagacggatgaatgaaaattcccacgtacaggtgcctttccagcagctcaaccagctcgccgcctacccatacgctgtgtggtattacccccagatcatgcaatatgtgcctttcccaccttttagcgacatatccaacccaaccgctcatgagaactatgagaagaataacgtgatgctgcagtggtag

SEQ ID NO: 8568 - DNA, 1410 bp, synthetic construct
  misc_feature 1..1410: note = source = /note="Description of Artificial Sequence: Synthetic coding sequence"
  source 1..1410: mol_type = other DNA
atgatcaccgagggcgcccaggccccccggctgctgctgccccccttgctgctgctgttaactctccctgcaaccgggagcgatccagttctctgttttacccagtacgaggagtcttccgggaagtgtaagggacttttaggcggcggcgtttctgtcgaggattgttgtcttaatactgcgtttgcgtaccagaagaggagcgggggattgtgtcaaccgtgccggagccctagatggagtctctggagtacgtgggcaccctgtagcgtgacttgcagtgaggggagccagttgagatacagacggtgcgtaggctggaatggacaatgctcaggaaaagttgcccccgggaccttagaatggcagctgcaggcttgcgaagaccagcagtgctgccccgagatgggcggatggtccggctgggggccttgggagccatgttctgtgacttgtagtaagggaacgcgtactaggcggcgcgcctgcaatcaccccgccccaaagtgcggggggcattgccccggtcaggcccaggagagcgaggcttgcgacacccagcaggtgtgtccgactcacggggcctgggcaacctggggcccttggaccccttgttcggcttcctgccatggagggccccacgaacctaaggagacccggagtcggaagtgtagcgcccctgaaccgagccagaagccacctggcaaaccctgtcctggattagcttacgagcaacgccgatgcaccggtcttccaccttgccctgtagccggcggctggggtccctggggacctgtgtcgccttgccccgtgacctgtggcctaggacagactatggagcaaaggacttgcaaccaccccgtgcctcagcatggtggccctttttgtgctggtgacgccacccggacccatatttgtaatactgctgtgccctgtccggtggatggcgagtgggattcttggggcgagtggtccccttgcatccggcgcaacatgaagtctatcagttgtcaggagatcccgggccagcaaagcagagggaggacatgtcgcggcaggaagtttgatggccacagatgtgccggacagcaacaagatatccgacattgctacagcatccagcactgccccttaaaggggagttggtcagaatggtcgacttggggcctgtgcatgcccccctgcggcccaaatcctaccagagctaggcagaggctctgcacacccctcttacctaagtaccctccaacggtaagcatggtcgagggccagggagagaaaaatgttactttttgggggcgccccctaccacggtgtgaggagctgcaaggtcagaagctggtagtcgaagagaagaggccctgcttgcacgtgcctgcatgtaaggatcccgaggaggaagagttatag

SEQ ID NO: 8569 - DNA, 453 bp, synthetic construct
  misc_feature 1..453: note = source = /note="Description of Artificial Sequence: Synthetic coding sequence"
  source 1..453: mol_type = other DNA
atgctgatcgccaccagcttcttcctgttcttcagcagcgtggtggctgcaccaacgcattcatccttttggcagttccagcgaagagtcaagcacatcaccggccgttcagctttcttctcttattacggatacggctgctactgtggacttggggacaaaggcataccagtggatgatactgacagcccatcatctccctccccgtacgagaaactgaaagagtttagctgtcagccggttctcaactcttaccagttccacattgtgaatggtgccgtcgtttgcggttgtacactcgggccaggtgcatcgtgtcactgtcgcctcaaagcttgcgagtgtgacaagcagagcgtgcattgctttaaggaatctctgcctacatacgaaaagaactttaaacaattctccagtcaacccaggtgcggaagacataaaccttggtgttag

SEQ ID NO: 8570 - DNA, 1347 bp, synthetic construct
  misc_feature 1..1347: note = source = /note="Description of Artificial Sequence: Synthetic coding sequence"
  source 1..1347: mol_type = other DNA
atgcgggagtgcatcagcgtgcacgtgggccaggccggcgtgcagatgggaaatgcatgctgggaactgtattgtctcgagcatggtatacagccggacggccagatgccatcagacaaaaccattggcggaggcgacgacagcttcacaaccttcttttgcgagacaggcgcaggaaagcatgttcccagggcggtgttcgtggatctggagccgaccgtgatcgatgagattcggaacgggccatatcgccagcttttccaccctgagcagctgattacggggaaggaggatgcagctaataactacgctaggggccattatacaatcgggaaagaaattatcgacccggtgctggaccggattcgcaaacttagcgaccaatgcacaggactgcagggcttcctggtgtttcattcatttggagggggcacaggcagtggtttcaccagcctcctgatggaaaggctgtccgttgactatgggaagaaatctaagttagagttttctatctaccccgcaccacaggtgtccactgccgtcgtcgaaccatataattcaattttaaccacacacacaacactggaacactccgattgtgcctttatggtggataacgaagcaatctacgatatttgccgtcgtaacctggatatcgaacggccaacttataccaatctgaacagattgattagccaaatcgtgtcctccattaccgcctctctgcggttcgatggggcattgaatgtcgatctaactgaattccagacgaacctcgttccttacccacgtatacatttcccactggcaacatatgcacctgtcatttcagcagaaaaggcgtatcatgagcaattgagcgtagccgaaatcacaaatgcttgcttcgaacccgccaaccagatggtgaaatgcgatcccagacatggtaaatatatggcctgttgcttactgtaccgtggagacgtggtgccgaaagacgtcaatgcggccatcgccgcaatcaagaccaaacggagtatccagtttgttgattggtgcccaacaggctttaaggtggggatcaattatcaaccacccactgttgtccctggaggcgacctagccaaagtccagagagcagtgtgcatgctaagcaatacaaccgccattgctgaagcttgggccagattggatcacaagttcgacctaatgtacgcaaagcgagccttcgtacactggtacgtcggtgaaggaatggaggagggggaattctccgaagcgcgggaggacatggccgctctcgagaaagattacgaggaggttggaatagattcatacgaggacgaggatgaaggagaggaatag

SEQ ID NO: 8571 - DNA, 942 bp, synthetic construct
  misc_feature 1..942: note = source = /note="Description of Artificial Sequence: Synthetic coding sequence"
  source 1..942: mol_type = other DNA
atgcgggtggtgaccatcgtgatcctgctgtgcttctgcaaggccgcggagcttagaaaagcctctcctgggtccgttcgatcccgcgtaaatcatggtcgcgcaggcgggggaaggcgcggtagtaatcccgtgaagcggtacgcgccaggtctgccttgcgacgtgtatacctacctccatgagaagtacctcgactgtcaagaaaggaaactggtttatgtccttcctggttggccacaggatctgctccacatgctgctggccagaaacaagattaggacactgaagaataacatgttctccaagttcaaaaaattgaagagtctcgatctgcagcaaaatgagatctcgaagatagagagtgaggcatttttcggactgaacaagttaaccaccctgctcctacaacacaaccagatcaaggtgctgacggaagaagtttttatttataccccccttctgtcttacctccggctgtatgataatccatggcactgtacttgtgagattgaaacgctgatctctatgctgcagatccctagaaataggaacttgggtaactacgcaaagtgcgagtctcctcaagagcaaaagaacaaaaagttgcgccagatcaagtcagagcaactttgtaatgaggaggagaaggagcagctggatccaaagccccaagtgtctggccggccgccagtcattaagcctgaggttgattccacgttctgccataattatgtgttccccattcagactctcgattgcaaaagaaaagagcttaagaaggtgccaaataacatcccccccgacatcgtgaaactagacctgagctacaacaagatcaaccagcttcggcctaaagaatttgaagacgtgcacgaactgaaaaagcttaacctatccagcaatggtattgagttcattgatcctggctcactgagatag

SEQ ID NO: 8572 - DNA, 972 bp, synthetic construct
  misc_feature 1..972: note = source = /note="Description of Artificial Sequence: Synthetic coding sequence"
  source 1..972: mol_type = other DNA
atgcaggccgcctggctgctgggcgccctggtggtgccccagctgttgggatttggccatggagctcgtggtgctgaacgtgagtgggaaggagggtgggggggcgcccaggaagaagagagagaaagggaggcgctcatgttgaaacacctccaggaggcgctgggactccccgcgggacggggggacgagaaccctgctggaacagtggaaggaaaggaggattgggagatggaagaggaccagggcgaagaagaggaggaagaagccactcctacccctagctcagggcctagcccaagtccaacccctgaggatatcgttacatacattttggggagactggccgggctggacgcgggattgcatcagttacacgtccggttgcacgctttggatacacgcgtcgtagagttgactcagggactcagacagctgcgcaacgccgctggggatacaagagatgcagtgcaggccttgcaggaagcacagggtagagctgagagagagcacggtcgcctggaagggtgcctgaagggactgcggctggggcataagtgctttttgttgagtagggattttgaggctcaggcagcagcccaagcacggtgcacggcccggggcgggtccctcgcccagccagcagataggcagcagatggaggccctgacgagatatctgcgcgcggctcttgccccatacaattggcccgtctggctgggagtacatgatagacgtgctgagggtctgtacctcttcgagaacggccagcgggtgtcattttttgcctggcaccgaagtcccaggcctgagttgggggcccaaccctccgcaagtccgcatccactcagcccagatcagcctaacggaggtaccctcgagaactgcgtggcccaagcatccgatgatgggtcttggtgggatcacgattgtcagaggcggctgtactatgtatgcgagttccccttctag

SEQ ID NO: 8573 - DNA, 1086 bp, synthetic construct
  misc_feature 1..1086: note = source = /note="Description of Artificial Sequence: Synthetic coding sequence"
  source 1..1086: mol_type = other DNA
atgaacggcctgagcctgagcgagctgtgctgcctgttctgctgccccccctgtcccggtcggatcgctgcaaaacttgctttcctgccaccggaagctacatattcactggtgcccgagcctgaacccgggccaggaggcgcaggggcagcccctctaggaacattgcgggcatcatccggagctccagggcgatggaaacttcatctgacggaacgcgccgattttcagtatagtcagcgtgagttggatacaatcgaggtctttccaacgaaatccgctagggggaatagggtttcctgtatgtatgttagatgcgtgccaggagcccgccaaggacaccaagcacagggcggccacccgcagctcgcctgggtgggtcgacttggcgactcaaacaatcctgctcccggcgggtgcctgttgggcaagagctggggcacgggagctgctctggcttgcggctatatccacctgctggcacgttacacagtgctgttttcacacggtaacgccgtggatcttgggcagatgtcttccttctacatcggcctgggctctcgtctgcattgcaacatcttctcctacgactattccggatacggggcctctagtgggaggccctccgaaaggaatctatatgctgatatcgatgccgcgtggcaggcccttagaacacggtacggcattagtcccgacagtatcatcctctatgggcaaagtatcgggactgtgcctaccgtcgatctggcgagcaggtacgagtgtgctgccgtggtgttgcattcccccctcacctcaggtatgcgcgtggccttcccagataccaagaagacttactgcttcgatgccttccctaacatcgaaaaagtctcaaagatcactagtccagtcctgattatccatggcactgaggatgaggtcattgacttctcccatggacttgccctttatgagagatgtcctaaggcagtggaacccctctgggttgagggggcaggacataatgacatcgagctgtacagtcagtacctggaaaggcttcggcgattcatcagccaggagctgccatcacagagagcatag

SEQ ID NO: 8574 - DNA, 1404 bp, synthetic construct
  misc_feature 1..1404: note = source = /note="Description of Artificial Sequence: Synthetic coding sequence"
  source 1..1404: mol_type = other DNA
atgcggaccgcccccagcctgcggcggtgcgtgtgcctgctgctggccgccattcttgacctggccaggggctatcttaccgtgaacatcgagcccctcccccccgttgtggcgggagacgcggtgaccttgaagtgcaattttaagactgacggcagaatgcgggagatcgtgtggtacagggttacagacggagggactattaaacagaaaatatttacatttgacgctatgtttagcacgaattactctcatatggagaattaccggaaacgggaggacctcgtgtaccagtctactgttcggctccctgaggtcaggatcagtgacaacgggccatatgagtgccatgtgggcatttacgaccgggccaccagagaaaaagttgtcctggcttctggtaacatttttcttaatgtaatggccccacccacgtcaatagaggtggtggcggcagacactccagcccctttcagccggtatcaggcgcagaacttcacacttgtttgcatagtgagcgggggaaagccggccccaatggtctattttaagcgggatggagaacctatcgacgccgtcccattgagtgagcccccagctgcctcctctggacccctgcaggatagtaggccttttcgctccttgcttcatcgagacctggacgataccaaaatgcagaaatctttatccctcttagatgcagagaatagaggggggcggccgtataccgagcggcctagtcgcggattgactcccgatcctaacatactactgcaacctactacagagaatatacccgaaacggtagtttcgcgggagttccccagatgggtgcattctgccgaacctacttacttcctgagacatagccggactccctcatccgatggaaccgtggaagtcagggctctcctgacttggacgcttaatccccagatagataatgaagcactgttttcctgtgaggtcaagcaccctgcgctttcaatgcccatgcaggccgaggtcactctggtagcgccaaaggggcctaagatcgtcatgactcccagccgagcccgtgtcggggacactgtgcgcatcctcgttcacggtttccagaatgaagtttttccagaacccatgtttacatggacccgagtgggcagtcggctcctcgatggcagtgccgagttcgacggcaaagaactcgtgttggagcgtgtgccagccgagttaaacggctcgatgtacaggtgtactgcacagaatcccctgggtagtacagatacacacaccagactgattgtttttgagaaccccaacatccctagagggactgaagatagtaatgggagtatcggcccaactggagcgagattgaccctcgtcctcgcactgactgtgatactggagttgacttag

SEQ ID NO: 8575 - DNA, 783 bp, synthetic construct
  misc_feature 1..783: note = source = /note="Description of Artificial Sequence: Synthetic coding sequence"
  source 1..783: mol_type = other DNA
atggcccggcccggcatggagcggtggcgggaccggctggccctggtgaccggggcatctggcggaattggcgctgcggtcgcgagggccttggtccaacagggcctaaaggtggtcggttgcgcccgcactgtgggcaatatcgaagagctggccgccgaatgtaagagcgcgggctacccagggactctcatcccctaccgctgcgatctaagcaatgaggaggacattctctctatgttttctgctatccgtagccagcattctggggtggacatatgcattaataatgcaggactggcgagacccgacacattattatccggatcaacaagtgggtggaaagacatgtttaacgtcaatgtgctggcgctatcaatttgcacccgcgaggcctaccagtccatgaaggaacgtaatgtggatgacgggcacataattaacatcaactcaatgagtggtcacagggtgctcccattaagcgttacccacttttactccgctacaaagtacgctgtgacagcccttaccgagggactgcgtcaggaactgcgcgaagcccagacacatatcagagctacctgcatatcgccaggggtggtcgaaacgcaattcgcttttaagctacacgataaggatcctgagaaagctgcagcgacatatgagcaaatgaaatgcctgaaacccgaagacgtagcagaggccgtaatttatgtactgagtactcccgctcacattcagataggcgatatccaaatgaggccaacagagcaagtgacttag

SEQ ID NO: 8576 - DNA, 1218 bp, synthetic construct
  misc_feature 1..1218: note = source = /note="Description of Artificial Sequence: Synthetic coding sequence"
  source 1..1218: mol_type = other DNA
atgagcagccccgccctgaccgccggcgccagcggcaaggtgatggactttaacaacgggacttatctagtctcctttactcttttctgggagggccaggtgtccctgtctcttttgctcattcacccttcggagggagcctccgctctgtggagggcccgaaaccagggttatgacaagatcattttcaagggtaaattcgttaacggcacttcacacgttttcaccgaatgtggcctgaccctgaatagcaatgcggagttgtgtgaatacttggatgatagggatcaggaagctttctactgtatgaagccccaacatatgccttgcgaggccctgacctacatgacaaccaggaatcgcgaagtgagctatcttaccgataaagagaattccctgttccaccgcagtaaagtaggcgtggaaatgatgaaggaccgaaaacacatcgacgtcacaaattgcaataagagagagaagattgaggagacctgtcaggtgggaatgaagccaccagtccctggtgggtataccttacagggaaaatggatcactactttttgcaaccaagttcagctcgatactatcaaaatcaacgggtgcttgaagggcaagctgatatatcttctaggggacagcactctcagacaatggatttactattttcccaaggtagtaaagaccttgaagtttttcgacctccatgagaccgggatctttaaaaagcacctgctgcttgacgccgagagacacacacagatacaatggaagaagcactcctacccatttgtaacattccagctttactccctgattgatcatgattatattccaagagagattgaccggctgtcgggcgacaaaaacaccgcaattgtgattaccttcgggcaacatttcaggccattcccgatcgacattttcatccgccgcgctatcggggtacaaaaggccattgagaggttgtttctacgatctcctgccaccaaggtcatcatcaagactgagaatatccgagagatgcatatcgagacagagagattcggcgacttccatggatacattcattatctgatcatgaaggacatatttaaagatctaaacgtcggcatcatcgacgcctgggatatgactatcgcctacgggacagacactatacatccccctgaccatgtcattggcaaccagatcaatatgtttttgaattatatatgctag

SEQ ID NO: 8577 - DNA, 597 bp, synthetic construct
  misc_feature 1..597: note = source = /note="Description of Artificial Sequence: Synthetic coding sequence"
  source 1..597: mol_type = other DNA
atgcccgtgcccgccctgtgcctgctgtgggccctggccatggtgacccgtccagccagcgccgcgcccatgggcggcccagaactggctcaacatgaggaactcactctcctgtttcatgggaccctgcagctgggccaggccctgaacggagtttaccgcactaccgagggtcgtctgacaaaggccaggaattcgttggggctgtacggcaggacaatcgagctcttgggccaagaagtttccagaggaagggacgccgctcaggagctgcgagccagtctgttggaaacacagatggaggaagatatccttcagctgcaggctgaggcgaccgcagaggtgctgggtgaggtggcccaagctcagaaagtgttgagggactcagtgcagcgcctcgaggtccagctcagaagcgcctggttgggacccgcctatagggagtttgaggtgctgaaagcacatgctgacaagcagtcccacatactgtgggctctaaccggccacgtgcaacgccagagacgggaaatggtggcacagcagcataggctcagacagatccaggaacgcctacacaccgcagctttgccagcctag

SEQ ID NO: 8578 - DNA, 1455 bp, synthetic construct
  misc_feature 1..1455: note = source = /note="Description of Artificial Sequence: Synthetic coding sequence"
  source 1..1455: mol_type = other DNA
atggccggcccctggaccttcaccctgctgtgcggcctgctggccgccaccttgattcaggctaccctttcgccgactgctgtcctgattctgggtcccaaagtcatcaaagagaagttaactcaagaactgaaagaccacaatgctacgtctatactccagcagttgccactgttgagcgcaatgcgggaaaaacccgctggtggaattcccgtgctaggatctctagtcaacacagtgctgaagcacatcatatggcttaaggtgattacagcaaacatcctgcagctgcaggtgaaaccttcagccaacgatcaggagctcctggtgaagattcctttggacatggtcgccggctttaacaccccactcgtgaagaccatcgtcgagtttcatatgaccaccgaagcccaggcaaccattcgcatggacacctcagctagcggcccgactcgactggttctttcggattgcgcaacttctcacgggtcactgcgaattcagctgctgcataaattgagtttcttggtcaacgccttggcgaaacaggtcatgaatctactggtgccctctctaccaaatctcgtgaagaatcagctctgccccgtcatcgaagcaagctttaatggaatgtatgccgatctcttacaacttgtcaaggtcccaatttcactgtccatcgatcggttagagtttgacctgctttatccagcaataaagggcgacactatccagttgtacctcggagccaagctgctagattctcaagggaaagtcactaaatggtttaataattctgctgccagcctgactatgcccaccctcgataatattccattctcactgatagtctctcaggatgtcgtgaaagccgctgtcgctgcagtgttgtcacctgaggagttcatggttctcctcgatagcgttctgccggagtcagcccatcgccttaaaagctcgattggacttataaatgagaaagcagccgacaagctgggcagcacccagatagtgaagatactgacccaggacacgccagagttctttatcgatcagggacatgcgaaggtggctcagctgatcgttctagaagtcttcccaagctctgaagcactgcgacctttgtttaccctgggcatcgaggcatcgagcgaggcacaattctacacaaagggtgaccagctgattcttaacctcaacaacatcagcagcgatagaatccaactcatgaattctggcatcggatggtttcagccagacgttctcaagaacatcatcaccgagattattcactctatcctgctccccaaccagaatggcaagctgcgcagcggagtacctgtgtctttggtcaaggcactaggtttcgaggcagctgagtccagtctaaccaaggacgccttggtactgaccccagcgagcttgtggaagccgagctcccctgtctctcagtag

SEQ ID NO: 8579 - DNA, 750 bp, synthetic construct
  misc_feature 1..750: note = source = /note="Description of Artificial Sequence: Synthetic coding sequence"
  source 1..750: mol_type = other DNA
atgctgcagctgtggaagctggtgctgctgtgcggcgtgctgaccggaacgtcagagtcactgctcgacaatttaggcaacgatttatctaatgtggtggacaagctcgaacctgtgctccatgaaggccttgagactgtggacaatacgctcaagggcatactcgaaaagttgaaggtggatctaggggtgctgcaaaagagctctgcatggcagctggctaaacagaaagcacaggaagctgagaaactcctcaataacgttatctccaaactgctacctacaaacaccgacatcttcggtttgaaaatctcaaattcactgattctggatgtaaaagccgaaccaatagatgatggcaaaggactaaatttgtcatttccagtgaccgcgaacgtgactgtggccggccccatcattggacagatcatcaaccttaaagcttccctagaccttctaactgctgtgactattgaaacagacccccagacacaccagcccgtggctgttctcggagagtgcgcaagcgaccctactagtattagcctctcccttttggacaaacacagtcagataattaacaagttcgtgaatagcgtcattaatacactgaagagtaccgtaagctctctgcttcagaaggagatatgcccactgattaggattttcatccactccctggacgtcaacgttattcagcaagtcgtcgacaaccctcagcataagacccagctgcagacccttatttag

SEQ ID NO: 8580 - DNA, 1959 bp, synthetic construct
  misc_feature 1..1959: note = source = /note="Description of Artificial Sequence: Synthetic coding sequence"
  source 1..1959: mol_type = other DNA
atgcagggccccctgctgctgcccggcctgtgcttcctgctgagcttgtttggcgcagtcactcagaaaactaagacatcctgcgccaaatgccccccgaatgcttcttgtgtcaataacacccactgtacatgcaatcatggttacacatccggatctgggcagaagttgttcaccttcccgctggaaacttgcaatgatatcaacgaatgcacgcctccttacagtgtctactgcggcttcaatgccgtatgctacaatgttgagggctcgttctattgccagtgcgttcccggatataggctccacagtggaaatgagcaattttccaactcaaatgagaatacatgtcaggacacaacctctagtaaaactactgaagggcgtaaagagttacaaaaaatcgttgacaagttcgaatccctcctcacaaatcagactctttggcgcaccgagggacgacaagaaatctcttcaacagctaccaccattttgagagatgtggaaagcaaggtcctggaaacagccttgaaagatcctgagcaaaaggtattgaagattcagaacgattcggtggccatcgaaacacaggctatcactgacaattgctccgaagagagaaaaacgtttaacttaaacgtgcagatgaattccatggatattagatgcagcgatataatacaaggcgacacccagggcccttcggccattgcttttatcagttactcatcactgggaaacattatcaatgctacatttttcgaagaaatggacaaaaaggatcaggtgtacctgaattcacaggtcgtatccgccgccattggtcccaaaagaaacgtatctctctctaagagtgttactctgacattccaacacgtcaaaatgaccccatctacaaaaaaggtgttttgcgtctactggaaatccaccgggcagggttcccaatggtccagagacggatgtttcctgatccacgtgaataagagccataccatgtgtaattgctcacatcttagcagcttcgccgttcttatggcgctgacttcccaggaggaagaccccgtcctgactgtcatcacctatgtggggttatctgtgtcactgctatgtctcttgctggccgcactgaccttcctgctgtgcaaagcaattcgtaacacttctacttcactacatctgcagctatccctgtgtctctttctagcgcatctcctctttctagtgggaatagatcggacagagcctaaagtgttgtgtagcattatcgctggggcccttcattatctctacctggctgccttcacctggatgttgctcgagggagtgcacctgtttcttacagctaggaatctgaccgtcgtgaactacagctccatcaatcggttaatgaagtggataatgttccctgtgggctacggggtcccagccgtaacggtggccataagcgccgccagttggccccacctatatggaaccgcggaccggtgttggctgcatctagatcaggggtttatgtggtcatttctggggccagtctgtgctattttttccgccaaccttgtgctgtttatactggtgttctggattcttaaaaggaaattatcatccctcaattccgaggtgtccactatacagaatacaagaatgcttgcattcaaggccacagcccagctcttcattctcggctgtacctggtgcctaggactacttcaggtgggcccggccgcacaggtaatggcctatctgtttactatcatcaatagcttgcagggcttcttcatttttctcgtgtattgcctgctgtcacaacaggtacagaagcagtaccagaaatggttccgagagatagtgaagtcaaaatctgaatcggagacctacacgctaagcagcaagatggggcctgacagtaagccctccgaaggagatgtgtttcccgggcaggtcaaacggaaatactag

SEQ ID NO: 8581 - DNA, 1263 bp, synthetic construct
  misc_feature 1..1263: note = source = /note="Description of Artificial Sequence: Synthetic coding sequence"
  source 1..1263: mol_type = other DNA
atgagccccccccccctgctgcagcccctgctgctgctgctgccccttctgaacgtggaacctagcggtgcgacgctgatcagaatccctctgcacagggtgcagcccgggcgaagaatcctgaatttgctccgcggctggagagaacccgccgagttgcctaagctcggagcgcccagccccggagacaagcccatttttgttcctctatcaaactaccgggacgtgcagtacttcggcgagatcggactgggaactccgccacagaacttcactgtggccttcgatactgggtctagcaatttgtgggtaccctcccggaggtgtcacttttttagtgttccatgctggctccatcatcggttcgatcctaaagcctcgagcagcttccaagccaacggcacaaagttcgcaatccagtacggcaccgggcgtgtggacgggattctgagtgaagacaagctgacaatcggaggaatcaaaggggctagcgtaattttcggggaggctctctgggagccttcactcgttttcgccttcgctcatttcgacggaatcctcggactaggttttcccatcttaagcgtggaaggggtccggccacccatggatgtattggtggagcagggactgctagacaagcccgtcttttcattctacctgaacagagaccctgaggagccagacgggggtgagctggtgttagggggtagcgacccagcacactatattcctcctctcaccttcgtgcctgtgacggttcctgcatattggcaaattcacatggagagggttaaggttggacccggccttaccctgtgtgctaaagggtgtgcggccatcctcgacactgggacctcactgattacggggccgaccgaggagatacgcgcactgcacgctgctattggcggcattcccttactggcaggggagtatattattctttgctccgagattccaaaactgccagcggtgtccttcctgttaggaggagtgtggttcaatctgacagcgcatgactacgttatccagacgaccagaaatggagtacgattgtgcctcagcgggtttcaagcgctggacgttcctcctcccgccggtcccttctggatactgggcgatgtgtttctcggaacttatgtagctgtcttcgatcgcggcgacatgaaatcatccgccagggtgggactggcccgcgctcgaacaaggggcgcagacctgggatggggcgagacagcccaggcacagttccctgggtag

SEQ ID NO: 8582 - DNA, 1293 bp, synthetic construct
  misc_feature 1..1293: note = source = /note="Description of Artificial Sequence: Synthetic coding sequence"
  source 1..1293: mol_type = other DNA
atggcctggaccttcgagtgcagccggaccaccagccccgagcccttgtcaacaagcccatgccgcaccacatcctcaaggaattcaccaacaatgtcgtgccctgcatccgtggcctgcgaaccctccacgagcactaccacgagctctcctccgaaattatcagtcgctcctcagtttctcccacgttcattgcgtgtcgccgacctagccgcgaaccaggtgatggaaatcttccctttgaccttcggtgagaaaccagccctaagaagcgtgtatcttcacaataatcagctctctaacgccggactcccgcccgacgcctttaggggtagtgaggcgatcgccaccttgtcactttccaataaccagctgagttacctgccaccgagcctgcctcccagcctcgagcggttgcatcttcagaacaatctgatatcgaaagtgcccagaggtgctctcagtagacaaacacaattgcgggagctgtatctgcagcataatcaactcacagattccggcctggatgcaaccacgttctcgaaattgcatagcctcgaatacctggatctgtcgcacaatcagctcaccacggtgcccgctggcctgccacggacattagctatcctgcacctgggacgcaatagaatcaggcaggtggaggctgctcggctccatggggccaggggcctgcgttatctgctgctccagcacaaccaactcggcagctctgggttgccagcaggcgctttaagacccttgagaggcctgcatacgcttcatctctacggaaatggcttggacagagtccctcccgccctcccgcggcggttaagggctctggttctgccgcacaaccacgtggctgctctgggtgcccgcgatcttgtggctacccctggcctgacggaactgaacttggcatataaccgcctagcttccgccagagtgcaccatcgagctttccgccgattgagggccttgaggtcactggatctggcgggcaaccagttaaccaggcttcccatgggtttgcctaccggcctgcgaacccttcagcttcagcgcaatcaactgaggatgctcgagcccgagccactggccggcctggaccaactccgggagttgtcccttgcccataataggttaagggtgggcgacataggtcccggcacctggcacgaactgcaagctctgcaagtgagacacagattggtgtcccacacagtccctcgcgcccctccatccccctgtctgccttgtcatgtgcccaatatcctggtgagttggtag

SEQ ID NO: 8583 - DNA, 3162 bp, synthetic construct
  misc_feature 1..3162: note = source = /note="Description of Artificial Sequence: Synthetic coding sequence"
  source 1..3162: mol_type = other DNA
atgtggcagccccggcggccctggccccgggtgccctggcggtgggctcttgcacttctcgcactagttggcgctgggctctgccacgccggccctcagccaggttatccggctcgcccctccgctcgtaataagaattggtgtgcctacatagttaacaaaaatgtgtcctgctctgtgctggaagggtcagagtctttcattcaggctcagtacaattgcgcatggaaccagatgccctgcccttcggctttggtgtatagagtaaacttccggcccagatacgtgactagatataaaacggtgacgcaattagaatggagatgctgccctgggtttcgcggcggggattgccaggaaggtcccaaagaccctgtaaagactctgcgccccactcctgcccggccccgtaatagcttaaaaaaggccaccgataacgagccatcgcaatttagcgagcctaggaagaccctgagcccaaccggaactgcacaaccctcctggggtgtggacccaaaagagggtccccaagagttacaggagaagaagattcaggtgcttgaagaaaaggtccttcggttgactcgcaccgtgttagacctgcagagctctctggctggtgtcagtgaaaacctcaagcatgccacccaagacgacgcgagccggacgcgcgctccaggtctctccagccaacaccccaaaccagatactactgtgtcaggagatacagagactgggcagagtcctggagtctttaatactaaagaatctggtatgaaggacattaaatccgagctggccgaagttaaagacacccttaagaataagtcagacaagctggaggagttggacgggaaggtgaagggctacgagggtcaactgagacagctacaggaggctgctcagggacccacagtgaccatgaccaccaacgaactctatcaggcgtacgtggactcaaagatcgacgctttacgcgaggagttaatggagggcatggataggaagctcgccgatctgaagaacagttgtgaatacaaattgacaggccttcaacagcagtgtgatgattacggatcttcttatctgggcgtcatagaactcatcggggaaaaagaaacctcattgaggaaagagattaacaacctgagggctcgcctgcaggaaccgtccgctcaggcaaattgctgtgactccgagaagaacggggacattgggcagcagataaaaacacttgaccagaagatcgagagagtggcggaagccactcgcatgctgaatggacgtttagataatgaatttgaccggctgattgtgcctgaacccgacgtggacttcgacgcaaaatggaacgagctggacgcaagaataaacgttaccgagaaaaatgccgaggagcactgcttctatatcgaggagaccctgagaggcgcgataaacggtgaagtcggagacctgaaacagctggttgaccaaaaaatccagtccttagaagatcgcctgggcagcgtgctgctccaaatgacaaacaatacaggtgccgagctcagcccgcccggcgccgccgcactccccggcgtgagcgggtcaggcgatgaacgcgtcatgatggagctcaaccacctcaaagataaagtccaggtcgtggaagacatctgcttgcttaacattcagggtaaaccacatggaatggagggcgcactgcctaacagagaagatcgagcggtacgggactctctgcatcttctgaagagtctgaatgacactatgcaccggaaatttcaggagaccgagcagacgattcagaaactgcagcaggacttctcgttcttgtactctcagctgaatcacaccgaaaacgacgtgactcacctgcaaaaagaaatgagcaattgtcgggcaggcgagaatgccgggatgggacggtttacgaaggtgggcgaacaagagcgtactgtggacacgttgccctccccacagcatccagtggcacactgctgctcccaattggaggaacgctggcagagattacaaagccaggtgatctcagaactcgatgcatgtaaagagtgcacccagggagtacaacgagaggtcagtatggtggagggaagagtgtcccacatggagaagacatgctcaaaactggactctatcagtgggaacctgcagaggattaaggaaggtcttaacaaacatgtgtcaagcttgtggaactgtgttagacagatgaacggaaccctccggtcccacagtcgagatatatcgggtctcaagaacagcgtgcagcagttctacagccacgtctttcagataagcactgacttacaggacctggtcaagtttcagccaagtgccaaggctccatcccccccacctccggccgaggcaccgaaggagcccctgcagccagagcccgcgccgccccgaccctctggccctgcaactgccgaagatccgggcagacgccctgtccttccccagcgcccacccgaggaaaggcccccccaacctccgggaagcaccggtgttattgcggaaaccggccaggccggaccgccggctggtgccggcgtgtccggcagaggtctgccacgtggggtggatggacaaacagggtcggggactgtacccggagctgaaggctttgccggggctccagggtatcccaagtcccccccggtagcttctcctggcgcccctgttccatcgctggtgtcattctccgccggcttgacgcagaaacccttcccaagcgatggtggagtggtcctgtttaataaggtacttgttaatgatggagacgtgtacaatccgagcacgggggtgttcacagctccctacgacgggagatacctgatcaccgccacattaacgccagaaagagatgcttatgtggaggctgtccttagtgtgtccaatgcaagcgtggcccaactccacaccgccggctaccgcagagagttcctcgagtatcaccggccccctggcgccctgcacacatgtggaggcccaggcgcctttcacctgatcgtacacctgaaagctggcgacgcagttaacgtggttgttacaggagggaaacttgcacacacagacttcgacgagatgtacagtacctttagtggagtattcctctatcctttcctgagccacctgtag

SEQ ID NO: 8584 - DNA, 1548 bp, synthetic construct
  misc_feature 1..1548: note = source = /note="Description of Artificial Sequence: Synthetic coding sequence"
  source 1..1548: mol_type = other DNA
atggcccagctgttcctgcccctgctggccgccctggtgctggcccaggccccagctgctttggcagacgtgctggaaggagacagctctgaagacagagcatttcgcgtacgtattgcaggcgatgccccactccaaggggttcttggcggcgcactgacaattccttgccacgtacactatctgagaccaccccctagccgacgggccgtgttggggtctcccagggttaaatggacttttcttagccggggcagagaggcagaggtgcttgttgcaaggggcgtgcgagtaaaggttaatgaggcctatcggttccgagtcgccctgccagcgtatcccgcctctcttacggatgtgtcattggctctttctgagctgcgacccaatgacagcggaatctatcgctgtgaggtccagcacggcatagatgattctagtgatgctgtggaggattcacagctgtatcccatccagacccctcgggaggcttgctacggcgacatggatggatttcccggcgtgcgcaactatggcgtggtcgatccagatgacttgtatgatgtgtattgctacgctgaagacctgaacggcgagttattcctgggcgacccccccgaaaagctcacacttgaagaagccagagcttattgtcaggaacgcggagctgagattgcaactacgggtcagttatacgcggcctgggatggcgggctcgaccattgttcgccaggatggctcgctgatggctcagtaaggtatcccatcgtaaccccgtctcaaagatgcggaggaggcttgcctggcgttaaaaccctgttcttgttcccaaaccagactggcttccccaacaagcatagccgctttaatgtgtactgcttccgtggatcgacttgcctcctcccttctctcaggccaccaacccaacctcctacccaggacggcctggaagccattgtgaccgtgacagagactctcgaggaacttcagctgccacaagaggcaacagagtccgagagccgtggtgcgatctactccatccccatcatggaagacggcggcggagggtcctcgactcccgaagatcctgctgaggccccaagaacactcctcgagtttgagacccagtccatggtgcccccgacagggttctccgaagaggagggaaaagcactggaagaagaggagaagtacgaagacgaggaagagaaagaggaagaagaagaagaggaagaggtagaggatgaggctctttgggcatggcccagcgaattgagttcacctggaccggaggcctccctccccactgagcccgccgctcaagaagaatctctgagccaggcgcccgcgcgggctgtccttcagccgggtgcctcccctctgcctgatggcgagagcgaagcatcaagaccgcctagagtacacggcccacctactgaaacactccctacacccagagagcgtaatctggcaagtccctcccccagtaccctggttgaagcacgtgaggtaggggaggccaccggtggacctgaactgtccggctag

SEQ ID NO: 8585 - DNA, 1023 bp, synthetic construct
  misc_feature 1..1023: note = source = /note="Description of Artificial Sequence: Synthetic coding sequence"
  source 1..1023: mol_type = other DNA
atgcccggctggctgaccctgcccaccctgtgccggttcctgctgtgggcatttacaatcttccacaaggcacaaggggacccagcatctcatcctgggccgcactatctgctgcctcccatccacgaagtaattcactcacacagaggcgccaccgccaccctgccatgcgtcttgggcactactccgccctcttataaggtccgctggagcaaggttgaaccaggtgagttacgggagacactaatccttatcaccaacgggctccatgcccgcgggtatgggccattgggcggtcgcgccaggatgcggagaggccatcgactcgacgcttcactagtgattgcgggcgtcaggctggaggacgaaggacgttatcgttgtgaactgatcaatggcattgaggacgagtctgtagcactgactctttctctggagggcgttgtgtttccgtaccagccaagtcgcggtcggtatcagtttaactactatgaagcaaagcaggcctgcgaagagcaagatggccggctggcgacctattcgcaactctatcaagcttggacagaggggttggattggtgcaacgcagggtggctacttgaagggtctgtccgctaccccgtgctcaccgcccgtgccccctgcggtggtaggggcagaccggggatccggtcgtacggaccgagagaccggatgagggaccggtacgatgctttctgttttacctcggcactcgccggacaggtatttttcgtgccaggaaggctgaccctgtccgaagcccacgccgcgtgcagacggcgcggcgctgtcgtcgctaaggtcgggcacctttatgcagcctggaagtttagtggattagaccagtgcgacggcggatggctggcggacggatcagtcagatttcctatcaccactcctcggccccggtgtgggggcctgcctgacccaggcgtgcgctcctttggcttcccaagaccccagcaggccgcgtatggtacatactgctatgccgaaaattag

SEQ ID NO: 8586 - DNA, 690 bp, synthetic construct
  misc_feature 1..690: note = source = /note="Description of Artificial Sequence: Synthetic coding sequence"
  source 1..690: mol_type = other DNA
atggacctgctgcagttcctggccttcctgttcgtgctgctgctgtccggtatgggcgccacaggaacgcttagaaccagtctcgacccctccttggaaatttacaaaaagatgtttgaagttaaacggagggagcagctcctcgctctaaaaaacctggctcaacttaatgatattcaccaacagtataagattctagacgttatgctcaaaggtctcttcaaagtgctagaagactccagaaccgtcttaacagccgccgacgtgctgccagatggaccattccctcaggatgagaaattgaaagacgcattttcacacgttgtggagaataccgcttttttcggagacgtcgtcctgaggtttcccagaattgtccactattactttgatcataatagcaactggaacctgcttatccggtggggtatctctttttgcaatcagaccggtgttttcaaccagggtccccacagcccaattttatccctcatggcacaggagctggggatttctgagaaggatagtaacttccagaaccctttcaaaatagacaggacagaattcattccttccacagacccttttcagaaagctctgcgggaagaggaaaagaggcggaagaaggaggagaaaagaaaagagattcgaaaagggccccggatctctcgctcacaaagtgagctgtag

SEQ ID NO: 8587 - DNA, 465 bp, synthetic construct
  misc_feature 1..465: note = source = /note="Description of Artificial Sequence: Synthetic coding sequence"
  source 1..465: mol_type = other DNA
atgagcgtgggcaccagcctggagcaggcccagatgagcaccctgacatgccccctcttcattccgactgtggggcggaagaccgccctccactctggcgaggacttccaaactctgctgtttgaacgggtcttcgtgaacctggacgggtgcttcgacatggcaactggacaattcgcagctccactcaggggcatctatttcttttcactgaatgttcattcttggaattataaggagacatacgtgcacatcatgcataatcagaaagaagccgtcattctgtacgctcagccatcagagcggtcaatcatgcagagccaatcagtgatgcttgacctcgcctacggggatagagtgtgggtgagactttttaagcgacaacgagaaaatgccatttatagcaacgactttgatacatacataacgttttccggccacttaattaaggccgaggatgattag

SEQ ID NO: 8588 - DNA, 900 bp, synthetic construct
  misc_feature 1..900: note = source = /note="Description of Artificial Sequence: Synthetic coding sequence"
  source 1..900: mol_type = other DNA
atgcggagcgtgggcgagggcgcccgggagtggatccgggagtgccaacaccagtttcggcaccaccgatggaattgcacaactttggacagggatcacacagtgtttgggcgagtcatgctgcggagttcccgagaggcagcattcgtttatgctatttcctcggctggagtcgtgcacgcaataacccgcgcctgtagccagggggagttatctgtttgttcatgtgacccctacactaggggccgccatcacgatcagcggggcgacttcgactggggagggtgcagcgacaatatccattacggcgtgcgatttgccaaagctttcgtggatgccaaggaaaagagactcaaggatgcccgcgccctgatgaaccttcacaataaccgatgcgggcgtacagctgtgagacggttcctgaagctggaatgtaagtgccacggagtgagcggatcgtgtacgctaagaacctgctggagggctctatctgatttccgtcgaactggggactatcttaggagacggtacgacggggctgtccaggtcatggccacccaggatggagcaaattttaccgctgccagacagggatatcgtcgggcgacccgcactgatttggtctactttgacaattccccagactattgcgtgctcgacaaggccgcggggtctcttggaacagccggtagagtgtgtagcaaaacctcaaaggggactgatgggtgtgaaatcatgtgttgtggtcgcggatatgataccacaagagttaccagggtaacgcaatgcgaatgcaaatttcactggtgctgcgctgtgcgctgcaaggagtgcagaaataccgtggatgtgcatacatgtaaagcacctaaaaaggccgaatggttggaccagacgtag

SEQ ID NO: 8589 - DNA, 1710 bp, synthetic construct
  misc_feature 1..1710: note = source = /note="Description of Artificial Sequence: Synthetic coding sequence"
  source 1..1710: mol_type = other DNA
atgctgctgctgttcagcgtgatcctgatcagctgggtgagcaccgtgggcggggaaggaacactatgcgactttccaaagattcatcacggtttcttatacgatgaggaggactataacccattcagtcaggtgcctacaggtgaagtcttctactactcttgcgagtataattttgtgagtcctagtaaatccttctggactaggattacctgcaccgaagaagggtggtcccctacccccaaatgtttgagaatgtgttcattcccatttgtaaaaaacggtcactccgagtcctctggtctgatccatcttgaaggggatacggttcagatcatttgcaacaccggctactctctgcagaacaatgagaagaacatctcttgcgtcgaaaggggttggagcactccaccaatttgttcctttacaaagggcgagtgccacgtaccaatcctggaagccaatgttgacgcccagccaaaaaaagaaagctataaggtcggggatgtcctcaagtttagctgccgaaaaaatctgatccgcgtgggctctgactcagtccagtgctatcagttcggctggagccctaacttccccacatgcaaagggcaggtgcggagctgcggacccccaccccaactgagcaacggagaggtgaaagaaattagaaaggaagagtacgggcacaacgaagtagtggagtacgactgtaacccaaacttcattattaacgggccaaaaaagattcagtgtgtagatggggagtggacaacactacccacctgtgtggagcaggtgaagacctgcggttatatcccggagttggaatatggctatgtccagccatccgtacccccttatcaacatggtgtttccgtcgaagtcaattgccggaatgagtacgccatgattggcaataatatgatcacttgcattaacggcatctggaccgaactgcccatgtgcgtggccactcaccagctgaagagatgtaaaattgctggtgtgaacattaagacattactcaagctgtcagggaaggaatttaaccacaattcccgtatcagataccggtgctccgatatctttcggtatcgacacagtgtgtgtattaacgggaagtggaatcctgaggttgattgcactgagaaaagagaacagttttgcccacctccgccccagatccctaatgcccagaacatgacaacaacagtcaattaccaggacggggaaaaggttgctgtgttgtgtaaggagaactacctgctgcctgaggccaaggagatagtatgcaaagatgggagatggcagagccttcctaggtgtgttgagtcaactgcatattgtggtcccccaccaagcatcaataatggcgataccacatcctttcccttgtccgtgtacccgcctggttccactgtcacctaccgctgtcagtctttctacaaactccagggatctgtgacagtgacatgtagaaacaagcagtggtccgaacctccacgttgcctggatccatgcgtagtgtcagaggagaatatgaataaaaacaacattcagctcaaatggcggaacgacggaaagctgtacgctaagaccggggatgccgtggagttccagtgtaagttcccccataaagccatgatcagcagccccccttttcgcgcgatctgccaggaaggaaagttcgaataccccatctgcgaatag

SEQ ID NO: 8590 - DNA, 351 bp, synthetic construct
  misc_feature 1..351: note = source = /note="Description of Artificial Sequence: Synthetic coding sequence"
  source 1..351: mol_type = other DNA
atgaagggcctgcggagcctggccgccaccaccctggccctgttcctggtatttgtttttttgggcaacagtagttgcgccccccagagattactggagaggagaaactggacaccccaggcgatgctatacttgaagggggcccagggacgaagatttatttcagatcagtctcgccgcaaggacttgagcgatcgcccattaccagaaaggagatctccgaacccccagctgttgaccatcccagaagccgccaccattctgcttgcctctctgcagaaatctccggaggatgaagagaaaaacttcgatcagacccgctttctagaggatagtctgctgaactggtag

SEQ ID NO: 8591 - DNA, 192 bp, synthetic construct
  misc_feature 1..192: note = source = /note="Description of Artificial Sequence: Synthetic coding sequence"
  source 1..192: mol_type = other DNA
atgaagcacgtgctgaacctgtacctgctgggcgtggtgctgaccttactgtctatttttgttcgtgtgatggaatcgctggagggattacttgagtcacccagtccaggcactagctggaccaccaggtcccagttagccaacacagagccgacaaagggactgccagatcatccttcacggagcatgtag

SEQ ID NO: 8592 - DNA, 567 bp, synthetic construct
  misc_feature 1..567: note = source = /note="Description of Artificial Sequence: Synthetic coding sequence"
  source 1..567: mol_type = other DNA
atggtgcccggcgccgccggctggtgctgcctggtgctgtggctgcctgcctgcgtcgccgcccatgggtttcggatccatgactacctgtatttccaggtccttagtcctggcgatatacggtatatcttcactgccacacccgctaaggatttcggagggattttccacactcggtacgaacagatccacctggtgcccgccgagccgcctgaggcgtgtggggaactgtctaacggtttttttattcaagatcaaattgcactggtggaacgggggggttgcagcttcctatcaaaaactcgagtagtgcaagaacacggtgggcgtgcggtaattatcagtgataatgccgtggataatgattccttttatgtagagatgatccaggacagcacccaacggacagccgacattcccgctctttttcttctcgggagagacggatacatgattcgacggagcctcgaacagcatggtctcccttgggctatcatttctattcctgtcaacgtgacaagcatccctaccttcgaattgctacagcctccatggaccttttggtag

SEQ ID NO: 8593 - DNA, 2559 bp, synthetic construct
  misc_feature 1..2559: note = source = /note="Description of Artificial Sequence: Synthetic coding sequence"
  source 1..2559: mol_type = other DNA
atgaagcccatgctgaaggacttcagcaacctgctgctggtggtgttgtgcgactatgtccttggagaggcggagtatttattattgcgggagccaggtcacgtagctctctccaacgacactgtctatgttgactttcagtatttcgatggggcgaatggcactctgcgcaatgtctctgtgctcctgctagaagccaacacaaatcagacagtgaccaccaaatatctgctgacgaatcagtctcagggcactttgaagtttgaatgcttctactttaaggaagcaggggattattggtttaccatgaccccagaggctactgacaatagtactccctttccttggtgggaaaagtctgcttttctcaaagttgagtggcccgtttttcatgttgatcttaaccgatctgccaaggcagccgagggtaccttccaggtgggcttatttactagccagccactgtgtccctttcccgtggacaagcccaatattgtcgtggacgtgatcttcaccaatagcttgcccgaggctaggcggaattcaaggcagcctctggagatccgaacatcgaaacgcacggaacttgctcagggccagtgggtcgaatttgggtgcgcccccctgggccctgaagcttatgtaactgtagtccttaagttactcggccgggactctgtgattacttcaacaggacccatcgacctggcacagaaattcggctacaagctcgtgatggttccagagctaacttgtgagagtggagtggaggtaaccgtactaccacctccatgcacattcgtgcagggagtagtgaccgtgtttaaggaagcaccacggtacccaggcaagcgcaccatccatctcgctgagaattcgctgcctctaggtgagcgaagaaccatctttaactgtacactttttgatatgggaaagaataaatattgtttcgatttcggtatctcttcccggtcccatttcagcgccaaagaggagtgcatgttgatccaacgcaataccgagacgtgggggctgtggcaaccctggtcccaatgttccgctacttgtggagatggggtccgggagcgtcgccgtgtctgtctcacaagtttcccttctagtcctgtctgtcctggcatgagcctcgaagccagtctctgttctcttgaggaatgcgctgcttttcaaccaagctccccatcgcccctgcagccccaagggccagtgaaaagcaataacatcgtgactgtaaccggcatatctctctgccttttcatcatcatcgccacggttctaattaccctgtggaggagatttggccgcccagctaaatgttccaccccggcacgccataactcaattcattcaccctcattccgcaagaatagtgatgaggaaaacatctgcgagctcagtgaacagcgcggatccttcagtgatggcggggacggcccaacagggtctccgggtgacacggggatccctttaacttatcgaaggtccggaccagtcccccctgaggatgacgcctccggttccgagtcctttcagtcaaacgcacagaagatcatcccccccctcttctcttataggcttgcacagcagcagttaaaggaaatgaaaaagaagggcctgacggaaactaccaaagtgtaccatgtgtcacagtcaccgctgactgataccgccatcgacgcagccccatccgcccccctggatttggagagtcccgaagaggctgccgccaataagtttcgcataaaatctccgttcccagagcagccagctgtgtcagccggcgaaaggcccccatcccgcctggacctcaacgtgacccaagcaagctgcgccattagtcccagccagacactcatccggaaatcacaggcacggcatgtgggatctaggggagggccttcagaaaggtcccacgcacgcaatgcccatttcagacggacagcttctttccacgaggccagacaagctcggccattcagagaaagatctatgagcaccctgactccccgtcaggctcccgcttattcatccagaacccgaacatgtgaacaggcggaagatcgctttcggccacagtcgcgtggagctcacctgttcccagaaaaattagagcactttcaagaggcctccggtacacgcgggcctctgaatccactgccaaaatcctatactttgggccagcctctgaggaaaccggacctgggcgaccatcaagcgggactggtggctggaattgaacgtacagagccccaccgcgcccggagaggtcccagcccctcccacaaaagtgtatccaggaagcaatcctcccctatctctcctaaagacaattaccagcgggtatccagcctgtccccttcccagtgcaggaaagataagtgccagagctttcctacacatcccgagttcgcattctatgataatacgagttttggactgacagaggctgaacagcgaatgctggacttacccggctatttcggatccaacgaagaggacgaaactacttctaccctgtcggttgagaagctcgtgatatag

SEQ ID NO: 8594 - DNA, 369 bp, synthetic construct
  misc_feature 1..369: note = source = /note="Description of Artificial Sequence: Synthetic coding sequence"
  source 1..369: mol_type = other DNA
atgggcttccacttctgcatctggatcatcttcctgctgccccccccttgcaaaaagtgcctgtcaccccccactatgaatcttagaccccctaagagttgtgggaacgtgttttattgggtcctggtcctgaattcaggtctgctgtataagttttgccagaccatcaaatgtagggcgaattggcgcccagcccgagcgcccaggggctggaatgaggccaccgagagacatcaggagagacgcacacagatggagaccgagatgggcggcatcagtaccacctattggcacaggctttgcacctgcaccgaccggagagctgaaaagcttgttatggatggaaacaactgttggttccataagtag

SEQ ID NO: 8595 - DNA, 978 bp, synthetic construct
  misc_feature 1..978: note = source = /note="Description of Artificial Sequence: Synthetic coding sequence"
  source 1..978: mol_type = other DNA
atgcagggccgggtggccggcagctgcgcccccctgggcctgctgctggtttgcctgcacctcccaggactgtttgcaaggtccattggcgtcgtagaggagaaggtcagtcagaacctcggaactaacctgccccagcttggtcaaccatcatcaaccggaccgagtaattctgaacaccctcagcccgccctggatccacgctctaacgatcttgcccgcgtgccattgaaacttagcgtgcccgcctctgacggatttcctccagcgggaggctccgccgtacagaggtggcctccctcttggggtctgcccgccatggactcgtggccccctgaggacccctggcagatgatggccgccgccgcagaagaccgacttggagaggctttgcccgaagaactgagctacctcagctccgcagctgcactagcccctggctcaggtccgctccccggtgaatcgagcccagatgctaccggcctatccccaaaagcctcacttctgcaccaagacagcgagtctagacgcttacctaggtccaacagcctgggggcaggcggtaagatcctgtcccagagacccccctggtctctgatacacagggtgttacccgatcatccttggggcactctgaacccaagcgtatcttggggtggagggggccctggaactggatggggcactagaccaatgccccaccctgaaggcatttgggggattaataaccagccgcccggaacctcctggggaaacataaaccgatacccaggagggtcgtggggcaacataaatcgttatcctggagggtcctggggcaatatcaaccggtatccgggcgggtcttggggcaatattcatctttaccccggaatcaacaaccctttcccgcccggtgtcctgcggcctccaggttctagctggaatattcctgctgggttccccaatcccccatctccacgcctccaatggggctag

SEQ ID NO: 8596 - DNA, 2631 bp, synthetic construct
  misc_feature 1..2631: note = source = /note="Description of Artificial Sequence: Synthetic coding sequence"
  source 1..2631: mol_type = other DNA
atgggccccgaggccctgagcagcctgctgctgctgctgctggtggcatcgggagatgccgacatgaaaggccattttgacccggctaaatgtcgctatgcactgggcatgcaggacaggacaattccagattcagacatctcagcgagtagttcgtggtctgacagcactgcagcaagacatagccgactcgaatcctccgacggcgacggagcctggtgtccggcaggctcggtatttcctaaggaagaggagtatctgcaggtcgacctgcagagactgcatctggtcgccctggtaggcacccaaggaagacacgccggcgggctgggcaaggaattctctagatcctaccgactccgctattccagagacgggcggagatggatgggctggaaagaccggtgggggcaggaggtgataagtggcaacgaggacccagaaggtgtcgtgctaaaagatctcggacctccaatggtagctcgcctggtgcgattctaccctcgcgccgatagggtaatgtcagtatgcctgagggtggaactctacggatgcctttggcgtgatgggctgctctcctacaccgccccagtggggcagacaatgtatctgtcggaagcagtgtatctgaatgactctacctatgatggccacaccgtgggggggctgcagtatggaggcctagggcaattggcggatggcgtggtggggctggatgactttcggaaatcccaggagttgcgagtctggccagggtatgactacgtggggtggtctaatcactcattttccagtggctacgtcgagatggagtttgagttcgaccggctgcgtgcctttcaagcaatgcaagtccactgcaataatatgcacacgctcggcgctcggctgcctgggggagtcgaatgtcggttcaggcgaggccctgccatggcctgggaaggggaacctatgcggcacaaccttggcggcaatttaggcgacccccgcgcgcgcgccgtctccgtgcctctgggtggaagggttgcgaggttcctgcaatgtcggtttctgttcgcaggtccctggctgctcttctctgaaataagcttcatcagcgatgtggtcaacaacagcagccctgctttgggcgggacgtttccgcccgccccgtggtggcctcctggcccccccccaactaacttctcttccctggagcttgaaccgaggggacagcaaccagtggccaaggccgaaggcagtcccactgctatcttaatcggatgtctagtggctattattctgcttctgctgctcataatcgccctcatgttatggcgtctgcactggagaaggctgctgagcaaggcggaaaggcgagtacttgaggaggaactcaccgtgcacttgagcgtcccgggcgacaccattttgatcaataatcgacccggtcctagagagcccccaccttatcaggagccgaggcccaggggcaatcccccccatagcgctccctgcgtgcccaatggctcagcttatagtggggactacatggagccagaaaagccaggagctcccttgctgcccccccctccgcaaaacagcgtgccacactatgcagaggccgacatcgtgacgctgcagggcgttactgggggcaacacatatgcggtaccagccctgccccccggcgctgtgggagatggcccccccagagtggactttcccagatcaaggctacgcttcaaagaaaagctgggggaaggccagttcggggaggtgcacctctgcgaggtagatagcccccaggacctggtctctttagactttccactgaatgtacggaaaggccatcctcttcttgtggccgtgaaaatcttgagacccgatgctacaaaaaatgcccggaacgatttcctgaaggaagtaaaaataatgagcaggttaaaagaccctaacattatccgcctcctgggggtttgtgtgcaggacgaccctttatgtatgattacggactatatggaaaatggtgacttgaaccagttcctctcagcgcaccagttggaagataaggccgcagaaggcgcacccggagatggccaggccgcccaaggaccgactatttcctatcctatgctgcttcacgtcgcggcacagatcgcaagtggcatgcggtatcttgctactttaaacttcgttcaccgcgacctggccactcgcaattgtctggtgggcgagaatttcaccatcaagatcgctgatttcggaatgtctcgcaacctgtatgcgggagattactatagggtgcagggcagagcagtgttacccattcgatggatggcttgggagtgcatactgatgggcaaattcactacagctagcgacgtatgggcattcggcgttactctgtgggaagttctgatgctctgtcgggcacaaccctttggccagctgactgacgagcaagtgatagaaaacgccggggagttctttcgcgatcagggcagacaggtgtatttgtcccgccctccagcttgtccacagggattatatgagttgatgctgaggtgttggtcaagagagtccgaacagcgccctccttttagccaattgcacaggttcctcgcagaggatgccctgaacacagtgtag

SEQ ID NO: 8597 - DNA, 672 bp, synthetic construct
  misc_feature 1..672: note = source = /note="Description of Artificial Sequence: Synthetic coding sequence"
  source 1..672: mol_type = other DNA
atgaagttcgtgccctgcctgctgctggtgaccctgagctgcctgggaacactgggccaggctccacgtcagaaacagggctccactggcgaggaattccattttcagaccggaggacgtgactcctgtacgatgcggccatcttctctcggtcagggagcaggagaagtgtggttacgcgtggattgcagaaacacagatcaaacctactggtgtgaataccggggccaaccatccatgtgccaggcctttgccgcagaccccaaaccatactggaatcaagccctccaggagttgcgcagactgcaccatgcctgccagggagcacctgtgttaaggcccagcgtgtgccgggaggctgggcctcaggcccacatgcagcaggtaaccagcagtctcaaaggttctcctgagcccaatcagcagccggaggcaggcaccccctcccttcgtcctaaagcaactgtaaaactgactgaggcaacgcagctgggtaaagacagtatggaggaactagggaaggcaaagccaacaacccggcccaccgcaaagccaacacagccaggccccagacccggtgggaacgaagaggctaaaaagaaggcttgggagcactgttggaagccattccaggcattgtgcgcctttctgattagttttttccgcgggtag

SEQ ID NO: 8598 - DNA, 585 bp, synthetic construct
  misc_feature 1..585: note = source = /note="Description of Artificial Sequence: Synthetic coding sequence"
  source 1..585: mol_type = other DNA
atgaccatgcggcacaactggacccccgacctgagccccctgtgggtccttttgctctgcgcacatgtggtcaccctgctggttagggctacacccgtttctcagactaccacagccgctactgctagcgtccgatcgacaaaggatccgtgtcctagccagccccccgtcttccctgccgccaaacagtgtccagcgctggaagtgacgtggccagaagtggaggtcccgttaaacggaacactaagcctgtcttgcgtggcatgcagtagattcccaaacttctccattctctattggctgggaaacggctctttcatcgaacatcttcccggccgcctttgggagggatctacatcaagggaaaggggtagcaccgggactcaactttgtaaggcacttgttttggagcaattgactccggcactccactccactaatttctcctgtgtactggtggaccccgaacaggtcgtccagaggcatgtagtgcttgctcaactctgggctgggctcagggctacactcccgccaacgcaagaggccctgcctagctctcactcctcaccgcagcagcaaggttag

SEQ ID NO: 8599 - DNA, 777 bp, synthetic construct
  misc_feature 1..777: note = source = /note="Description of Artificial Sequence: Synthetic coding sequence"
  source 1..777: mol_type = other DNA
atgatcgccatcagcgccgtgagcagcgccctgctgttcagcctgctgtgcgaagcctccactgtggtcttactaaacagtaccgattcgtccccccccaccaacaactttactgacattgaggcggcccttaaggcccagcttgacagcgcagatattcctaaagcccgccggaagaggtacatctcgcaaaatgatatgatcgccattctagattaccacaatcaagtgcggggaaaagtatttcctccagctgcgaatatggaatacatggtctgggatgagaatcttgcgaagagcgcagaggcctgggcagccacatgtatctgggatcacggaccctcataccttcttcgcttccttggacagaatctcagcgtgcgtactggaagatacagatccatcctgcaactggttaagccttggtatgacgaggtgaaagattacgcatttccttatcctcaggattgcaaccccagatgccctatgcgttgcttcggtcctatgtgcacccactatacccagatggtctgggctactagtaataggattggctgcgccatccacacttgtcagaatatgaatgtgtgggggtccgtctggcgcagagcggtatatctcgtgtgcaattacgctcctaaaggcaactggattggcgaggccccttacaaggtgggcgtgccttgttcctcctgcccaccttcgtatggtggtagctgtaccgacaacctgtgtttccctggcgttactagcaactatctctactggtttaagtag

SEQ ID NO: 8600 - DNA, 906 bp, synthetic construct
  misc_feature 1..906: note = source = /note="Description of Artificial Sequence: Synthetic coding sequence"
  source 1..906: mol_type = other DNA
atgctgcccctgaccatgaccgtgctgatcctgctgctgctgcccactggtcaggctgcccctaaagatggcgttacccggccagacagcgaggtccaacaccagctacttcccaatccttttcagcctggccaggagcagttgggacttctgcagtcctatctcaaggggttaggtagaaccgaggtccagctagagcatctgtcccgggagcaggtcctgttgtacctgtttgcattacatgattacgatcaaagcggacaactggatggcctcgagctcctctcaatgttgaccgccgctctggcacctggcgcagccaacagccctacaactaatcccgtaattcttatcgttgataaggtgctggaaacgcaggatctcaatggagacggactcatgactccagccgaattgatcaacttcccaggtgtcgccttgcgacatgtcgaaccaggtgaacctttagcaccctcacctcaggaacctcaggctgtggggcgtcagagcctcctggctaagagccccttgaggcaggagacacaagaggcccccgggcccagagaggaagccaagggtcaggttgaggcccggcgggagagcctggatcccgtccaagaacccgggggccaggcggaggccgacggcgacgtccccggaccccgaggcgaagccgaaggacaagcagaggcaaaaggggatgctcctggaccgcggggcgaggccggcgggcaggccgaggcggaaggcgatgcccccggtccgagaggcgaggctggcggccaggcagaagccagggagaacggagaagaagcaaaggaattgcccggcgagactctggaatccaaaaacacccaaaatgatttcgaggtgcatattgtgcaggtagaaaatgatgagatctag

SEQ ID NO: 8601 - DNA, 969 bp, synthetic construct
  misc_feature 1..969: note = source = /note="Description of Artificial Sequence: Synthetic coding sequence"
  source 1..969: mol_type = other DNA
atgaagaccctggccggcctggtgctgggcctggtgatcttcgacgcggcagtgacagccccaactctagagtctattaactacgattctgagacttacgacgcaactctcgaagacctggataatctgtacaattatgagaacatcccagtcgacaaggtcgagattgagatcgctacagttatgccatccgggaatagggagctcctgactccccctccccaacccgagaaagcgcaggaggaggaagaggaggaggaaagcacacctcgattgatagatggatccagcccacaggaaccagaattcaccggagtcctcgggcctcatacaaacgaggacttccccacctgcctcctatgcacatgcatctccaccaccgtctattgcgacgatcacgagctggacgccatacctcctctgcccaaaaacactgcctatttctactccagatttaaccgaataaaaaaaataaataagaacgattttgccagccttagtgacctcaaaaggattgatctaacttctaatttaatcagcgagattgacgaagacgcatttcgcaagttgcctcagctgcgggagctagtgctgagagataacaaaattaggcagctgcctgagctacccacaacactgacattcattgacatatctaataatcggttggggcgtaaaggtatcaaacaggaggcgtttaaggatatgtacgacctccaccatctctatctaacagacaacaacttggatcatattccactaccactgcctgaaaatctcagagccctgcaccttcagaataacaatattcttgagatgcatgaagatacgttttgcaatgtgaagaatctgacctatatcaggaaggccctcgaggatattagattggatggcaacccaattaacctttcgaagacaccgcaagcgtacatgtgtcttcctagactgcctgtcggaagcctagtgtag

SEQ ID NO: 8602 - DNA, 618 bp, synthetic construct
  misc_feature 1..618: note = source = /note="Description of Artificial Sequence: Synthetic coding sequence"
  source 1..618: mol_type = other DNA
atggtgaacctggccgccatggtgtggcggcggctgctgcggaagcgctgggtcctggcattagtctttggcctgtcgcttgtctactttttgtcctctaccttcaagcaggaagagagagccgttagggaccgcaatttactccaggtgcacgatcataatcagcctatcccctggaaggtgcagtttaacctcggcaactcctcaaggccttcaaatcagtgcagaaacagcattcaaggtaagcatctcatcaccgacgagcttgggtatgtttgtgagcggaaagacctcctggtgaacggctgttgcaacgtgaacgtgccctcaaccaaacagtactgctgcgatggctgctggcccaatggctgctgtagtgcttacgagtattgcgtttcttgctgcttgcaaccaaataagcaactcctgctcgagcggtttcttaacagagccgctgttgcatttcaaaacctatttatggctgtcgaagatcacttcgaactgtgccttgcgaagtgtaggacatctagccagtccgttcaacatgaaaacacttacagagaccccatagccaagtattgctatggcgagagtccacctgagctgtttccagcatag

SEQ ID NO: 8603 - DNA, 3057 bp, synthetic construct
  misc_feature 1..3057: note = source = /note="Description of Artificial Sequence: Synthetic coding sequence"
  source 1..3057: mol_type = other DNA
atggtgagccacttcatgggcagcctgagcgtgctgtgcttcctgctgctcctcggatttcagtttgtgtgtcctcagccatctacgcagcatcgcaaagtgccacagcgcatggctgcagagggggctcctgaagacgatggcggtgggggggctcccggtgtgtggggagcttggggaccatggagcgcttgttcccgaagctgttccggtggagttatggaacagacacgtccctgtctaccaagatcctacagactcagggggggacagagacccggggccccagctcgggccttcgcggatcacgttgtgtctgccgttcgaacttcggtgcccctgcataggagccgcgacgagacacctgccctggcaggcaccgacgcctcacgccaggggcccacagtcctcagagggtcacgacacccccagccccagggccttgaggtaactggcgatagacgctctcgcacccggggtaccattgggccaggcaaatacggttatggcaaagcaccatatatattgcctctccagacggatacggcgcacacgccccaacgcctgagaaggcagaaactatccagcaggcacagtaggagccagggggcttccagcgcccgccacggttactccagcccagcgcaccaagtgccccaacacggtcctctctatcagagcgattccggccctcggtccggtctgcaggctgcggaggcgcccatctatcagctgcccttaacacacgaccagggctaccctgcggccagcagtctgttccattccccagagacgagcaacaaccatggcgtgggtacccacggggcaacccagagttttagccagccggcacgcagcaccgccatctcatgtattggcgcgtatcggcaatataagttgtgtaacactaacgtctgccccgagtcttctcggtccatacgggaggtccagtgtgcctcatacaataacaagccctttatgggtcgcttttatgaatgggagccgtttgctgaagtcaagggcaaccggaagtgcgaattaaattgccaggccatggggtaccgattttatgtgcgccaagcagagaaggtcatcgacgggacaccctgcgatcagaacggtaccgccatctgtgtgagcggacagtgtaagtccatcgggtgtgatgattatttagggagtgataaagtagttgacaagtgtggagtgtgtggaggcgacaacacaggttgtcaggtcgtgtcaggtgtttttaaacacgccttaaccagtttaggctatcaccgtgtggtggaaattcccgaaggggctacaaagatcaacataactgagatgtacaagagcaacaactacctggcgctccggtcccgctcgggacggagcatcattaacggaaattgggctatcgataggcccgggaaatatgaggggggagggacaatgttcacctacaaacggcccaacgagattagttcgacagccggggagtcctttctagctgagggccctacgaacgagatcctggacgtctacatgatccatcaacaacctaacccaggcgtccattatgagtatgtgattatgggtacgaacgccatatctcctcaggtgcccccccaccgcaggcctggagagcctttcaacggtcaaatggttactgagggccgaagtcaggaggagggtgaacagaaaggtcggaatgaagaaaaggaagacctccgcggggaagcaccagaaatgtttacatcggagagcgcacaaaccttcccagtgcgtcatcccgacagattctctccgcatcgccctgataatctagtacctccggcccctcaacctccccggcgctctagagatcacaattggaaacagctaggtaccaccgaatgctcaacgacttgcggcaagggtagccagtaccccattttccgttgtgttcacaggagcacacatgaagaagcccccgagagttactgcgattcatctatgaagcccacgcccgaggaagaaccttgcaatatttttccttgcccagcattttgggatatcggtgagtggtctgagtgcagtaaaacctgcgggctcgggatgcagcataggcaagtattgtgtcgacaggtttatgcgaatcggtccctcaccgtacagccataccgctgccaacacttggaaaagcctgaaactacctctacgtgccagctgaaaatatgcagcgagtggcagataagaacagactggacttcatgtagtgtaccctgcggtgttggccagcggacacgggatgttaaatgtgtgtcaaacatcggggatgtggtggacgatgaagaatgtaacatgaagcttcgtcccaacgacatcgagaattgtgatatgggtccttgcgccaaatcatggttcctgactgaatggtcagagcgttgtagtgctgaatgcggtgccggcgtcaggactaggagcgtggtgtgtatgaccaaccatgtctcatccttacctctcgagggttgtggaaacaataggcccgctgaagccacgccctgcgataatggaccatgtacagggaaggtggaatggttcgccggctcgtggagtcagtgctctatagaatgtggttctggaactcagcagagggaagtaatctgtgtcaggaagaatgcagatactttcgaggtgcttgacccttctgaatgtagctttcttgaaaaacctccttcgcagcaaagttgtcaccttaagccatgcggtgcgaaatggttttccacagagtggagcatgtgctcgaaatcttgccagggagggtttcgcgttagagaggtgaggtgccttagcgatgacatgacgttgtcaaatctctgcgaccctcagctgaagcctgaagaaagggagagttgcaatccccaagattgcgttcctgaagttgatgagaactgcaaggataaatactataactgtaatgtcgttgttcaggctaggctttgcgtctacaattactataaaaccgcgtgctgcgcctcctgcacaagggttgccaatcgacagaccggctttttgggcagccgatag

SEQ ID NO: 8604 - DNA, 1503 bp, synthetic construct
  misc_feature 1..1503: note = source = /note="Description of Artificial Sequence: Synthetic coding sequence"
  source 1..1503: mol_type = other DNA
atgaagtgcaccgcccgggagtggctgcgggtgaccaccgtgctgtttatggcgcgggcgatccccgccatggtggtgccaaacgctacgctgctcgagaagctgctggagaagtatatggacgaggacggcgagtggtggatcgctaaacagaggggcaaacgagccatcacagacaacgatatgcagagtattctggacttacataataaactgcggtcccaggtctatccaacagccagcaacatggaatacatgacttgggatgttgaactggaaagatctgccgagtcctgggcggaatcgtgcctctgggaacacggccctgcctccctgctgccctcaatcgggcagaacctaggcgcacattggggccggtaccggcctcctacttttcatgtccaaagctggtatgacgaagtcaaagatttctcttatccatatgaacacgagtgtaacccgtattgtcccttccggtgtagcggtccagtctgcacacactacactcaggtggtgtgggccacatcaaaccggattggctgtgccatcaatctgtgtcataacatgaatatttggggacagatttggcctaaagcagtgtacctggtatgtaactatagcccaaagggcaattggtggggccacgctccctataagcacggacgcccatgctccgcttgtccccctagtttcggcggggggtgcagggagaacctgtgttacaaggagggctccgaccgttactatccacctcgcgaggaagagaccaacgagatcgagagacaacaatctcaagtgcacgacactcacgttcgaactaggagcgatgattcgagtcgaaacgaggtgatcagcgcccagcagatgagccagattgtgtcatgtgaggtgagattgcgcgaccagtgcaagggaaccacatgcaatcgatacgagtgccctgctggctgtttggatagcaaggccaaggtcattggctctgtgcactatgaaatgcagtcttcgatttgtagagctgcaatccactacggaatcatcgacaatgatggcggctgggtagacatcacccggcaaggtcggaagcactacttcataaagtctaaccgcaatggaattcaaactattgggaaataccaatccgccaacagcttcaccgtctcaaaagtgactgtgcaggccgtgacctgtgagacaactgtagagcagttgtgtcccttccacaagcccgccagccactgcccaagagtgtactgcccacggaattgcatgcaggcaaatccacattatgccagagtgataggcaccagggtttactccgatctgtcttcaatttgtagggccgcggtccacgccggtgtggtccgcaaccacggtggctatgttgacgtgatgcccgtggataaaagaaagacttacattgcgtcttttcaaaatggtatcttctctgaatcattgcaaaatcctcctggggggaaggccttccgcgtgttcgctgtagtgtag

SEQ ID NO: 8605 - DNA, 2070 bp, synthetic construct
  misc_feature 1..2070: note = source = /note="Description of Artificial Sequence: Synthetic coding sequence"
  source 1..2070: mol_type = other DNA
atgaagttcggcgccgtgacccggatcggcggcccccccctgggcaaccaatcgccgagttcttgcagcctcctgcatgaaaaagaccctccgactacaagcggccctcagacagaccagcccaaaaagcacctcaccaattttaagtccgcgaccagaagagttgcccgcactcagtggcttactgcggacagacagacatgggcatcaattagcagtgtgccgtgggctcaaacaatctccgaaaaaaaacccggcggcagcctgtgggagacacggtcaagtcctcctacaacagctggcacagaagaggcaatgaacacaaccagcctgttggcaccggccgcagaaatcatggcaacaccaggatctccaagccaagcctctccaactctcggagccttcacacacgggactcagacgccgtcacctaccaaggcaaccgcaccacggtacccacagacgggagatctgtccgccgaatggccctttactgccggagaggaaccagttcttgtcccccgcccccatcaggtgtctagagttagatcaagctgttgcctgtctcccattctttgttcgccagcaatgattgcgttcctcctcacatccgtgctgatgatcccccacgccggaggccatcctttagatacaccgcatctacctcaggagttgcctcccggcctgcccaataatatcaacattacgtttttctcgggaatgttcaagaacgtggagtccgttgcggaaatttttgattgcctcgggccacactttacttggttacaggcagtttttactaacttccctgtcttaatccagtttgtgaacgggatgaaatgcgtcgcagggctgtgccctcgtgattttgaggactacggatgcacttgtcgctttgagatggaggggctgcccgttgacgaaagcgactcatgctgcttccagcacaggaggtgctatgaggaggccgccgaaatggattgcctccaagatcctgccaaactcagtaccgaggtgaattgcgtgtcgaagaaaatcatctgtgagtccaaagataattgtgagcaccttctctgcacttgcgacaaagcagctatcgaatgcttagcccgcagttctttgaatagctcactcaacctcttagacaccagcttctgcttggcacagacacccgagacaacaattaaagaagacttgacgacacttctgccgcgtgtggtgcctgtggaacccacggatacttctttgactgctttatcaggggaggtggcggctgagacagaggctgataggcttatcacgctcagtaagaagaaggctggccacgatcaggaaggagttggggcagccagagctacatcaccccccgggagcgccgaaatcgtggcaactcgcgtcacagcaaaaatagtcacactggtccctgcaggcattaagtctttgggtctggccgtgtcgtccgttgagaacgatcccgaggagaccactgaaaaagcatgcgataggtttacttttcttcatctgggctcaggcgataatatgcaggtgatgccccagctcggcgaaatgctcttttgcttaacctcacgctgtcccgaggagtttgagtcttacggatgttactgcggtcaggaaggaagaggggaaccgagggacgatctggaccggtgctgcctctcgcatcattgttgcctcgagcaggttagaaggctggggtgtcttctggaacggcttccgtggagtccggtggtgtgtgtggatcacacacccaagtgcggaggccagagtctgtgcgagaagttgctttgtgcttgtgatcagacagctgcagagtgcatgacctcagcttcattcaaccagagcctgaagagcccatctcgcctgggatgccccggccaacctgcggcgtgtgaggattcactgcaccctgttcctgctgccccgacactgggtagctctagtgaagaagactcagaagaagaccctccccaagaagatctgggccgggccaagcggttcttgcggaaaagcctgggccctttggggattggtcccctgcacggtcgttag

SEQ ID NO: 8606 - DNA, 1359 bp, synthetic construct
  misc_feature 1..1359: note = source = /note="Description of Artificial Sequence: Synthetic coding sequence"
  source 1..1359: mol_type = other DNA
atggagctggccctgcggcggagccccgtgccccggtggctgctgcttctaccactgttgttgggattgaacgccggcgctgtgatcgactggccaaccgaggaaggaaaggaagtgtgggactacgtcacagtgaggaaagacgcctacatgttttggtggctgtattatgctacaaattcctgcaaaaatttcagtgagcttccgctggtcatgtggctgcaaggcggaccaggtggctcaagcacagggtttgggaactttgaggaaatagggccactggattctgatctcaagccccgcaagactacttggctacaggctgctagcctcttgttcgtggacaatccggtaggcacagggttctcctatgtgaacggatctggcgcttatgccaaagacctggcgatggtcgcgtcagatatgatggtgctcctaaagacctttttctcctgtcacaaagaattccagacagtacccttctatatttttagcgaatcctacggcggaaagatggctgctgggattggacttgagctgtacaaggccattcagagggggaccataaagtgcaacttcgcaggcgtcgcactcggggatagctggataagtcctgtggatagcgtactctcatgggggccttacctgtacagcatgtctctgttagaggacaaagggctcgccgaggtgtccaaggtggctgagcaggtgctgaacgctgttaacaagggcctatacagggaggccactgagctctggggcaaggccgaaatgattatcgaacagaatactgatggtgtgaatttctataacatcctaaccaaatctacgcccacctcaactatggagagctctcttgagtttacccagtctcatctggtgtgcttgtgtcaacgacatgtgcggcatctccagcgggatgccctcagccagctgatgaacggcccaatccgaaaaaaactcaagataattcctgaggatcagtcttggggtgggcaggccaccaatgtgtttgtcaacatggaggaagattttatgaaacctgttatttcaatcgtggatgaactccttgaggcagggatcaacgtgaccgtgtacaacggccaactcgacctgatcgttgatacaatggggcaggaggcctgggtccgtaagttgaaatggcccgagctgcccaaattctcacagctgaagtggaaggctctgtactcagaccctaagtcgctggagacaagcgcattcgtgaaaagctataaaaatctggccttctactggatcttaaaggccggtcacatggtgcccagtgaccagggcgacatggccctgaagatgatgcgcttggttacgcagcaggagtag

SEQ ID NO: 8607 - DNA, 1395 bp, synthetic construct
  misc_feature 1..1395: note = source = /note="Description of Artificial Sequence: Synthetic coding sequence"
  source 1..1395: mol_type = other DNA
atggtgcggctggccgccgagctgctgctgctgctgggcctgctgttacttactttacacatcacagttctacggggttcaggagctgctgacggacccgacgctgccgcgggaaacgcctctcaggcccagttgcagaacaacctgaatgtcggaagcgacacaacgagtgaaacaagcttttccctatctaaagaggctcctcgggagcacctggaccaccaggccgcccaccagccgtttccacggccacgtttccggcaggagactgggcatccttcacttcagagggactttccaagatcatttttgctggacctgcccaactttcccgacctgagtaaagcagacattaacgggcagaaccccaacatccaggttaccattgaagttgtagacggtcctgatagcgaggcagacaaggaccaacaccctgaaaacaaacccagttggagtgtgccttccccagactggcgagcttggtggcagagaagtctgagtctggctcgcgccaactctggcgaccaggattacaaatacgactccacttcagacgacagtaatttcctgaaccctccaaggggttgggaccacaccgctcccgggcaccggacgtttgaaacaaaagatcagccggagtacgattctacagacggggaaggggactggagcttgtggagtgtctgttcggtcacctgcggtaatggaaaccagaaaaggaccaggagctgtgggtacgcctgcactgcaaccgagtctagaacctgcgacaggccaaattgtcccggaattgaagataccttccgcaccgctgctacagaggtctctctgctcgccgggagcgaagagtttaacgccactaaactgtttgaagtggacactgactcttgtgagcggtggatgtcttgcaagtcagagttcctgaaaaagtacatgcacaaagtgatgaatgatttaccatcttgtccatgcagttatcctactgaagtggcgtattcaacagcagacatctttgaccgtattaagcgcaaggatttccgatggaaagatgcatctgggccaaaagagaaattggagatctacaaacctactgccagatattgtattcgttcaatgctttccctggagagcacgaccttggctgcacagcattgctgctatggggataacatgcaactaatcacaaggggcaaaggggccggaactccgaacctgatctcaacggagttttctgcagagttgcactataaagttgacgtgcttccctggatcatctgcaaaggggactggtcaagatataacgaagccagaccacccaataacggtcagaagtgtacagagtcaccttccgacgaggactacataaagcagtttcaggaagctcgagagtattag

SEQ ID NO: 8608 - DNA, 1536 bp, synthetic construct
  misc_feature 1..1536: note = source = /note="Description of Artificial Sequence: Synthetic coding sequence"
  source 1..1536: mol_type = other DNA
atgctggtggacggccccagcgagcggcccgccctgtgcttcctgctgttggctgtggctatgagcttcttcggctctgctctatcaattgacgaaacgcgcgctcacctcttgctgaaagagaagatgatgcgcctcggcggacgcctcgttcttaataccaaagaggaactggccaacgaacgcctgatgaccttgaagatcgcagaaatgaaagaagccatgcgcacactcatattcccaccatcgatgcatttcttccaagccaaacatctgatcgagcgttcccaggtcttcaacatcctgagaatgatgccaaaaggagccgccctgcatttgcacgacatcgggatcgtcacaatggactggttggtgcggaatgttacctaccggccgcactgccacatttgtttcactccaagagggatcatgcagtttcgtttcgcccaccccaccccccgaccttcagaaaaatgcagcaaatggatcctgctagaagactaccggaagcgcgtgcagaacgtcaccgagtttgacgatagcttgctgagaaactttaccttagttactcagcaccccgaagtgatatataccaatcaaaatgtcgtgtggagtaagttcgagaccattttcttcactatctctggactcattcactacgctcccgtgtttcgcgattacgtgtttcgtagtatgcaggagttctacgaggacaacgttctgtatatggagatcagggctcgccttctgcccgtctatgaattaagcggggaacaccacgacgaggaatggtccgtgaagacatatcaggaggtcgcacagaaattcgtagagactcaccccgagttcattggaatcaaaatcatctacagtgaccatcgcagcaaagatgttgccgttatcgccgaatccattagaatggctatgggtttgcgcatcaagttcccaaccgttgtcgccggtttcgaccttgttggccatgaggacactgggcattctcttcacgactataaggaggccttaatgatcccagcaaaggacggagtgaagctgccttacttctttcatgccggggagacggactggcaggggacaagtattgaccgaaatatcctggatgccttaatgctgaatactacacgtattggccacggctttgctctgagcaaacacccagcagtcaggacctattcctggaagaaggacatacctattgaggtttgtcctatttcaaaccaagtactgaaacttgtgtctgacctgcggaatcatcccgtagcaaccctcatggccactgggcatcctatggttatcagctcagacgatcccgcaatgttcggcgcgaagggcttatcatatgacttctacgaagtgtttatggggattggcggcatgaaggctgacttgcgcactctcaagcaactggcgatgaactccattaagtatagcactcttctggaaagtgaaaaaaacacttttatggagatctggaagaagaggtgggacaagtttatagccgacgtggcaacaaaatag

SEQ ID NO: 8609 - DNA, 777 bp, synthetic construct
  misc_feature 1..777: note = source = /note="Description of Artificial Sequence: Synthetic coding sequence"
  source 1..777: mol_type = other DNA
atgaagcagatcctgcaccccgccctggagaccaccgccatgaccctgtttcccgtactactgttcctggtagctggccttttgccatcatttcctgcgaatgaagataaggatccagcattcacagcacttcttaccacgcagacacaggtccagagggaaattgttaacaaacacaatgagctgagaagagctgtgtctccccccgcccgtaatatgctgaagatggagtggaacaaggaggccgccgccaacgctcagaaatgggcgaatcagtgtaactataggcactcgaatcccaaagaccgaatgacgtccttaaagtgcggcgaaaatttgtacatgtcttcagcctcctcgagctggtcgcaggcaatccagagctggtttgatgagtataacgacttcgatttcggagtaggtcccaaaacccccaacgccgtcgtcggccattacacacaagtggtttggtactccagttacctcgtcggctgcggcaacgcctattgcccgaaccagaaagttctcaagtactactacgtctgccaatactgtccagccggcaactgggccaatagactttacgtcccctatgagcaaggagctccttgcgcttcctgtccagacaactgtgatgatggcctgtgcaccaatggctgtaaatatgaggatctgtacagcaactgtaagtcccttaagctgacccttacgtgcaagcatcagttagtcagagattcctgcaaggccagctgcaactgctccaattccatttactag

SEQ ID NO: 8610 - DNA, 714 bp, synthetic construct
  misc_feature 1..714: note = source = /note="Description of Artificial Sequence: Synthetic coding sequence"
  source 1..714: mol_type = other DNA
atggtgacccccccccccccccccgtgttcagcctgctgaagatcagtcagaggatcgtctgtctggtcttggacaaatccggctctatgggcggcaaagatcggttaaaccggatgaaccaagccgcaaaacatttcttgttgcagactgtagagaatggatcctgggtggggatggtgcactttgatagtaccgcaacaatcgttaacaaactcatacaaataaaaagctcagacgaacgaaatacgttgatggcggggttgcccacttacccactgggagggactagcatatgctcggggatcaaatacgctttccaggtgatcggggaactgcactcccagctcgatggaagcgaggttctgctactcacagatggggaggacaataccgcttcgtcgtgcattgatgaggtgaaacagagtggcgcaatcgtgcacttcattgctctggggagggctgctgacgaagccgtcattgaaatgtcaaagattactggcggaagtcatttttacgtgagtgacgaagcccagaataacggacttatcgacgcctttggcgccctcacatctggtaacacggacctgtcacagaaaagtctccaagtgcgggtgctcattccctgggtgttcatgttcaccttcgccacccgtaaaaatcatctggtggtgatttcgttcgagttccatattttcctcaaagtgaatttttag

SEQ ID NO: 8611 - DNA, 459 bp, synthetic construct
  misc_feature 1..459: note = source = /note="Description of Artificial Sequence: Synthetic coding sequence"
  source 1..459: mol_type = other DNA
atggacaacgtgcagcccaagatcaagcaccggcccttctgcttctccgtgaaggggcacgttaagatgcttagattggcccttacagtaacaagcatgacctttttcattattgcacaggctccggaaccttacatcgtcataacgggcttcgaggtgacagttatcctgttcttcattctgctgtatgtcctgcggctggatcggctcatgaaatggctgttttggccactactcgacatcattaactcactggttactactgttttcatgctgatagtcagtgtactggccctgattccagagacgacaaccttgacagttggggggggggtattcgccttggtgacagccgtctgttgcctggcagacggtgcattaatctatcggaaactcctgttcaacccgtcaggtccataccagaagaagcccgttcatgaaaaaaaggaagtgctctag

SEQ ID NO: 8612 - DNA, 3744 bp, synthetic construct
  misc_feature 1..3744: note = source = /note="Description of Artificial Sequence: Synthetic coding sequence"
  source 1..3744: mol_type = other DNA
atgctggccagcagcagccggatccgggccgcctggacccgggccctcttgcttccgctcctgcttgccggccctgttggttgtctttcacggcaggagctgttcccctttggcccaggccaaggagacctggagctggaagacggcgacgacttcgtcagtcccgcactggagctgtccggagccctcaggttctacgataggtctgatatcgacgcagtctacgtgaccaccaatggcattatcgctacttccgagccccctgcaaaggagtcacatccaggcctctttcctccaacatttggcgccgttgccccttttctcgcagacctcgacacaactgatggattaggcaaagtttactaccgggaagatctgagccctagcatcacccagagggcagctgagtgcgtgcaccgggggtttccagaaatttctttccagccctcatcagctgtggtcgtgacatgggaatcggtcgcaccttatcagggacccagccgcgatccagaccagaagggcaaacggaacacctttcaggcagttctagcgagcagcgatagttcgtcgtatgccatattcctctacccggaggatgggttgcagtttcacacaaccttttccaaaaaggaaaataaccaggtgcccgccgtggtagctttcagccaagggtcggttggctttctgtggaagagtaacggcgcatacaacatctttgcaaacgacagagagtccgtggagaacttggctaaatccagcaacagtggtcaacagggcgtttgggtgtttgagataggttcaccagcgaccacaaatggggtcgtgcccgccgatgtaatcctcggaacagaggatggcgccgaatatgacgatgaggacgaagattacgatctagccaccactaggcttgggctggaggacgtggggacaacacctttcagttacaaagcgctgcggcgaggaggagccgacacttattccgtgccgtcagtactgtctccaaggagagcagctactgagcggcctttagggcctccaactgagaggactcgctctttccaacttgctgttgaaacctttcatcagcaacacccccaggtaatcgatgtcgatgaggtcgaggagacaggtgtggttttctcctacaacaccgacagtaggcagacctgcgctaacaaccgacaccaatgttctgtccatgcagaatgtcgcgactatgcaacaggtttttgctgcagttgcgtggccggttacacaggaaatggtcgccaatgcgtcgccgaaggaagccctcagcgcgtgaatgggaaagtcaaaggtcgcatctttgtcggttcctcccaagtcccaatcgtctttgagaacactgacctgcactcctatgtggtgatgaatcacggcaggtcatacactgcaatcagcactattcccgagacagtgggttactctctgcttcctctggcccctgtgggggggataatcgggtggatgtttgccgttgagcaggatgggttcaaaaatggattcagcattacgggtggagagtttacaaggcaggcggaagtgacttttgtgggacaccctggcaatctggtgattaaacagcgattttctgggatcgatgaacacggacacttaaccattgacacagagttggaaggacgtgtcccacaaatccccttcggctcttccgtgcatatcgaaccatataccgagctctaccattattcaacctcggtcatcacaagtagctcaaccagggagtacacggtgaccgaacctgagagagacggagcgagcccaagccggatttatacataccaatggagacagaccattacattccaagaatgtgttcacgatgacagtaggcctgctcttccttccacccaacagctgagtgtggatagtgtttttgttttgtacaatcaggaggaaaagattctgcggtacgcactgtcaaattctattggtcccgtcagggagggtagccctgacgcacttcaaaatccctgttacatcggcacccacggatgtgatacgaatgccgcgtgtcgaccaggaccgaggactcaatttacctgtgaatgtagtattggctttcgaggagatggcaggacttgttatgacatcgatgaatgctcagaacagccgtcagtgtgtggctcacatacaatttgcaacaatcatccagggacttttcgctgcgagtgtgtcgagggttatcagttttccgacgagggaacatgcgtcgcagtggtggaccagcgtcctattaactattgcgaaactggcctacataattgcgatatcccgcagcgggctcagtgcatttatactggaggcagttcttatacttgctcttgtttgcccgggttttcaggcgacgggcaagcctgccaagacgttgacgaatgtcagccctccagatgccacccagacgccttttgctacaatactccagggtcattcacctgccagtgtaagccaggatatcagggcgatggattccggtgtgtgcctggcgaggtggaaaagacccgttgtcagcatgagagagaacatatcctcggagctgccggcgccacagacccccagcgtccgatccctccaggactgttcgttccggaatgcgatgcccacgggcattacgcccctacacagtgccacgggtctactggttactgctggtgcgttgatagagacggtcgggaagtggagggaactagaacccgtcccggtatgactccaccctgcctctcgaccgttgcgcctcctatccaccagggtccagctgtgccgacggctgtaattccgctgcctccaggaacccatctgctgttcgcacagaccggcaagatcgagcgacttcccctcgagggaaatacaatgcgaaaaaccgaagccaaggccttcctgcatgtgccagctaaggttatcattggactggcttttgactgcgtggacaaaatggtatattggaccgacattaccgaaccaagcatcgggcgcgcctcacttcatggtggcgagccaacaactatcatccgacaagacctcggcagccctgaaggcatcgcagttgaccatctggggaggaacattttctggacagattcaaatctggatcgaatcgaagtggccaaactcgacggtacccagaggagagtcctgttcgaaaccgatctcgttaacccaagaggtatagtcaccgacagcgtacgggggaacctgtactggaccgactggaaccgagataatccgaaaatagagacatcttacatggacggcaccaatcgcaggatcctggtgcaggacgacctcggccttcctaatgggctcacttttgacgcgttctcttcgcagctctgctgggtggacgcaggaaccaatcgcgccgaatgcctcaaccctagccagcccagtagaagaaaagccctagaggggctgcagtacccctttgctgtgacctcctatggcaaaaacctgtactttaccgattggaaaatgaattctgtggtggccctggatctggcaatttccaaagagacagatgccttccaaccgcataaacaaacacgattatatggcataaccactgccctgtcacagtgtccccagggccacaattactgctcagtgaataacgggggctgtactcacctatgcctggctactccagggtcccgcacatgtcgatgccccgataacaccctgggggtggattgcatagaacaaaagtag

SEQ ID NO: 8613 - DNA, 525 bp, synthetic construct
  misc_feature 1..525: note = source = /note="Description of Artificial Sequence: Synthetic coding sequence"
  source 1..525: mol_type = other DNA
atgctgcggaccgagagctgccggccccggagccccgccggccaggtggccgcggcatctccactcctgctgctcctgctgttgctggcctggtgcgccggcgcctgccggggagcacccatcctgccacagggtctccaacctgaacagcagctccaactatggaacgagatcgacgatacctgttcatcctttctgtcaattgatagccagccacaggcgtccaatgctttggaggaactttgttttatgattatggggatgctgcctaagccacaagaacaggatgagaaagacaacacaaagcgctttctttttcattacagcaaaacccaaaagctcggcaagtccaatgtagtttcttcagtggtgcatccactactccagctggtgccccacctgcatgagagacgtatgaagagattccgcgtggacgaagagttccagagtccctttgcgtcccagagcaggggttactttttgtttagaccaaggaatggtcgacgcagtgctggattcatctag

SEQ ID NO: 8614 - DNA, 1218 bp, synthetic construct
  misc_feature 1..1218: note = source = /note="Description of Artificial Sequence: Synthetic coding sequence"
  source 1..1218: mol_type = other DNA
atggacaccatcttcctgtggagcctgctgctgctgttcttcggcagtcaggcaagtaggtgcagcgcccagaagaacaccgaatttgccgtagatctctatcaggaagtgtctctgtcacataaggataacataatcttcagccccctggggattaccttggtgcttgagatggtgcaactaggtgcgaagggcaaagcccagcagcaaatccggcagactctgaaacaacaggaaacctcggctggggaagagttcttcgtcttgaaatcttttttctccgcaatctctgaaaaaaaacaggaatttacattcaacctagcgaacgccttatatttacaggaaggtttcacggtgaaggagcagtacctacacggcaacaaagagttcttccagtcagctattaaactcgtggatttccaggacgcaaaggcctgtgcagagatgatatctacatgggttgaacggaaaacagatgggaaaatcaaggacatgttttcaggggaagaattcggcccgctgacaaggctggttttggtgaatgcgatctatttcaagggggactggaaacagaaattccgcaaagaggatacacagctgatcaacttcactaagaagaacggatccacggtcaagattcccatgatgaaagcactcctgagaacaaagtatggatattttagcgagtcatccctcaactaccaggtcctcgagttgtcttacaaaggggacgaattctcattgatcattatactgcccgcagaaggaatggatatcgaggaagtggagaagctcatcactgcccagcagatcttaaaatggctgtcagagatgcaggaggaagaagtggaaattagcctgcctaggttcaaagtggaacaaaaagtggacttcaaggacgtgttgtactccctcaacatcaccgaaatcttttcgggcggttgtgacctctcgggcataaccgactccagcgaggtttatgtgtcacaggttacgcagaaggtgttttttgagatcaatgaagacggctccgaggctgccactagcaccggcatccacattcctgtgatcatgtccctggcacagagccagttcattgcgaaccatccattcctgttcatcatgaaacacaatccaacagagtcaattctcttcatgggccgggtgactaacccagacactcaagaaataaagggcagagatctcgattcgttatag

SEQ ID NO: 8615 - DNA, 3687 bp, synthetic construct
  misc_feature 1..3687: note = source = /note="Description of Artificial Sequence: Synthetic coding sequence"
  source 1..3687: mol_type = other DNA
atgaagggcgcccggctgttcgtgctgctgagcagcctgtggagcggggggattggtttaaacaattcaaagcattcttggaccatcccagaagacgggaactcccagaaaactatgcccagtgcgtccgtcccgcccaataagatacagtcattgcagatcttaccaactacacgggtgatgagtgctgagattgctacgacccccgaggctcgaacttccgaagattcactgcttaagtcaactttgccgccaagcgaaacgtccgctccggcagagggagtcaggaaccagaccctcacctcaacggagaaggctgaaggagttgttaagttgcagaacctgacactcccgacgaatgcttccattaagttcaatccgggcgcagagtccgtcgtgttgagcaatagcaccctcaagttcttacaaagcttcgcccggaagtcgaacgaacaagcaaccagtctcaacactgtcggaggaacgggcggcattggaggtgtggggggcacgggcggagtgggaaatagagccccaagggaaacctatttgagcagaggggacagttcaagttcccaaaggacagactaccagaagagcaactttgagaccacaagagggaagaactggtgcgcctacgtgcatacccgcctatctccaacagtcattcttgacaatcaagtgacatacgttcctggcggcaagggaccatgcgggtggacaggtggcagctgcccacagcggtcccagaagatcagcaacccagtgtaccgtatgcaacacaagatcgttacatctcttgactggaggtgctgtcctggctatagcggccccaagtgtcagctgcgggcccaggaacagcagtcccttattcacacaaaccaggccgagtcacacacagcagttggtcgtggggtagcagaacagcagcagcagcaagggtgcggagatccggaagtgatgcaaaagatgacagatcaagtgaattaccaggctatgaagctgaccctattacaaaagaagatcgacaacattagcctgaccgttaatgacgtgcgcaatacctattcttcactggagggcaaggtttcggaggacaagagcagagagttccagtcccttctaaaagggttgaagtctaagtcgatcaatgtattgatccgggacattgttcgggagcaattcaagatttttcagaacgatatgcaggaaactgtggctcagctgttcaaaaccgtatcttcactttctgaggacctggagtccacgcggcagattatccagaaagtcaacgagagcgtagtgagcattgcagcccaacagaagtttgttctagtgcaggaaaatagacctacattaaccgacattgtcgagctgcggaaccacatagtcaatgtgcgacaagagatgactctgacttgcgaaaaacctattaaagagttggaagtcaagcagacacaccttgaaggcgcactggagcaagaacactcgcggagtatcctgtactatgagagcctgaacaagaccctgtcaaagctcaaggaggtgcacgagcagttgctttcaacagagcaggtgagcgaccagaagaatgcacccgccgcagaaagcgtgtccaataatgtgacagaatacatgagtacgttacacgaaaacattaagaaacagtctctgatgatgttgcagatgttcgaggacctgcatatccaggaaagtaaaattaataatctaactgtcagcctcgaaatggagaaagaatccctgagaggcgaatgcgaggatatgctttcaaaatgccgaaatgatttcaaattccagctgaaagacaccgaagagaacctgcacgtgctgaaccagacactggccgaagtgcttttccccatggacaataaaatggacaaaatgagtgaacagttgaatgacctaacctatgatatggaaatactgcagccgctgctcgagcagggtgctagtctcagacagaccatgacttatgagcagccaaaggaagccatcgttattaggaagaaaatcgagaatctaaccagcgccgtgaactccctgaactttatcatcaaggaacttaccaaaagacacaatctgttaaggaatgaggtgcagggcagggatgatgcactggagagacgaatcaatgaatacgctctagagatggaagatggcctgaacaagaccatgacaataatcaataatgcgatcgattttatccaggataattacgctttgaaagagaccctttccaccatcaaggacaatagcgagatccatcataaatgtacatcggacatggagacaatcctgacctttataccccaatttcaccgtctaaatgacagcatacagactttagttaacgataatcaaagatacaattttgtcttgcaggtggccaagacccttgccggaattccgagagatgagaagctcaaccagtctaactttcagaaaatgtaccagatgtttaacgagactacctctcaagtccgcaagtaccagcaaaacatgtcacacctggaggagaagctactcttgacgaccaagatctcaaaaaatttcgagacccgtctccaggatatcgagtcaaaagtgactcaaactttgatcccctattatatttccgttaagaagggatccgttgtcaccaatgagcgcgaccaagcccttcaattacaggtcctcaattccagatttaaagccctggaagcaaagtctatccacctcagcatcaatttcttttctctgaataaaacactccacgaagtgctgaccatgtgccacaacgcctcaacgtccgtaagtgagctgaatgcaaccatacctaagtggatcaaacattctctgccagatattcagctgctccagaagggcctgacagaattcgtggagccaatcatacagatcaagacgcaggctgccctgtccaatttgacatgctgcatcgaccggtccctgcctggatctctcgctaatgtggtcaaaagtcaaaagcaggtcaagtccttacctaagaaaatcaacgccctgaagaaaccaaccgtgaacctgaccacagtcctgatcgggcggactcagcgcaataccgacaatataatttatccggaggaatacagtagctgctctcggcatccttgccaaaatggaggcacttgcataaatgggcggacatcgtttacgtgcgcctgccggcacccctttacaggggacaattgcacaattaaactagtcgaggagaacgccctggccccagacttctcaaaaggaagctaccgttatgcgccaatggtcgccttcttcgcgtcccatacgtatggaatgactatccctggcccaattctgttcaacaatcttgatgttaactatggtgcatcttacacgcctcggaccggcaagttccgaattccttaccttggagtctacgtgttcaagtacaccatagagagcttcagtgcacatattagcggtttcctggttgttgacggaattgataaattggcattcgaaagcgagaacatcaattcagaaattcactgcgacagagtgctcaccggggacgcacttctcgagctcaactacggacaggaagtttggttacgactggctaaagggacaatcccagcaaaattcccccctgttacgacatttagtggttatttgctgtacaggacatag

SEQ ID NO: 8616 - DNA, 1365 bp, synthetic construct
  misc_feature 1..1365: note = source = /note="Description of Artificial Sequence: Synthetic coding sequence"
  source 1..1365: mol_type = other DNA
atgtggcccctgaccgtgcccccccccctgctgctgctgctgtgctcgggcctggccggccagaccctgtttcagaacccagaggagggctggcaactctacacaagcgcgcaggcaccggatggaaagtgcatatgtaccgcagtgatccctgcacagtccacctgcagccgtgatgggcgaagccgcgagctgcgccagctgatggaaaaagtacagaacgtgtcccaaagcatggaggtcttggagctgagaacatatagggatttgcagtatgtacgaggaatggagactttgatgcggtctttggacgcccgtctgcgagcagccgacggttccctaagcgcaaagtcctttcaggagcttaaagacaggatgaccgaactgctgccactttccagcgtgctggaacaatacaaagccgatacccgcacaatagtgaggctgagagaggaggttcgaaacctgtccggctccttggccgcgatccaggaggagatgggagcctacggctatgaggaccttcagcagcgtgttatggcgttggaagcacgactccatgcctgtgcacagaagctgggctgcggaaagctgaccggtgtcagcaacccaatcacagtccgcgcgatgggaagtagattcggctcctggatgaccgacacgatggcaccaagcgctgattcccgtgtgtggtatatggatggctactacaaagggaggagagtcctggaattcagaaccttaggggattttattaagggacagaactttattcagcacctcttacctcagccatgggccggaaccggccatgtggtatacaacggcagcctgttctacaacaagtaccagtcaaacgtggtggtcaaatatcactttcgctcacgctctgttctggtgcagaggtccctgcccggtgctggctacaacaatacctttccatattcgtggggcggattctcagatatggacttcatggtggacgagtccggcctgtgggctgtgtatacaaccaatcagaacgcgggtaatatcgtagtgtcccggctggatcctcacacactggaagtgatgcggtcatgggacacgggctatcctaaaagaagcgctggggaagcctttatgatctgtggagtcctgtacgtaacaaatagccacctggcaggtgcaaaggtatactttgcctactttactaacacttctagttatgaatacacagacgtgcccttccacaatcaatactctcatatatccatgctcgattacaaccccagagagagagcactgtacacctggaataacggccatcaggtcctctataatgttacactttttcatgtcatatccacatcaggcgacccttag

SEQ ID NO: 8617 - DNA, 909 bp, synthetic construct
  misc_feature 1..909: note = source = /note="Description of Artificial Sequence: Synthetic coding sequence"
  source 1..909: mol_type = other DNA
atgtgcgccgagcggctgggccagttcatgaccctggccctggtgttagctacattcgacccggctcgaggtactgatgctactaacccgcccgagggccctcaagataggagcagccaacagaagggccgcttatctctgcagaacaccgccgagatccaacactgtctggtaaacgcgggagacgtcggctgcggcgtattcgaatgctttgagaacaactcatgtgagattaggggcctccatggtatctgcatgacttttcttcataatgccggtaaatttgacgcacaaggcaaatcattcattaaagacgctctgaagtgtaaagcacatgccctgagacacaggttcggatgtatttctcgcaagtgccctgccattagagaaatggtgtctcaacttcagcgggaatgctatttgaagcatgatctctgtgctgctgcgcaggagaacacccgtgtgatagtggagatgattcatttcaaggaccttttgctgcacgaaccgtacgttgatctggtgaatctgctgctgacctgtggggaagaagtcaaggaggccatcactcatagcgtgcaggtacaatgcgaacagaattggggatctctgtgttccattctctcattttgtacgagcgctatacagaaacctcctactgcacctcccgagcggcaaccacaagttgaccggacaaaactgtctagggcccatcacggagaggccgggcaccatctgcctgagccctcttcccgcgagaccggccggggggcgaaaggtgaacgaggatcaaagagtcaccctaacgcacacgccagagggcgggtgggcggactgggtgcacagggcccgtctggttctagtgagtgggaggacgaacaatctgagtacagcgacattcggcggtag

SEQ ID NO: 8618 - DNA, 2529 bp, synthetic construct
  misc_feature 1..2529: note = source = /note="Description of Artificial Sequence: Synthetic coding sequence"
  source 1..2529: mol_type = other DNA
atgaagcccggcggcttctggctgcacctgaccctgctgggcgccagtctgcctgccgcgttgggctggatggatcctgggacaagtcggggtcctgatgttggagtgggtgagagtcaggcagaagaaccaaggagctttgaggttacccgccgcgaggggctctcaagccacaatgaactccttgctagctgcggaaaaaagttttgttcacgagggagcagatgtgttctgtctcggaaaactggggagcccgagtgtcagtgcctggaggcctgtcggccttcttacgtgccagtgtgcggctctgatggccggttttacgagaatcattgtaaactacacagagccgcctgcttgctgggtaaacgaatcactgtaatccattccaaagattgtttccttaagggcgacacatgtactatggctggctacgccagactgaagaatgtgctcttggcgttacaaacgagactgcagcccctgcaggaaggggacagcaggcaagaccccgcctctcagaaacggctgttggtagagagtttgttcagagacctcgacgcagatggcaacggccacctgtcgtcttctgagctggcccagcatgtgctcaaaaagcaagacctcgatgaagatctgttgggatgttctccaggggatcttctaagattcgatgattacaacagcgacagttccctcacgctccgtgagttttacatggcttttcaagtagtccaactatctctggctccagaagacagggtctctgtgacgacagtgaccgtgggattgagcactgtgctcacttgtgcagtccacggagacctgaggccccccatcatttggaagcggaacggactcacacttaacttcctggacctcgaggatatcaacgatttcggcgaagatgattcgctttacataaccaaagtcactaccatccatatgggtaattacacctgtcacgcgagtggccatgagcagctgttccaaacacatgtccttcaagtcaacgtgcccccagtaatcagagtctacccagagtcacaggcacaagaaccaggagttgcagcaagcctgcgatgtcacgctgagggaatccccatgccgagaattacgtggctaaagaatggtgtggacgtgagcacccagatgtccaagcagctgagtcttctcgccaatgggagcgagctgcacatctcttctgtgaggtatgaggatactggcgcctacacctgcatagcaaaaaacgaggttggcgttgacgaagacatatccagcctgttcatcgaggattccgccaggaagacactggccaacatcctatggagggaggaaggtctgagcgtcggcaacatgttttacgtgttctcggatgatgggataattgtgatccacccagtggactgcgaaatccagcggcatcttaaaccaacagaaaaaatattcatgtcctatgaggagatttgtccacagagggaaaagaatgcgactcaaccttgccaatgggtcagcgctgttaacgtgaggaatagatacatctacgtcgctcaaccagctctatctagggtgttggtggtagacatccaagcccagaaagtactgcagtctatcggggtcgaccctctccctgcaaaattaagctatgataagagtcatgaccaggtttgggtcctttcctggggtgatgtccacaagtcaaggccatctcttcaggtaataactgaggcttctaccggtcagtcccaacaccttattcggacacctttcgccggtgttgatgacttctttatccccccaacaaatctgatcattaaccatatccgctttggctttatctttaacaaaagtgatccagcagttcacaaagtcgatctagagaccatgatgccactgaaaactattgggctgcatcatcacggttgtgtcccgcaggccatggctcatacgcatctcggaggctattttttcatacagtgtcgacaagacagccctgccagtgctgcacggcagctcctggtcgacagtgtaactgacagtgttcttggcccgaacggtgacgtcacgggaacccctcacacatcaccagatggaagattcattgtttcagcggcagctgattcaccgtggctccatgtgcaggagattacagtgaggggcgagatccagactttgtacgacctgcagatcaattccgggatctcagacttggcattccagagatcattcactgagagtaaccagtacaacatctacgcggccctgcacacagagccggacctcctgtttctggagctgagcactggcaaagtaggtatgctaaagaatttgaaggaaccacctgccggccccgcacagccatggggaggcacacacagaataatgagggatagcggactctttggtcagtacttgttgaccccagcccgggaatcactgttcctgatcaatggccgccagaataccctccgctgcgaggtgtcgggtattaaggggggcacgaccgtggtgtgggtcggcgaagtgtag

SEQ ID NO: 8619 - DNA, 2256 bp, synthetic construct
  misc_feature 1..2256: note = source = /note="Description of Artificial Sequence: Synthetic coding sequence"
  source 1..2256: mol_type = other DNA
atggccttccggaccatctgcgtgctggtgggcgtgttcatctgctccatttgtgttaagggatcaagccaaccacaggcacgcgtatatctgacctttgacgaattacgtgagactaaaacatcggaatacttctcattatctcatcaccccctagattaccgcatccttctgatggacgaggatcaggaccgtatttacgttgggtcaaaggaccacatcctgtccctgaacatcaacaacatctcacaggaagccctgagtgtcttttggcccgcctcgaccattaaggtggaggagtgcaagatggcagggaaagaccccacccacgggtgtgggaacttcgtgagggtaatacagacattcaatagaacccatctctatgtctgcggtagtggtgctttctcacccgtgtgcacgtacctgaacagaggtcgccgaagcgaggaccaggtgttcatgatcgactcgaagtgcgagtctggcaaggggcgttgttcattcaaccccaatgtcaacaccgttagcgtcatgatcaacgaggaactgttttccggaatgtacatagacttcatggggacagatgctgccatctttcggtccctcactaaacgcaacgcggtccgaacagatcagcataactccaagtggttgagcgagcccatgtttgtggatgcccacgtaatcccggacggtacagatccaaacgatgccaaagtttatttctttttcaaagaaaaactgacagacaataaccggtccaccaagcaaatccacagcatgattgccagaatctgccctaacgatacaggtggcttacgctccctcgttaataaatggacgacgtttctgaaggccaggctcgtatgtagcgtcaccgacgaagacggccccgagacccatttcgacgagcttgaagatgtgttcttgctagagacagataacccaagaaccaccctagtgtacggaatctttaccacctcctcttctgtgttcaaagggtccgccgtgtgtgtgtatcatttgtcagacattcaaaccgtgtttaatggccctttcgcccacaaggaaggaccgaaccatcagctcatttcttaccaaggacgaattccttacccacgtccggggacatgtcctggcggggcattcacccccaatatgcgcacaacaaaagagttccctgatgatgtggtgacctttattcggaaccaccccctgatgtataattcaatatacccaattcataagagacctctaattgtgagaatcggaacggattacaaatacacaaagattgccgtagacagagttaatgcagcagacggacgctatcatgttttattcctgggcacagatcggggtacggtacaaaaggttgtcgttctgcccactaataactctgtgtctggcgagctgatcttggaggagctagaggtctttaaaaatcacgctcccattactaccatgaagatttcgtccaagaagcagcagctgtatgtatcttctaacgaaggcgtcagccaagtctcgttgcatcggtgtcatatttacggaacagcgtgtgcagattgctgcttagccagagacccctattgcgcctgggatgggcactcttgttcacgattctacccaacaggaaagcggcgatcccgtcgccaggacgtgcggcatgggaaccctctcacgcagtgcagaggcttcaacttgaaggcctaccgtaacgctgctgagatcgtacagtacggggtgaagaacaataccacctttctggagtgcgcgcctaagagtccccaggcgagcataaagtggctgctccagaaagataaggatcgccggaaggaggttaaactgaatgaacgcattatcgccacatcccaggggctcctgatacgaagcgtgcagggatctgaccagggcctgtaccattgcatcgcgacagaaaatagtttcaaacagactattgctaaaattaatttcaaagtcctggacagcgaaatggtcgctgtagtcactgacaaatggtccccctggacttgggcatctagtgtgcgcgctctgccctttcatccaaaggatatcatgggggcgttttcacattcggaaatgcagatgattaaccagtactgtaaggatacccggcagcagcatcagcaaggggatgagagtcagaaaatgcggggggattatggaaaactcaaagctctgatcaactcccggaaaagccgtaatcggaggaaccagcttccagagtcttag

SEQ ID NO: 8620 - DNA, 2316 bp, synthetic construct
  misc_feature 1..2316: note = source = /note="Description of Artificial Sequence: Synthetic coding sequence"
  source 1..2316: mol_type = other DNA
atgggctggctgacccggatcgtgtgcctgttctggggcgtgctgctgacagctcgcgccaattatcagaacggcaagaataacgttccacggctgaagctgtcctacaaggaaatgctggagtctaataatgtcataacttttaacgggcttgccaacagcagttcttaccacacttttctgcttgatgaggagaggagtagactctacgttggggcgaaggaccacatcttctcatttgatctggttaacattaaagactttcagaaaattgtttggcccgttagctacacacgtcgggacgaatgtaagtgggccggtaaggacatattaaaggagtgtgctaatttcatcaaggtcctaaaggcctacaaccagacccacttgtacgcttgcggcaccggagctttccaccccatctgcacctacattgaaatcggccatcatccagaagacaatattttcaagctggaaaacagtcatttcgagaatggacgcggcaagagcccatatgaccccaagctgctcactgcttctctcttaattgacggggagctctacagcggtacggccgcagatttcatgggtcgcgatttcgccattttccgcactctgggtcatcatcatccgatcagaaccgaacagcatgactcgcggtggcttaacgaccctaagtttattagcgcccacttgatttctgagtccgacaaccctgaggacgacaaagtgtatttttttttccgcgagaacgctatagatggagagcacagtggaaaagccacacacgcccggatagggcagatctgcaaaaacgatttcggaggccaccgaagcttggtgaataagtggacgacatttctgaaagctaggctgatttgctcggtcccaggccctaacggcattgatacgcactttgacgaattacaggatgtgtttctcatgaatttcaaagacccaaagaatcctgtggtttacggggtattcaccaccagctctaatatctttaagggctcggccgtctgcatgtactccatgagtgatgtgcggcgggttttcttagggccttatgctcaccgggacggaccgaactatcagtgggtgccgtaccagggcagagtcccctatccgaggcctgggacctgtccatcaaagacctttggaggatttgacagcactaaggatctgccagacgacgttatcacttttgcgcgcagtcaccctgccatgtataacccagtgtttccaatgaacaatcggccaatcgtcatcaaaacagacgtgaattatcaatttacccaaatagtcgtggaccgggtcgacgcagaagacggccagtatgacgttatgtttatcgggacagacgtgggaacagttctgaaggtggtaagcattccgaaagagacatggtatgatctggaagaggttctgctggaggagatgaccgtgtttagggaacctacggccataagcgccatggagctatccacaaaacaacagcagttatatatcggctccaccgcgggggtagctcaactccccttgcacaggtgtgacatctacggcaaagcttgtgccgaatgctgcttggctcgggacccttactgcgcgtgggacggtagtgcttgctccaggtacttccctaccgccaaaagacgtacacggcggcaggatatccgcaatggcgaccctctgacacattgctcagatcttcaccacgataaccaccatggccactcaccagaggaacgtatcatctacggtgtcgagaactcatctacttttctggaatgttcacccaaatcacagcgggccctggtgtactggcagttccagcgccgtaatgaggaacgcaaggaagagattagggtcgacgaccacataattagaacggatcagggcctgctgttgagatccctccaacagaaggactccggaaattatctttgccacgcggtcgagcacggattcatccaaaccttgttaaaagttaccttggaggttatcgacacggaacatctggaagagttgctgcacaaggacgacgatggcgacggaagcaagaccaaggagatgagcaattccatgaccccaagccagaaggtctggtatcgtgactttatgcagcttattaatcaccccaatttaaatacaatggatgagttctgtgagcaggtatggaagagggaccgaaagcagagaagacagagaccgggccacaccccgggcaacagcaataagtggaaacacctccaggaaaacaagaaaggccgtaatcgtcggacccacgagtttgagagggcaccacgtagtgtgtag

SEQ ID NO: 8621 - DNA, 4605 bp, synthetic construct
  misc_feature 1..4605: note = source = /note="Description of Artificial Sequence: Synthetic coding sequence"
  source 1..4605: mol_type = other DNA
atggccctgacccccggctggggcagcagcgccggccccgtgcggcccgaactgtggctcctgctgtgggccgccgcctggaggcttggagcctctgcttgtccagccctgtgcacttgcacaggtacaacagtcgattgtcacggcaccggcttacaggcgatccccaagaacatacctaggaacactgagaggctggagctgaatgggaacaatattacgcgaatccacaaaaatgacttcgctggtctgaagcagctcagggttttgcagctgatggaaaaccagattggcgccgtagaacgcggagcattcgatgacatgaaagaattggaacgcctgcggctgaaccgaaaccagttacacatgctgcccgagctgttattccaaaacaaccaggctctgtccagactcgatttatcagagaatgctatccaggccatcccccgcaaggcattccgcggtgccactgatttgaagaacctgcagttggataaaaaccagatctcttgtattgaggagggggcgtttcgcgccctgagagggctcgaggtgctgaccctgaacaataacaacatcaccacaatccccgtgagctcattcaatcacatgccaaagcttcggacattccgccttcatagcaaccacttgttctgtgattgccatctggcatggctgagccaatggctgagacaacgccccaccatcggtttgttcacccagtgctcgggaccagcctctctgaggggcctgaatgtggccgaggtccaaaagagtgagttcagttgttccgggcagggcgaggcggggcgggtcccaacctgtactttgtcctcagggagctgtccggctatgtgcacatgtagcaacggcatcgtcgactgccgggggaaaggcctgaccgcaatcccagccaacctccccgagaccatgaccgaaattcgactggagctaaacgggattaaaagtatccctcccggcgccttcagcccataccgaaaactgcgaaggatagatctgtctaacaatcaaattgctgagattgctcccgacgcctttcaggggctgcgcagcctgaatagtctggtgctgtacggcaacaagatcaccgatttacctcgcggtgtttttggaggcttgtatactctgcaattgctgctgctgaacgccaataagatcaattgtatcagacccgatgctttccaggacctacagaacctgtccctgctgagcctgtacgacaacaagattcagagcctggcaaaaggaactttcacctccctccgcgctattcagaccctgcacttggcgcagaatccatttatctgcgactgtaatctgaaatggcttgctgattttctcaggacaaaccctattgagacctcaggcgctcgctgcgccagcccccggagattggccaataagcgcattggacagatcaaatctaagaaattcaggtgtagtgccaaggagcaatacttcatcccaggcaccgaagactaccaacttaactctgagtgcaattccgacgttgtgtgtccacataagtgccgctgtgaggctaacgtggtagagtgcagcagtctcaagcttaccaagatccctgaacgtatcccacagagtacggcagagctccgattaaacaacaacgaaatctctatcctcgaagccaccggaatgtttaagaaactgacacacctgaaaaagataaacctctccaataacaaagtgtccgagatcgaagacggcgcttttgaaggcgccgcgagcgtgtcagagctgcatttgaccgccaaccagcttgagagtatccgctcgggaatgtttcgaggcctcgacggactgcgaacactcatgctgcgcaacaaccgcatatcatgtattcataatgacagcttcaccggcctacggaacgtccgacttctgtccctctatgacaaccagataacaaccgtgtcccctggggcatttgatacgctgcagtcccttagcaccctgaacctcctggcaaatccgttcaattgcaattgccaacttgcctggctcggcggatggctgaggaagaggaaaattgtgactgggaacccccgttgtcaaaaccccgactttctccgtcagattccactacaggatgtagcttttcctgatttcagatgcgaagagggtcaggaagaaggaggctgtcttcccagaccgcagtgtcctcaagaatgtgcctgccttgacacagttgttaggtgtagcaataagcatctgagggcactgccaaagggaattccaaagaatgtgaccgagttgtatctggacggcaatcaatttacgttagtgcctggacagctgagcactttcaagtatctgcagctggtagacctgtccaataataaaattagctccctctcgaacagcagctttactaatatgagccagctgactaccctcatattaagctacaatgccctgcagtgtatcccccctttggccttccagggcctgagatctttacggttgttgtccctgcacggcaatgatatatcaactttgcaggagggtatcttcgctgacgtcacgagcctctctcaccttgcaatcggcgccaaccctctatactgcgactgccaccttcgctggctgagcagttgggtgaagactggctataaagaacctgggatcgctaggtgcgcgggtccacaagacatggagggaaagttgctcctcacaacacccgcaaaaaagtttgaatgtcagggacctcccaccttagccgtacaggctaaatgtgacctgtgtttatcaagcccatgccaaaaccaggggacgtgccacaatgaccctctggaagtgtacaggtgcgcctgcccaagcggatataagggacgggattgcgaggtgtcacttgatagctgttcatcgggaccttgtgagaatggtggcacctgccacgcccaggagggcgaagatgccccttttacgtgcagctgcccgaccggcttcgaagggccgacttgtggcgttaatactgatgattgcgtggatcacgcatgcgcgaatggcggagtctgtgttgatggcgtaggaaactacacttgtcagtgtccactgcagtatgagggcaaggcttgtgaacagctggtggacctgtgttcaccagatcttaacccatgccaacacgaagcccaatgcgtcgggaccccggatggccccagatgcgaatgcatgccagggtacgctggagataattgtagcgagaaccaagacgactgtcgggatcaccggtgtcagaacggggctcagtgcatggatgaggtaaacagttacagctgcctgtgcgccgagggatattcaggccagctttgcgaaatcccaccccatctcccagcccccaagtccccctgcgagggcaccgagtgtcagaacggagccaattgtgtggatcagggaaatagacctgtctgccaatgcctccccggctttggcggacctgagtgcgaaaagctgctgtccgtcaacttcgtggatcgggacacctatctgcagttcacagaccttcagaattggcccagggccaacattaccttacaggtatccaccgcagaagataatggaatccttctctataacggcgacaatgatcacattgccgttgagctgtaccagggacatgtgagggtgtcttatgatcccggcagttacccttcctcagctatctactccgctgagactataaacgacggtcagttccacaccgtcgaactcgttgctttcgatcaaatggttaatctgtcaatagatgggggaagtcctatgaccatggataacttcggcaagcattataccttgaactctgaggcccccctctacgtgggcggaatgccggtcgacgtcaactccgccgccttccgcctttggcagatcctgaacggcaccggtttccacggttgtatcagaaacctgtatataaataacgagttacaggattttacaaagactcagatgaagccaggggttgtgcctggctgtgaaccttgccgcaaattatattgtctgcacgggatctgtcagccaaacgctacgccaggcccaatgtgtcactgcgaggcaggctgggtcggcctgcattgcgaccagccggcggatggaccttgccacgggcataagtgcgttcatgggcaatgcgttccgttggatgctctgtcttacagctgccaatgtcaggatggctattcaggagcactttgtaatcaggcaggagccctggccgagccatgtagggggttgcaatgtctccatggacactgccaggccagtggaacgaagggggcgcattgcgtgtgcgatcccgggttctcgggagaactgtgtgagcaggagtccgagtgtcgaggggaccccgtgcgggatttccatcaggtccaaagggggtacgccatctgtcagactacccggcctctcagttgggtggagtgtcggggctcttgtcctgggcaaggatgttgccaggggctgcggcttaagcggcggaagtttacattcgaatgttcggacgggacgtcatttgccgaagaagttgaaaaacccacaaagtgcggctgtgcattgtgcgcctag

SEQ ID NO: 8622 - DNA, 342 bp, synthetic construct
  misc_feature 1..342: note = source = /note="Description of Artificial Sequence: Synthetic coding sequence"
  source 1..342: mol_type = other DNA
atggacagccggcaggccgccgccctgctggtgctgctgctgctgatcgatggtgggtgcgccgaagggccgggtggtcagcaggaggatcagctgtctgctgaggaggattcggagcccttgccacctcaggatgcgcagaccagtggaagcctcctacattacttgctacaagccatggagcgtcccggaagatcacaggcgtttctttttcagccgcagaggttcgggcggaatacacaggggagttggaggaacgagtggctgagccccagggctggggagggcctcaattcacaattctggagtctggcagcaccccagcggttcggaaaaaaatag

SEQ ID NO: 8623 - DNA, 2568 bp, synthetic construct
  misc_feature 1..2568: note = source = /note="Description of Artificial Sequence: Synthetic coding sequence"
  source 1..2568: mol_type = other DNA
atggcccggcacctgctgctgcccctggtgatgctggtgatcagccctatccccggcgcattccaagactcagctctgtcacccacccaggaagagccagaggacctggattgcggccggccagagccctccgcccggatagtgggcgggtccaacgcccaacccggcacgtggccctggcaggtttctcttcaccacggaggcggtcatatttgtggcggttcactgatagcgcccagctgggtgttgtccgcagctcattgtttcatgactaacggaacccttgagcctgccgctgaatggtctgttctgctgggggttcactctcaggacgggcctttagacggcgcccacacacgggctgttgctgcgatcgttgtcccggcgaattactcacaggtagaactaggtgcagatttggccctactgcgtctcgctagccccgcctcccttggcccagctgtctggccagtgtgtctcccacgggcaagtcacagatttgtccacggcacagcctgctgggccacgggatggggcgatgtacaggaagctgaccccctgcctttaccttgggtattgcaggaggtagaattacggctgctcggggaggccacatgccagtgcctttacagtcagccaggcccgttcaaccttactcttcaaattctaccggggatgttatgtgcagggtaccctgagggcagacgagacacctgccagggggacagcggcgggccactcgtgtgcgaggaaggtgggaggtggttccaggctggaattactagtttcggctttgggtgcgggcgtcggaaccggcctggcgtgtttaccgcggtggctacatacgaagcctggatccgcgaacaggtcatggggtctgagccagggcctgcctttcccactcagccccagaaaacccagtccgatccccaagagcccagggaggaaaactgtacaatagcgctgcccgagtgtggaaaggcacctagacctggcgcctggccatgggaggcccaagttatggtacctggctctcggccgtgccatggagcactggtgtcagagagttgggtgttggcccctgcttcctgcttcctggaccccaattcctcggacagcccccctagagatctcgatgcttggagggtccttttgccttcgaggccaagggcagaacgggtcgcccgcctggtccaacacgagaatgcctcctgggacaatgcctccgacttggctcttcttcagctgcggactcctgtgaacctttcagctgcctccagacctgtttgccttcctcatcccgagcattattttctccccggcagccgctgccggctggcacgctggggtcggggagagcctgcattgggaccgggagccctcttggaagctgagttgcttgggggttggtggtgtcattgtttgtacggacggcagggcgccgccgttcccctcccaggagacccacctcacgccctgtgcccagcttaccaagagaaagaggaggtgggctcttgctggaacgactcaaggtggtctctcttatgtcaagaggagggcacctggttccttgctgggattagagatttcccgtccggatgtctgcggcctagggcattttttccccttcagacacatggcccatggatctctcacgtgacccgtggcgcctatttggaggatcaactcgcttgggactggggacccgacggcgaggaaaccgaaacacaaacttgcccgccccatacagagcacggcgcttgcggcctgcggctcgaagccgctccagtaggcgtgctctggccctggctcgctgaggtacacgtcgccggcgatagagtatgcaccggaatcctgctcgctcccgggtgggtgctggcggccacacattgtgttctccgcccaggatctacaactgtgccgtatattgaagtgtatttagggagagccggtgcaagctccctaccacagggacatcaagtgtccaggctggtgatcagcatccgcctgcctcagcacctggggctacgcccacctctcgctctgctggagctgtccagtagggtggaaccctcaccatccgctctgcccatatgtttgcatcccgctggcattcctccgggagccagttgttgggttctcggttggaaagaaccgcaggatagagttcctgtggcggcggcagtgtctattctgacccaaaggatctgcgactgtctgtaccagggcatcctgcctcctggcacactgtgtgtgttgtacgcagaagggcaggagaatcggtgtgaaatgacgtccgccccacccctgctgtgccagatgaccgagggtagttggatcctagttggcatggccgtgcagggaagtcgggagctgttcgccgccataggcccggaagaggcctggatcagccaaacagtgggtgaggccaattttttgcccccaagtggatctcctcattggccaacaggggggagtaacctctgcccgcccgaactggctaaagcatccggttcacctcatgctgtttactttctcctgctactaactcttttgatccaaagctag

SEQ ID NO: 8624 - DNA, 912 bp, synthetic construct
  misc_feature 1..912: note = source = /note="Description of Artificial Sequence: Synthetic coding sequence"
  source 1..912: mol_type = other DNA
atgctgcaccccgagaccagccccggccggggccacctgctggccgtccttctggctttattggggactacctgggcagaagtttggcccccccaattacaggaacaggcgccaatggcaggagcactcaaccgcaaagaatcttttctgctgctaagcctgcacaaccgtctgagaagttgggtacagcccccggctgctgatatgcgcagactggattggtcggatagcttggcacaactagcacaagcacgagccgcactgtgcggcatcccgacaccctcgttagcctctggtctgtggagaaccttgcaggtaggatggaatatgcaacttctgccagccggcttggcaagcttcgtggaggtggtaagcttatggttcgccgagggtcagcggtactctcacgcagccggcgagtgcgccaggaacgctacgtgcactcattacacccaattggtgtgggcaacttcctcgcagctgggatgcgggaggcatctatgcagcgcaggtcagacggctatcgaagcttttgtgtgcgcttactctcctcgtggaaattgggaggtcaatggcaaaacgataattccctacaagaaaggcgcatggtgttccctctgcaccgcatcggtgtctggctgtttcaaggcttgggatcacgctggcggcctgtgcgaggtgccgcggaatccttgtaggatgtcctgccagaaccacggacgactcaatatcagcacctgccattgccattgcccacctggctacacagggcgctactgtcaggtgagatgtagtctgcagtgcgtccacgggcgtttccgcgaggaagagtgctcatgtgtttgcgatatcggatacggtgagccctctgttccgccccgttgcattttcccttctactccagtcacatag

SEQ ID NO: 8625 - DNA, 1158 bp, synthetic construct
  misc_feature 1..1158: note = source = /note="Description of Artificial Sequence: Synthetic coding sequence"
  source 1..1158: mol_type = other DNA
atgaagatgctgcccggcgtgggcgtgttcggcaccggcagcagcgcccgtgtgctcgtacccctcctgcgggctgagggatttaccgtagaggcgctgtggggcaagaccgaggaggaagctaagcagctggctgaggagatgaatatagcattttacacctcccggaccgacgacattttactccaccaggatgtggatctggtgtgcatctcaattcccccccctctaacccgccagataagcgttaaagccctgggcatcggaaagaatgtggtctgcgaaaaggctgctacatcggtggatgccttcaggatggtcaccgcaagccgatactatcctcaactgatgtcactggtcggtaatgtcctcaggtttctgcccgctttcgttagaatgaaacagctgatctcggaacattacgtgggagctgtgatgatctgtgatgcccggatttactcaggtagccttttgagcccctcatatggttggatttgcgatgagttgatgggaggaggaggccttcataccatgggaacctacattgttgatctgctcactcatctcacggggagacgtgcagagaaggttcacgggctgttgaagacatttgtcagacagaacgcagcgattagggggattaggcacgtgacaagtgacgatttctgcttcttccagatgttgatgggcggaggcgtctgtagcacagtcaccctcaacttcaacatgccaggcgcttttgtgcacgaggtcatggtggtgggatcagctggccgcttagtagcgaggggagccgacctctatgggcagaagaattcagctactcaggaggagctcctattgcgagattcgttggccgtgggggctggtctgcctgagcaagggccacaggacgtgccgttactgtaccttaaagggatggtctacatggttcaggccctgcgccagtctttccaggggcagggggatagacggacgtgggacagaacacccgtgagcatggccgcctcttttgaggatggactgtatatgcaatccgtggttgatgcgataaagcgtagctcacggtcgggcgagtgggaggccgtcgaagtgctcaccgaagaacccgacaccaaccaaaacctctgtgaggctttacaaagaaataatctctag

SEQ ID NO: 8626 - DNA, 1470 bp, synthetic construct
  misc_feature 1..1470: note = source = /note="Description of Artificial Sequence: Synthetic coding sequence"
  source 1..1470: mol_type = other DNA
atgcccgtgaccttcgccctgctgctgctgctgggccaggccaccgcagatccctgctatgacccacaaggacgccctcaattctgtctgcctcctgtgacccagttagctgctgtggctgcatcctgcccccaggcttgcgccctgagtcccggtaatcatctgggagcccgcgagacatgcaatgggtcgctgacactagctctgggaggcccctttttgctgacatcagttagcttacgcttttgcacccctggtccccccgccttgatactgagcgctgcctgggcctccggaggaccttggcgcctcttgtggcaccggccagcttggcctggcgctctgggaggcccagaacgtgtgaccttccacagcacacctggtccaaaggccaccgtggctgcctcacacctgcgggtcgagttcgggggccaagctggcctggccgccgctggtctgcgagggcggtgccagtgccacggccacgcggccaggtgcgcggccagggcgagaccgcctcgatgccactgtagacaccacaccaccggccccgggtgtgagagttgccggccctcccaccgcgattggccgtggaggcccgcaactccccgacacccccatccctgcctcccatgctcgtgcaaccagcacgctcgcagatgtcgattcaattccgaactgttcagactctctgggggccgatccgggggggtgtgtgaaaggtgtaggcatcacaccgctggcaggcattgccattattgccaaccaggcttttggcgcgatcccagtcagcccatattcagtcgccgtgcatgtcgggcatgccagtgccacccaattggtgctacgggcgggacttgtaatcagacttcgggccagtgcacatgtaagctaggtgtgactggtttaacttgcaacagatgcggccccggttatcagcagtcacgtagccctagaatgccatgccagagaatccctgaagctacaactactctggctacaactcctggcgcttactcttcagacccacaatgtcagaactactgcaatatgtctgacacaagagtgcacatgagtctgagacgttattgccaacaggaccacgtgcttagggcacaagttctcgcaagcgaggccgcgggtcccgcatggcagcgccttgctgtgcgagtgctggctgtctataaacagagagctcagcccgtgcggcgcggagatcaggacgcttgggtcccacgggcagacttaacctgtggttgcctccggctgcagcctggcacagattatctcttgcttggtagcgccgtgggcgatcctgacccaacaaggctaatcctggacaggcacggccttgcactcccttggcgccctcggtgggccaggccccttaagagactacagcaagaggaaagggccgggggctgtcgcggggtccgggcacccactccctcccctaggcctgaacattag

SEQ ID NO: 8627 - DNA, 8430 bp, synthetic construct
  misc_feature 1..8430: note = source = /note="Description of Artificial Sequence: Synthetic coding sequence"
  source 1..8430: mol_type = other DNA
atgaccctggagggcctgtacctggcccggggccccctggcccggctcttactcgcttggtctgcattgttgtgcatggctggggggcagggtcgctgggacggagcgctggaggcggcaggtccagggcgggtcagaaggcgaggtagtcctgggattttgcaaggaccaaacgtgtgtgggtccaggttccacgcgtactgttgtcctggctggagaaccttccctgggcgcagccaatgcgtcgtgccgatttgcagacgggcgtgcggggagggcttttgttcacaacccaatctgtgcacctgcgccgacggaaccctcgctcccagctgcggtgtgtcccggggcagtggctgttcagtgagttgcatgaatggtggtacctgccgcggggcatcttgtctatgccagaagggatacaccggcactgtatgtggtcagccaatttgcgaccgtggctgtcacaacggagggaggtgtatcggccccaatcggtgtgcgtgcgtgtacgggttcatggggccccaatgtgaacgcgattatagaacaggtccctgttttggccaagtaggaccagaagggtgccagcaccagctgaccggactggtgtgcactaaggcactgtgttgtgccaccgtcggtcgcgcctggggactgccgtgcgaactgtgtccggcacagccacacccctgcagacgcggatttatccctaacatacacaccggcgcttgtcaggatgtagatgagtgccaggccgtccctggactttgccaggggggctcgtgcgttaatatggtcggttcatttcattgtaggtgccctgttggacatcgtttgtctgactcgagtgctgcatgcgaggactatcgagctggcgcttgcttttccgttctgttcggcgggaggtgtgcaggggacctagccggtcactatactagacgccagtgctgctgcgatcgcggacgctgttgggctgctgggccagttcccgagctgtgtccccccaggggatctaacgaatttcagcagctctgcgcgcagagactaccgctcctgccaggccacccagggttgtttcctggactgcttggcttcggctccaatggtatgggccccccgctcggaccagctcgccttaatcctcacgggtccgatgcacgaggcatcccttcactcgggcccgggaatagtaacatcggaactgctacactaaaccagacaatcgacatatgtagacactttactaacctctgtctgaacggacggtgcctgccaaccccttcttcctatcggtgcgaatgtaatgttggatatactcaggatgttagaggtgaatgcatcgacgtggacgaatgcacctccagcccttgccaccatggcgattgcgtgaatatccctggaacctatcactgcagatgttatccgggattccaagctacgccgaccaggcaggcttgcgtggacgtggacgaatgcattgtcagtggtggtctttgtcacctcggacgatgtgtgaacacagaggggagttttcagtgtgtctgcaacgctggattcgagttgtcaccggatggaaagaactgcgtagaccacaacgaatgtgctacgtcaaccatgtgcgttaatggcgtttgtctcaacgaagacgggtccttctcgtgtctgtgcaagcctggctttctattggctcctggaggccattattgcatggatatagatgagtgccaaaccccagggatctgtgttaatgggcactgtaccaacaccgaggggtctttccggtgccagtgcctggggggcctagccgtgggaactgatgggcgagtctgtgtggatacacacgtacgatcaacttgctatggagccattgaaaagggctcatgtgcacgccccttccctggaaccgtgaccaagtctgagtgttgctgtgccaaccccgaccatgggttcggagaaccttgtcaattatgtccagctaaagactctgcggagtttcaggctctttgctcatcaggactgggaattacaacagatggcagagacatcaacgaatgtgcactggatcctgaggtttgtgccaacggagtttgcgagaacctgcgtggttcctataggtgtgtgtgcaatttaggctatgaagcaggtgcgtcaggtaaggactgcaccgacgtcgacgagtgcgctctgaacagcctgctgtgtgacaacggttggtgccaaaactctcctggttcttactcctgtagttgcccacccggctttcatttctggcaggatacagaaatctgcaaggatgtagatgaatgcctctcctcaccctgtgtctccggagtctgcagaaacctcgcaggctcctacacctgcaagtgtgggcctgggtcgaggctcgatccctcaggtacattctgccttgattctaccaaggggacttgttggctaaaaattcaggaaagcagatgcgaggtcaaccttcaaggtgcctccctgaggtccgagtgctgtgctacactgggggctgcttgggggtctccctgcgaacggtgtgagatcgatcctgcctgcgccaggggtttcgcacggatgactggtgtgacttgcgatgacgtgaatgagtgcgaatcctttccaggagtgtgtccgaatgggaggtgtgtgaacacagccggctcatttcgctgcgaatgcccggagggactgatgctcgacgcgtcgggtcgcctttgcgtggacgtgagattggaaccatgctttctccgttgggacgaggacgagtgcggggtcacactgcctggcaaatatcgaatggatgtctgctgctgttccatcggagccgtgtggggggtcgaatgcgaagcgtgcccagatccggaaagcctcgagttcgcatcactgtgcccccggggtttagggttcgcatcaagagacttcctgtcggggagacccttttacaaagacgttaacgagtgtaaagtgtttccggggctgtgtacacacggaacctgtcgcaacactgtagggagtttccactgtgcttgcgctggcgggttcgccttggatgcgcaggagagaaactgcaccgatatcgacgaatgccgcatttcccctgacctgtgtggccaaggcacatgcgtgaatactcctggcagctttgaatgtgagtgcttcccagggtacgaatctggtttcatgctgatgaagaactgtatggatgtcgacgagtgcgcccgcgaccctttattgtgcagaggaggcacttgtactaatacggatggatcatataaatgtcagtgcccacccggccatgaacttactgctaaaggaaccgcgtgcgaggatatcgacgagtgcagtctgtcggacggcctctgtccgcatggccaatgtgttaatgtgattggagcatttcagtgtagctgtcacgccggatttcagtctacccccgaccgccagggttgcgtggatatcaatgaatgccgggttcagaacggtgggtgtgatgtccactgcatcaacacggagggatcctataggtgcagctgcggccagggttattctctgatgcctgacggacgggcttgtgccgacgttgacgaatgtgaggaaaatccacgagtatgtgaccaggggcattgcactaatatgcccggcggccaccgctgcttatgttatgacggcttcatggccactcccgacatgcgcacctgtgtggacgtggacgagtgtgacctgaatcctcatatttgcctgcacggagattgtgagaatacgaaaggtagtttcgtctgccattgccagctaggttacatggtgcgtaagggcgccaccggttgcagcgacgtcgatgaatgcgaggtgggggggcacaattgtgactctcatgcaagctgcctaaatattccaggctctttcagctgccgatgtctacctggatgggtgggcgacgggttcgaatgtcatgacctcgatgaatgcgtgtcgcaggagcataggtgtagcccacggggagactgcctgaatgtgccggggtcctataggtgcacctgccggcagggctttgcaggcgacgggttcttttgcgaggatcgcgacgagtgtgcagaaaacgtcgacttgtgtgacaatggacagtgcttaaacgccccggggggatatcgatgcgagtgcgaaatggggttcgacccaaccgaggaccatcgcgcttgtcaggatgtagatgagtgcgcccagggtaacctgtgcgccttcggttcttgcgagaatctccccggcatgttcaggtgtatatgtaacgggggttatgaactggatagggggggagggaactgtaccgacattaatgagtgtgcagatccggtgaactgcatcaacggggtgtgcattaatacccctggttcttacctgtgcagctgcccccaggactttgagctgaaccccagtggggtcgggtgtgtcgacaccagggccggaaactgtttcctggaaacccacgacagaggggactctggaatatcctgctcagctgagatcggggtgggggtgactagggcctcctgctgctgttcactcgggcgagcatggggaaacccttgcgagctgtgccccatggcaaacacaacagagtaccgaacactttgccccggcggagagggctttcagcctaacagaatcacagtgatactggaagatattgacgaatgccaggagctccctggcctgtgccagggaggcgattgtgtcaatacgttcggttcctttcaatgcgagtgccctcccggctaccacctgagcgagcatacacgcatctgtgaggacattgacgagtgtagtactcactccggcatatgtggtccaggcacttgctataacaccttaggcaactacacctgcgtctgtcctgcggagtacctgcaggtaaacggagggaacaattgtatggatatgcggaaatctgtctgttttcgacattacaatggtacttgtcagaatgaactggccttcaatgttacacgaaaaatgtgctgttgctcttacaatatcggacaggcgtggaatcgtccatgcgaagcttgcccgacccctatcagcccggactatcagatcctctgcggcaaccaggcaccaggcttcctgactgacatccataccggcaaacccctggatattgatgaatgtggggagatccccgctatctgtgctaacggtatttgcataaaccagatcgggagtttccggtgtgagtgccccgcaggttttaattataactccatcctactggcttgcgaagatgtcgatgagtgcggcagtagggagagcccatgtcagcagaacgcagactgcattaacatccctggcagctatcgttgtaaatgtaccagaggatataagctctccccggggggagcctgtgtggggaggaacgagtgtcgggaaatccctaatgtttgcagtcacggtgactgtatggacacagaaggcagctatatgtgcctgtgccacagagggttccaggccagtgccgaccagacgctgtgtatggacattgatgaatgtgaccggcagccttgcggcaatgggacctgtaagaacatcattggttcgtacaactgtttgtgttttccaggcttcgtcgtcactcataatggggactgtgtggattttgacgagtgcacaaccctggtgggccaggtgtgtagatttggtcactgtctaaacaccgccgggtccttccactgtctgtgtcaggatggatttgagcttactgccgatggcaagaactgcgttgatactaatgagtgtctgagtcttgccggaacctgcctacccggaacatgtcagaatctggaaggttccttccgctgtatatgtccccctggattccaggttcaatcagatcactgtatcgatatcgacgaatgtagtgaagagccaaatctctgcctcttcgggacctgcactaactccccaggctcctttcagtgcctttgtccacccggttttgttttatccgataatggccaccgctgctttgatacaagacagtctttttgctttactcgatttgaggccgggaagtgcagcgttccaaaagcctttaatacgactaagacacgttgctgttgctcgaaacggcctggggagggatggggcgacccttgtgagttgtgtccccaagagggaagtgctgccttccaggaactttgcccgttcgggcacggggccgtccccgggcctgatgactctcgggaggatgttaacgagtgcgcagaaaatccaggcgtttgcactaacggagtgtgtgtaaacacagacggaagtttcaggtgcgagtgcccctttgggtattccctcgattttacagggatcaactgcgtcgacaccgacgagtgctccgtgggccacccctgcgggcaaggcacatgcactaatgtgatcgggggattcgagtgcgcctgcgcagacgggtttgaacccggcctgatgatgacctgcgaggacattgatgaatgctcgcttaaccctctgctgtgcgcctttcgctgccacaataccgaggggtcttatttgtgcacttgtcccgctgggtacaccttacgggaggacggagccatgtgccgggacgtggacgaatgcgctgatggccagcaagactgccatgcccgaggcatggaatgtaaaaacctgataggcacttttgcttgcgtctgtccgcccggaatgcgtcctctgccagggagtggcgagggatgcacagacgacaacgagtgccacgcacaacctgatctttgcgttaacggccgctgcgttaatactgccggaagtttccggtgtgattgcgatgaagggttccagccctccccgaccctcacggaatgtcatgacatccgccagggcccctgtttcgccgaggtgctacagacaatgtgccgttcactatcttcctcatctgaggccgtcaccagagccgaatgttgctgcggaggcggaagagggtggggtcccaggtgtgaactatgccccctccccggtacttccgcctaccgaaagttgtgtcctcacggctctggatacaccgccgagggaagggatgtggatgaatgtagaatgctggctcatctctgcgctcacggcgagtgtattaactcactcggatcattccgatgtcactgccaggccggatataccccagatgcgacggcaaccacatgcctggatatggatgagtgctcacaggtgcccaagccctgcacatttctgtgtaagaacaccaaaggctccttcttgtgctcatgtccccggggctacctgctcgaggaagatggacggacctgcaaagaccttgacgagtgtacttctaggcaacataattgccaatttttatgcgtcaacaccgtcggcgctttcacatgcagatgtccaccaggattcacccagcaccaccaggcatgttttgataacgacgagtgttcagctcagcccggtccctgtggagcccatggccactgccacaataccccaggatcattccggtgcgaatgtcaccagggtttcacacttgtcagctccggacatggttgtgaagacgtgaatgaatgtgacggaccccaccgttgtcaacacggatgccagaaccagctgggagggtatagatgctcgtgcccccaggggttcacacagcactctcagtgggcccagtgcgtggatgagaatgaatgcgccctgtcccctccgacctgcggttccgcatcctgccggaacacactcgggggattcagatgcgtctgtccctcgggattcgattttgaccaggcactcggtggttgccaggaagtggacgaatgcgcaggacgaagggggccttgtagctattcgtgcgccaacacacccggaggcttcctgtgcggctgtccgcaaggatattttagagccggccaagggcattgcgtgtcagggcttgggttcagccccggcccacaagatacccccgacaaagaggagctgcttagtagcgaagcttgctatgaatgtaagattaatggtctttccccgcgcgataggcccagacgcagcgcacacagggaccatcaggtaaacctggctacactcgattccgaggccctgttaacgcttgggctcaacctgtcccacctgggcagagccgagagaatcctcgagctacgtccagccctcgaaggcctggaagggcgcattcggtacgtcatcgtccgggggaatgaacaggggtttttcagaatgcaccacctgcggggggtgtccagtctgcagcttgggagaagacggcctggtcctggtacctatcgtctcgaggtggtaagccatatggcaggcccttggggagtgcagccggaaggccagccgggtccctggggccaggccctgagacttaaggtgcagctgcagctactttag

SEQ ID NO: 8628 - DNA, 303 bp, synthetic construct
  misc_feature 1..303: note = source = /note="Description of Artificial Sequence: Synthetic coding sequence"
  source 1..303: mol_type = other DNA
atggagacccggcaggtgagccggagcccccgggtgcggctgctgctgttacttctgctcctcctggtcgtgccttggggcgttcgcacagcctcaggcgtggccttacccccggtaggggtgctgagcttgagacctcctggaagggcctgggctgatccagctacaccaagaccacggcggagcctggcactagctgacgacgccgcattcagagagagagcacgcttacttgcggctctggaaaggcggcactggttaaactcttatatgcacaagttactggtgctagacgccccttag

SEQ ID NO: 8629 - DNA, 1404 bp, synthetic construct
  misc_feature 1..1404: note = source = /note="Description of Artificial Sequence: Synthetic coding sequence"
  source 1..1404: mol_type = other DNA
atgtggcggtgccccctgggcctgctgctgctgctgcccctggccggacatcttgcgttaggggcccagcaggggagagggcggcgggaactggcgcccggcctccacctgcgcgggattcgagacgccggagggcgctattgccaggaacaggatctgtgctgtcgtggtagagccgatgactgcgccctaccttatctgggtgctatttgttactgtgatctgttctgtaatcgcacagtgagcgattgttgccccgatttttgggacttctgtctgggcgttcctccccctttcccccctattcagggttgtatgcatggaggccgaatctatcccgtactgggaacctattgggataactgcaaccgctgtacatgccaggaaaaccgacagtggcagtgcgatcaagagccatgtcttgttgatccagatatgattaaggccatcaatcagggaaattatggctggcaggccgggaaccactccgccttctggggcatgacactggacgaaggcatccgataccgattaggaactatacggccttccagcagtgtgatgaacatgcacgagatttatactgtcttaaacccaggggaggttttgcccacagccttcgaagcttctgaaaagtggccaaatctcattcatgaaccgttggaccaaggcaattgtgccggctcctgggcattctccaccgccgcagtggcgtctgacagggtttccattcactctttgggccacatgactccagtactgtctcctcagaatcttttaagttgtgatactcaccagcaacaggggtgccggggcggtcgcctggatggggcatggtggttcctcagacgacgcggtgtagtaagcgaccactgctacccattttctggtcgggagcgcgacgaagcggggcccgctcccccttgtatgatgcattctcgggctatgggaaggggaaaacgtcaagccaccgcgcactgccccaattcatacgtgaataacaatgatatttatcaagtgacacccgtgtatagactaggctctaacgacaaggagattatgaaggagctaatggagaatggcccggtgcaagctcttatggaagtccacgaggatttttttctatataagggagggatttacagccacacccctgtgagcctagggcgcccagagagatatagacggcatggtacacattccgtcaaaattactggatggggcgaggagacattgcctgacggaaggactcttaagtactggacagcagccaattcttggggaccagcatggggggagagagggcacttcaggattgtcagaggggtcaacgagtgcgatatagagtcctttgtactcggagtatggggccgggtgggaatggaggacatgggtcatcactag

SEQ ID NO: 8630 - DNA, 2205 bp, synthetic construct
  misc_feature 1..2205: note = source = /note="Description of Artificial Sequence: Synthetic coding sequence"
  source 1..2205: mol_type = other DNA
atgttctacgtgtgcagcagctgcgtgttcctgtgcggcagcaactttccaaacttcccttttcaggtggccagcgctaaatccgcccccgaaatccctactatcgatcaggcctattcaaagctgagcaactccatcactgtggaatgggccactgtgcctggcgccacatcttatcttttgacagcagaggacggagacacagtaattgaaacaactgtggcaaactcccccgggacggtgaccggtttgaaagccgcgacgtggtatgagattaccatccgatctatcagcgcagccggtagatctcaagcgtctcctcccaagcaagcaaagacagtgctggctgcgcccatcctggaagtttcttcaccttcttctgactccatcctggtgcaatgggaagccgtctacatggccattgcattctcggtgtctatcatgagggcgaatgggctgggatccatctggaaagaaaacaccactaacacttccctgacctttacatcactcgaggctggcacgctttacaccattaaagcctacgcatggaacgccaatagaattccgggagacgacagcacctgtaatcaaaggacatctccaagagcacctgctaatattcaggtctcctttgactctggggcccttaaagcctctttctcttgggccagggccgagggggcattcaactatacggtcatggctttaagtgattcttcggaactgacttgttctaccaccttttcgagctgcaccataagcagtctacagtgtggcaccgagtaccttatttccgtccttgcctcaaatgatgccggaagcagcaaatcatcctctgcaatgacacttaagaccgtcgcatgtgcgcccggccgcgtgacaatacaggaagatccacccggacatctgagcgtagcctggagctctgtcgatcttggggactactatgtagtgttcgtaaagtcagacgatggtctagaagtccactgtaataccagtttaacacaatgcaactttctgtcagagtgtggcttcacttatttcatctcagtttttgtgtataataaggcaggccagtctcccctgggggatatcttcaactatacaaccgccccctgctgcccgagcgacattaacccggttctggtgtcctccgaccgcgttgaaattgtctggtcacctgtgaggggagccgagctctacgaaacaaaagcggtggatgggtacaatatggttgagtgtaatgacaccacccccgcgtgcacgctcagcgctctcgaatgcgacacaaaatataacatcacagtgtactccttcaatgaggtccgcggatctaatatgtcatgcactcctcaatttatcactactgcaccctgctctcccgagataaagaatgtgtctagggatgctttctcaatgattaacgtacattggaggtctaccaacgatgacgctacatatacagttacagctcaaggtgagaaaggtctttatcaatgtagctccacaggggagagctgcaccatgagagggttgccctgtggttcagtttttagcgttactgcagtggccgaaactcaggccgggcgttctcttccatcttactcagtacccctcgagaccgtcccatgctgtccaacaggattgaccgtgactcagattacccagtcagtcatcaacgttagctggaccataggaagggtggcgcagacccatgtcgctgttctagagtcccacaccggacagtccaagtgtcatacccatcagaatcattgtctcctggggtgcattacttgcggcatcaactatactgtaaccctcaaggcaatctcagccaccgggctgaccgccgattgtagctaccagtcatacttctcgggtgcatgctgcccgttgggcgttaagctttaccggctaggacccaatgggattcgcatctactggcaggccagtcgcgggtccgccaattatagcacagatctgtacggttcaaagggcatctttacatgtacgccatcagccgggctatcattttgcgatgttacagagataccatgcggcgacgtgtatactgtgatggtgtcccccgttgctaagacaggtctgaagctgacattctgcccaaaaaaaatttatagcgtaacatgctcgggatccaccttggggatggtcatctacaggggtaagcgaaacgaggagtag

SEQ ID NO: 8631 - DNA, 1098 bp, synthetic construct
  misc_feature 1..1098: note = source = /note="Description of Artificial Sequence: Synthetic coding sequence"
  source 1..1098: mol_type = other DNA
atgctggacggcagccccctggcccggtggctggccgccgccttcgggctgacactcctgctcgcggctttacgcccctccgccgcctattttggcctcaccggctcagaaccattaacgattttgcccctcaccttagaacctgaggccgcagcccaggctcattataaggcctgtgataggttaaagctggagaggaagcaaaggcgcatgtgccgtcgggacccaggagtcgctgaaactttagtggaggctgtttctatgtctgcattagagtgccagttccagtttcggtttgagcgctggaattgcactttggagggccgctaccgagcatcactgctgaagaggggtttcaaggaaacagccttcctttatgcaataagcagcgctggtctgacccatgcgcttgccaaggcctgcagtgccggccgtatggaaaggtgcacgtgtgatgaagcccccgatctggagaatcgcgaagcgtggcaatggggaggttgcggtgataacttaaaatactcctccaagttcgtcaaggagtttctcgggcgccgtagttcaaaagatcttagggccagggtcgactttcataataaccttgttggtgtcaaggttattaaagctggggtcgaaacaacatgtaagtgccacggcgtctcggggtcttgtactgtgcgtacatgctggcggcagctggctcctttccacgaggtggggaaacatcttaagcacaaatatgaaacagctctaaaagttggttctaccactaatgaagcagcgggagaggccggggccatttcccctcctcgaggaagagcatctggtgcaggtggatccgaccccctccctcggacaccggaactcgtgcacctggatgactcaccctccttctgtttggctgggcgcttttctccaggtacagccgggcggcgatgtcatcgtgagaaaaattgcgagtccatatgctgtggcaggggtcataacacccagagtagggtggtaacacgcccctgccagtgccaggtccgttggtgttgctacgtggagtgcagacagtgtacgcaaagggaggaagtgtacacctgtaaggggtag

SEQ ID NO: 8632 - DNA, 795 bp, synthetic construct
  misc_feature 1..795: note = source = /note="Description of Artificial Sequence: Synthetic coding sequence"
  source 1..795: mol_type = other DNA
atgcggctgcggcccctgcccctggtggtggtgcccggcctgctgcagcttctgttctgtgattctaaggaggtcgtgcacgccacagagggtctcgactgggaggataaggatgctccagggaccctggttggaaacgtcgtccattctcgaatcatatccccactccggctgtttgtgaaacagagccctgtgcctaagccgggtccaatggcctacgctgacagtatggagaacttttgggattggcttgctaacataacagagattcaggagcctctggcccgtaccaagcgtcgtcccatcgtgaagacgggaaagtttaaaaaaatgttcggttggggcgatttccactctaacataaagaccgtgaaactgaatcttttgattactggcaaaattgtcgatcatggaaatggaaccttcagtgtctatttcagacacaacagcaccggtctcggaaatgtgtctgtatccctggtgcccccttccaaggtggttgaatttgaggtctcaccccagtctacgcttgagacaaaagagagcaaaagcttcaattgcaggatagaatacgaaaaaactgaccgggcaaaaaaaacggcgctgtgcaatttcgacccatctaagatctgttatcaggagcagactcagagccatgttagctggttgtgcagcaagccattcaaagtcatctgcatttacattgcattctacagtgtggattataagttggtgcagaaggtgtgccccgactacaactaccacagtgagaccccttacttaagtagtggatag

SEQ ID NO: 8633 - DNA, 1125 bp, synthetic construct
  misc_feature 1..1125: note = source = /note="Description of Artificial Sequence: Synthetic coding sequence"
  source 1..1125: mol_type = other DNA
atgaagcccctgctggagaccctgtacctgctgggcatgctggtgcctggcggcctgggttacgatagaagcctggcgcagcaccgccaggaaatcgtggataaaagcgtctctccctggtccctcgaaacatacagctataacatttaccatccaatgggggaaatttacgaatggatgagggagatttctgagaagtataaagaagtcgtgactcagcactttttgggggttacttacgagacccaccctatgtactacctgaagattagtcagccatctggaaatccaaagaaaatcatctggatggattgcggaatccatgctcgggaatggatagcacctgcattctgccagtggtttgtgaaggaaatcctgcaaaatcacaaggataatagctctattcggaaattgctgagaaatttggatttctacgtcctgcccgtgctcaacatcgacggatacatctacacttggaccacggatcggttgtggcgcaagtctagatcccctcacaacaacgggacatgcttcgggacagatctgaacaggaacttcaacgcaagctggtgctcaattggggcttcacgcaactgccaggaccagacattttgcggtaccgggcctgtgtccgaacccgagacaaaagccgtggccagctttattgaatctaaaaaggatgacatactgtgtttcctgactatgcactcttatggccagctgatcctgactccttatggatataccaagaacaaaagttctaatcacccagaaatgattcaggtgggccagaaggccgctaatgcacttaaggcaaagtatggaacaaactatcgggtgggatcttcggcagatatcctatatgcctcttctggctctagcagagattgggcgcgtgatatcggtatacccttcagttacacattcgagcttagggattctggtacttatgggttcgtgttacctgaggcacaaatccaacccacctgcgaggagacaatggaggctgtgctctccgtgttggacgatgtttatgctaaacattggcacagcgatagtgcaggtcgcgtcacatcagccacaatgctgttgggactgttggtgagctgtatgagtttgctgtag

SEQ ID NO: 8634 - DNA, 1728 bp, synthetic construct
  misc_feature 1..1728: note = source = /note="Description of Artificial Sequence: Synthetic coding sequence"
  source 1..1728: mol_type = other DNA
atggccagctggctgcggcggaagctgcggggcaagcggcggcccgtcattgcattctgtctcctcatgatcctgagtgctatggctgtaactaggtttccacctcaaaggccttccgctggacctgatcccggacctatggaaccccagggtgtgacaggcgcccctgcgacacatatcagacaggctctttcctctagtcggagacagagggcaaggaacatgggcttttggcgctctagggccttaccccgcaactccatccttgtatgtgctgaagagcaagggcacagggcaagggttgatcggtcgagagaatccccaggaggtgatcttcgccaccctggcagggttaggcgcgacatcacactgagcgggcatccacgacttagcactcagcacgtggtgttgttgagagaagacgaggttggcgatcctggaacgaaggatctcggccatccccagcacgggtcacctattcaggagactcagtcggaggtggtcacactggtgagtccgttaccagggtcggacatggctgccctacctgcatggagagccaccagcggcctgacactctggccacataccgctgagggccgggacctgcttggtgccgaaaatcgagcactgacagggggacaacaagcagaagacccaacgctggccagcggcgcccatcagtggccagggagtgtcgagaagctgcaaggctcagtgtggtgcgatgcagagacgctgttgtcatccagtcgtactggcggccaagcgccaccctggttgacagatcacgacgttcaaatgctacgtttacttgctcagggagaagtagtggacaaagcacgtgtgcccgcgcatggccaggtccttcaggtcgggttttcaaccgaggcagccctgcaagacttgtcctctccaagacttagccagctatgttcccaagggctatgtgggttaatcaagcgtcctggcgacctgccggaggtgctgtctttccatgtcgacagggtgctgggtctgcggcggagtttgcccgcagtggctaggcgattccatagtccattgctgccttataggtacaccgatggaggggccaggcccgttatatggtgggcacctgacgtccagcatctatccgacccagacgaggatcagaacagccttgccctcggatggctccagtaccaagccctcctggcccatagctgcaactggcctgggcaagccccttgtcctggcattcaccataccgaatgggctagattagcactgttcgatttcctactgcaggtgcacgatcggcttgatcgatattgttgtggattcgagccagaacctagtgatccctgtgtcgaagagcgtttacgagaaaaatgtcagaatcctgccgaactgcgcctagtccatattctggtacggagctcggatccttcacacctggtgtatatcgataacgccggtaatctacagcatcccgaggataagcttaacttcagactgctggaaggcatcgacggattccctgagagcgctgtaaaggttctcgcatcgggctgcctgcagaatatgctgcttaaaagcttgcaaatggatccggttttctgggagtcccaagggggtgcccagggactgaagcaggtgctgcaaacgctcgagcaaaggggtcaggtgctgctcggtcatattcaaaagcacaatctcacactgttcagagatgaggacccatag

SEQ ID NO: 8635 - DNA, 1680 bp, synthetic construct
  misc_feature 1..1680: note = source = /note="Description of Artificial Sequence: Synthetic coding sequence"
  source 1..1680: mol_type = other DNA
atgtggaccaacttcttcaagctgcggctgttctgctgcctgctggctgtgctgatggttgttgtgcttgtgataaacgtgacgcaggtagagtacctggaccacgagacagtttccgcgacattcatagattcatccggccagttcgtctctagtcaggtgactggaatcagcaggaacccatactgtgggtacgatcaacaaaccctatctagccaagagaggatggaagaggactctttattggccgcgctgcatcgacaggtaccagatgtagggccagtcccattcgtgaaatcaactgacccttcatcctcctacttcgtgattctcaattccgccgccttttttaaagttggaagccagcttgaagtgctcgtgcacgtccaggacttccagcgcaagcccaaaaaatacggaggcgactaccttcaggcccgaatccattcactgaaactccaggccggcgctgtgggtcgcgtggtcgactaccaaaatggattttataaggttttctttacccttctgtggcctggaaaggtcaaagtaagcgttagcctcgttcacccatctgaagggataagagtgctgcagcgtctgcaggaggataagccggatcgtgtctatttcaagagcctttttcggtccgggcgcattagtgagacaacagaatgcaacgtttgtctcccgggaaatcttcccttgtgtaatttcacagacctatatacaggagagccgtggttttgctttaaaccgaagaaattgccctgcagcagcaggatcacacactttaagggtggctacctgaagggtttgcttaccgccgccgaaagtgcgttctttcagtccggtgtgaatattaagatgccagtaaattcttccggtcctgattgggtaactgtgattccaagacgcattaaagagaccaactctctggaactgagtcaaggaagtggcactttcccttccggttattattataaggatcagtggaggcctcgcaagttcaagatgagacaattcaacgaccctgataacatcacggagtgtctccagcggaaggtggtacacctgttcggagattctacaattagacaatggtttgagtatctgaccacatttgtgcctgacctagttgagttcaacctcggctctcccaaaaatgtgggcccttttctcgccgtggatcaaaagcacaatatacttttgaagtatcgctgccacggacctcccatccgcttcactaccgtcttttcaaatgagttgcattacgtcgcgaacgagctgaatggaattgtgggggggaagaataccgtggtggcaattgccgtatggtctcatttcagcactttccccctggaggtttacatccgtcggttgcgaaatataaggagggctgtggtgcgccttctcgatagatccccaaagacagtcgttgtaatccgaaccgcaaatgcacaggaactgggaccggaagttagcttatttaacagcgactggtataactttcagctggacaccattctgcggaggatgtttagcggtgttggcgtctaccttgttgacgcctgggagatgacactcgctcattacctacctcacaagctccaccctgacgaggtaattgtgaaaaatcagcttgacatgtttctctcatttgtttgccctttagagacttag

SEQ ID NO: 8636 - DNA, 3624 bp, synthetic construct
  misc_feature 1..3624: note = source = /note="Description of Artificial Sequence: Synthetic coding sequence"
  source 1..3624: mol_type = other DNA
atgcggctgacccacatctgctgctgctgcctgctgtaccagctgggattcctttctaacgggatcgtgagcgagctgcagtttgcaccggatagggaagagtgggaagtggtgtttcctgccctttggaggcgagagccagtcgaccctgctggtggaagcgggggctctgctgacccaggctgggtgcgcggggtgggagggggcggaagcgctagagcgcaggccgccggcagctcacgtgaagtgagatcagtggcccccgtgcccctagaagagcccgtggaaggcagatcagaatctcggttacgccctcccccccctagcgagggggaggaagatgaggaactagaatcccaggaattgccacggggatcctccggggccgcggccctatcccctggggcaccagcttcatggcaacccccaccacccccacagcctccgccctccccaccacccgcacagcatgccgaacccgacggggacgaagtcctgctgagaatcccggccttcagccgagacctttacctactgctcagaagagacggaaggttcctggcgccccgtttcgccgtcgaacagcggccaaatccagggccaggtcctaccggtgccgctagtgcaccacagcctcccgctcccccagacgccgggtgtttctataccggcgctgtccttcggcacccgggatctctagcgtccttcagtacatgcggtggtggtctcatgggtttcatccagctgaatgaagattttattttcatcgaacccttgaatgacaccatggcaatcacggggcatcctcatcgggtttacagacagaagagaagtatggaagaaaaggtcacagaaaaaagcgcgctgcattcccactattgtgggatcatatctgataagggccgcccacggtctcgcaagatcgctgaatccggacgcgggaaaaggtatagctacaaattgccgcaagagtataacatcgagacagtagtggttgcagaccccgctatggtatcctaccacggagctgacgctgcaaggcgttttattttaactatcctaaacatggtcttcaatctatttcagcacaagtccctcagtgtccaggtcaatctccgagtgatcaagttaattctgctgcacgagaccccacccgaactctatattggtcatcatggcgagaaaatgctggagagcttctgtaaatggcagcacgaggaattcggcaagaagaacgacattcatttggaaatgtctacgaattggggggaggatatgacctccgtggatgcggctatcctgattactcggaaagatttctgcgtgcataaagatgagccatgcgacaccgtcggaatcgcatatctaagtggaatgtgtagtgaaaagcgcaaatgcatcatcgccgaagacaacggattaaatctcgcctttaccattgcccatgaaatggggcacaacatgggaatcaaccatgacaatgaccatccttcctgcgctgatgggttgcacatcatgtctggtgaatggatcaaaggacagaatttaggggacgtgagctggtcccggtgctccaaagaagaccttgagcgttttcttcggtccaaagcttccaattgcctgctgcagaccaatcctcagtcagtaaattctgttatggtgccgtccaagctccccggcatgacttataccgccgacgagcaatgtcagattctctttggcccgctcgcgtctttctgccaggaaatgcagcatgttatttgcacggggctgtggtgtaaggtggaaggcgagaaggagtgccgtacaaaactcgatccccctatggatgggaccgattgtgacctcggaaagtggtgtaaggctggtgaatgtacaagccgaacatcagccccagaacatttggctggtgagtggagcctctggagcccatgcagcagaacctgttcggctggtatttcttcaagagaaagaaagtgcccaggcctagactcagaggcccgggactgcaatggcccccggaagcagtataggatctgtgaaaaccctccgtgccccgcaggcctccctggatttcgggattggcaatgccaagcctactcagtacgcactagcagtccaaaacacatcctgcagtggcaggccgtgttggacgaggaaaaaccctgtgctctattttgctcacccgtaggtaaagagcagccaattctgctcagcgagaaagtcatggatggcacctcttgtggttaccagggactggatatttgcgccaacggtagatgtcagaaagtcggttgcgacggcctgctgggtagcctcgcgagagaggaccactgtggggtttgtaacggaaatggaaaaagttgcaagattataaagggtgacttcaatcatacaagaggagccggttatgtggaggttttggtgatccctgcaggggcccggaggatcaaagtggtcgaggagaagcctgcccattcctacctagccctgagagatgcaggaaaacagagcattaactccgactggaaaatagaacacagtggtgcatttaacctggccgggaccacagttcattatgtgcgaagagggctatgggagaaaatctccgccaagggtcctaccacagccccccttcatctcctcgtgctgcttttccaggaccagaattatggtctccactatgagtacactattccttctgaccccctgccagaaaaccaatctagcaaggcaccggaacccctgtttatgtggacccacacgtcctgggaggattgtgatgcaacgtgtggaggcggggagcgaaagaccacagtgtcctgcacaaaaattatgagtaagaatataagcattgtggataatgaaaaatgtaagtacctgacaaaacccgagccccagatccgcaagtgcaacgaacagccctgccagacgcgttggatgatgacagaatggactccttgtagcaggacatgtggtaaaggtatgcagagtagacaggttgcctgtacgcagcaactgtccaacggcaccttaattagagcccgggagcgcgactgtatcggacctaaacctgccagcgctcagaggtgcgaaggccaagactgtatgactgtatgggaggccggcgtctggtcagaatgttccgtaaaatgcgggaagggcattcggcacaggacggtgaggtgcactaatcctcgcaagaagtgcgttctgtccacgcgcccacgagaagccgaggactgcgaggactacagtaagtgctacgtttggcgcatgggtgactggtccaaatgctccatcacttgtggcaaggggatgcagtccagagttattcagtgtatgcacaagataacaggtcgacatggaaatgagtgcttctcaagcgaaaagccggccgcctaccggccctgtcacctccagccctgtaatgagaagattaacgttaatactatcacaagcccacgactggccgctctgacttttaaatgcttgggagatcaatggcccgtatactgtagggttattagggaaaagaatctttgtcaggacatgaggtggtaccagaggtgctgtgaaacttgcagggacttttacgcacagaagctccagcagaaatcctag

SEQ ID NO: 8637 - DNA, 258 bp, synthetic construct
  misc_feature 1..258: note = source = /note="Description of Artificial Sequence: Synthetic coding sequence"
  source 1..258: mol_type = other DNA
atgaagatcaccggcggcctgctgctgctgtgcaccgtggtgtacttctgctccagcagcgaagccgcctccttgtcgcctaagaaggtagattgtagtatctacaagaagtatcccgtcgtggctatcccgtgtccaatcacctacctgcctgtctgtggctcagactacataacctatggtaatgagtgccacctgtgcaccgagagtctgaaatctaacgggagggttcagttcctccacgatggttcctgttag

SEQ ID NO: 8638 - DNA, 2982 bp, synthetic construct
  misc_feature 1..2982: note = source = /note="Description of Artificial Sequence: Synthetic coding sequence"
  source 1..2982: mol_type = other DNA
atgggcagcggccgggtgcccggcctgtgcctgctggtgctgctggtgcatgcccgggcagctcagtattcaaaggccgcacaggatgtagacgagtgtgtcgaaggaacagacaactgccacattgatgctatctgccagaacactccacgcagctacaaatgcatttgtaagagtggttacacgggagacggtaagcactgtaaggatgtggatgaatgtgaaagagaggacaacgcgggatgcgtccacgattgtgtcaatatacccggtaattacagatgcacttgctacgatggatttcacctagctcacgacggacataattgtctggatgtggacgaatgtgcagagggcaatggcggttgccaacagtcgtgtgtaaatatgatgggcagctacgagtgtcattgtcgcgaaggtttttttttgtcggacaaccagcacacctgcatccagcgccctgaagaaggtatgaactgtatgaataagaatcacggttgtgcacacatctgccgggaaactccaaagggcggcatcgcttgcgaatgccgacccggtttcgagttgactaaaaatcaaagggattgtaaattgacttgcaactacggtaacggcggatgtcagcatacctgtgatgacaccgagcagggcccaaggtgcggctgccacataaagtttgtcttgcataccgacgggaagacatgtattgaaacctgcgccgtgaacaacggcggctgtgacagcaaatgccatgatgccgccactggggttcattgcacctgtcccgtggggttcatgcttcaaccagacaggaaaacctgtaaggacattgacgaatgccgcctaaataatggggggtgcgaccacatctgtagaaacacagttgggtccttcgagtgcagttgcaaaaagggctataaactgctgatcaacgaaagaaattgtcaggacatcgatgagtgctcattcgatagaacttgtgaccatatctgtgtcaatacacccggctccttccagtgcctctgtcacagaggctacctgctttatggaattacgcactgtggagatgttgatgaatgcagcatcaatcgtggcggatgtcggtttggctgtattaatacccccggcagctaccagtgcacgtgccctgccgggcagggaagattacactggaatggtaaggattgcacggagcccctgaagtgtcagggcagcccaggcgcttccaaagccatgcttagctgtaaccggagcggtaagaaggacacctgcgcgttaacgtgtcctagccgggctagattcctgccggagagcgagaacgggttcacagtgagttgcggtactccttctccccgcgccgcaccagcgagggctgggcacaacggaaactcgacaaacagcaatcactgccacgaggcagccgtcttgtcaattaaacagagagcttctttcaaaattaaggatgctaagtgtcgcctgcacctgagaaacaaggggaagaccgaggaggcggggcgaattactggccctggaggcgccccttgcagcgagtgccaggtgacatttatccacttgaaatgtgattccagccggaagggaaaagggcggcgcgctaggaccccacccgggaaagaggtaactcgtctgacgcttgaactggaagccgaagtgagagctgaagagacgaccgctagttgtggcctgccatgtctgcggcagagaatggagcggagactcaagggctccctaaagatgctgagaaaaagtatcaatcaggatcgctttcttttgagactcgccggattagattatgagctggcgcacaaacccggcctggtcgcgggagagcgggcggagcccatggagagctgccggcctgggcagcatagggccggtacaaagtgcgtgagttgtccccagggcacatactaccacgggcaaaccgagcagtgcgtgccttgtcccgctggtactttccaggagagggagggtcagctatcgtgcgatctgtgccctggctctgacgcccacggccccctcggggcgaccaacgtgacaacctgtgcggggcagtgcccgccaggacaacattcagtggacgggttcaagccctgtcaaccatgcccccgggggacataccagcccgaggctgggcgcaccctttgctttccctgcggcggaggattaactaccaaacacgagggagcgatttcatttcaagactgcgatacaaaagtgcagtgttcacccggccactattataacacaagcattcacaggtgtattcgctgcgcaatgggatcttaccaacccgactttagacagaatttttgttctcgatgtccaggcaacacgagcactgactttgacggcagcacaagcgtggctcaatgcaagaataggcagtgcggcggcgagctgggggagtttacaggctacatagagagtcctaattatccaggaaactacccagccggcgttgaatgcatatggaacatcaaccctccgccaaagcgaaagatccttattgttgtaccagagatattcctgccttccgaagacgagtgtggggacgtgctcgttatgcgaaaaaactcaagcccgtcgagcataaccacctacgaaacttgccagacatatgagcgaccaatagctttcactgctcgctctcggaagttgtggatcaactttaaaacctccgaagccaatagtgcgcgcggattccagatcccatatgttacatatgacgaggactacgagcagctagtggaggacatcgttagagatggtagactttatgctagcgagaatcaccaggagatactgaaggacaaaaagttgattaaagctttttttgaggtcttggcccacccccagaactactttaagtatactgaaaaacataaggagatgctgcctaaaagttttattaagttgctcagatctaaggtctcatcgtttctgaggccttataagtag

SEQ ID NO: 8639 - DNA, 4773 bp, synthetic construct
  misc_feature 1..4773: note = source = /note="Description of Artificial Sequence: Synthetic coding sequence"
  source 1..4773: mol_type = other DNA
atgcccggcggcgcctgcgtgctggtgatcgccctgatgttcctggcctggggagaggcccaggaatgttccccggggggacaccaattcctgaggtccccctaccggtctgttaggtttgatagctggcatctgcagcagtctgctgtccaagacctgatttgtgaccactccctgagccctggctggtaccgatttctgattttggataggccagccgagatgccaacaaagtgtgtggagatgaaccattgtgggactcaggctccgatatggctatccctcagggactctgaaacgctcccatccccgggtgagattaaacagctcacagcctgtgctacatggcaattccttttcagcacaacgaaggattgctgcctcttccagatacctgtcagcgtaaggaactgtggaaatttctctgtttatcttcttcaaccaactcaggggtgcatgggctattgtgcagaagcaatcagcgacgcccgtctgcacccatgcggctcagacgagacggaaactggaggggactgtgtacggcagctcgctgcctcacttccacccccgccagctggccgacctgaggttctcgtcgaactcatcgaatcccgactgttctgcagatgtagcttcgacgtcccagccacgaaaaacagtgttggatttcacatagcatggtcccgtctgtcatcccaggaggttaaggaggagcttacacaggagactacggtccaggctttctctctgttggagttggatggaatcaatcttcgccttggggaccgaattttctgttctgcgtcggtcttcttcctggagaatccacacgtgcaaagcgtcgcgatcgaatctcaggagttcttcgccgggtttaaattgcaacccgagctcagtaccattagtgaagacgggaaggaatactatttgcggatagagtccactgtgcctattatttgtagcgagttcagcgagttggaccaagaatgcaaaatatccctgaagctcaaaaccatcggtcaggggagggagcatctcggactcaaccttgccttatcatcatgccacgtcgacctcctacagacctcaagctgcgcaaatggcacctgttcacacacgttcgtgtactacacagccgtcaccgatttcagcagagacggagatagagtcagcaacatcgtcgtccagcctattgtgaacgaggactttctgtggaataactacattccagatagtatccagatcaaagttaaggacgtgccaaccgcctactgctacacttttaccgacccacatataatcacatttgacggtcgtgtgtacgataattttaaaaccggcacattcgtcctctacaaatccatgtctcgggacttcgaggtgcacgtgaggcagtgggactgtcggtctctgcattaccccgtgtcatgcaactgcggattcgtggcccaagagggtggggatatcgtcaccttcgacatgtgtaacggtcagctgagggagtcacaaccttatcttttcatcaaaagccaggatgtgacccgaaacatcaagatctccgagtcataccttggaagaaaagtaacgatctggttttcttctggagcgttcataagggcagacttgggggagtggggaatgagcttaacgattagagcgccaagcgtggactatagaaatacactcggcctctgtgggactttcgatgagaatcccgaaaacgattttcacgacaaaaatggcatgcagatagaccagaatttcaataactatgttgccttcatcaacgagtggagaatcctcccaggaaagtcgatgagcgacaccctcccggtcagtatgacatcccctgggaaacctagctattgtagctgtagcctcgacaccgcagcttatccgtcttctgaggacttggactcagtctctcggtcagaaatcgccttggggtgcaaagacttaaatcatgtgtctttgagttcactgatccctgagttggatgttacctctgagtatattaactcagacacccttgtgagggagatcaacaaacacacatcacccgaggaatacaatctcaacctgttcctccaggagaaaaaacacatcaatcttaccaagcttggcctcaatgttcagaagcatccagggaatgagaaggaggattccctacagtatttggccaacaagaagtacacccagggtcgggggagtcactctcaggagatgcgctataaccgtcagaatcgctggaaaaggcagaacttccatgagtttcccccccttttcgcttttccgtcattgtcccagaccgacctggaagaactaacctacttcttcccagaagatcatgctgaggacgttcagcaagagtttttcccctcttggcctacacctagcggcttaaccgagtactcaaccctgactctgtgccaagagacactcgctaactcatcaatcggaaggctttgtctggcgtttctggggaagcgcttagacagcgttatagagatgtgtgtaaaagatgtcctgctgaaggacgacttatcttgggcagaagctggtgtagccctgctggagaacgaatgtgaaaaacgcattgtggaggagggcaaatacaacacagaggaatatggcacatcaatcgaggacatcttatctgtgctgaagtgccccaacctctgttccggcaacggacagtgcatggagtggggctgtgcctgctcgccgagctttagttcatacgactgtagcgatagttacgacaaagctcctgaaattactgaattaggaaatgccggattttgtgatgttcaaaagtataactgtatgatggttcgggtcttcgggaaaggcttcaaggaacttcccagcatcaaatgcgaggtaaccaaactgcaatataacagcagtgagtggatgcctggcgagccgatttatactcaaactgtctttcacaattcccgcgccgttgactgtcagctgcctactgatgtccagcagttcgacaccatggacctggttggtggcaagcccaccgggaaatggcagctgaaggtgagtaacgacgggtataaattttcgaaccctaagatcactgtgatttacgacggagcttgtcaagtttgcggcctatataaaaacgatagctgcacgatcaaagagaacgtgtgcattattgatggcttgtgttacgttgagggggacaagaatccaacctctccatgtcttatctgcagacccaaaattagcaggttcacttggagcttcttagaaaacaaccaaccaccagtgattcaggcgctgcaggataagctccagacattctacggagagaactttgagtaccagtttgttgcgtttgatcccgaaggttcggacatccactttactctggattctggcccagagggagcttcagtgtcttcagccggcctgttcatgtggaaaactgatctattgacaacccagcagataacagtgcggctcaacgacgattgcgacgctgagacgagagtgactatagaggtgaccgtgaagtcctgtgattgcttgaatgggggatcttgtgtatctgaccgcaatttctctcctgggtcgggcgtctacctgtgtgtctgcttaccaggattccacggcagcctctgcgaagtagacatttctggctgccaaagtaatccttgcggactgggctcatatattagtggtttccacagctactcttgtgattgcccacccgagctgaaggttgaaacacagttcgttaatcagttcaccacacagacagtcgtcctaacccgaagcgacaagtccgttaataaggaggaggatgacaaaaatgcccaagggcgaaaacgacacgtcaagccgacatcaggaaatgcattcactatctgcaagtatccatgcggcaaatctcgagaatgcgtggctccgaacatctgcaagtgcaagcccggttacatcgggtccaactgtcaaaccgccctctgtgaccctgattgcaagaatcatggaaagtgcatcaagccaaacatctgtcaatgcctgcccgggcacggcggggctacttgcgacgaagaacactgcaatcccccgtgccagcacggtgggacttgtctggcagggaacctgtgcacttgcccctacggattcgtgggaccccgatgcgagaccatggtgtgtaacaggcactgcgagaatggcgggcagtgtttgacaccagacatttgtcaatgtaagcctggctggtatgggcccacctgttcgaccgccctgtgtgaccctgtgtgtctgaacggcggttcctgcaacaagcccaatacctgcctgtgtccaaatggctttttcggtgagcattgccaaaatgcgttttgccaccccccctgcaagaatggcggtcattgcatgagaaataacgtgtgtgtctgccgggagggctacaccggcaggcgattccaaaagagcatttgcgaccccacatgtatgaacggcggtaagtgcgttggcccgagcacctgttcctgtccctcaggctggagcggtaagcggtgcaatacgcctatctgcctccagaagtgtaaaaacgggggggaatgtatcgcaccttctatctgtcactgtccgagctcttgggagggcgttagatgtcagattccaatttgcaatcccaagtgtctctacggcgggcgctgtatctttccaaacgtttgctcctgccggacagaatattccggggtaaaatgcgaaaaaaaaatccaaatccggagacactag

SEQ ID NO: 8640 - DNA, 624 bp, synthetic construct
  misc_feature 1..624: note = source = /note="Description of Artificial Sequence: Synthetic coding sequence"
  source 1..624: mol_type = other DNA
atgagcaccaagcccgacatgatccagaagtgcctgtggctggagattttaatgggcattttcatcgcaggcactctgtccctagattgcaatttattaaacgtgcatctcagacgcgtgacatggcaaaacctccggcacctctcctctatgagtaactcttttcctgtggaatgtctaagggagaatatcgcctttgagcttccacaggaatttttgcagtatactcagccaatgaagcgggacatcaagaaagcattttatgaaatgagccttcaggccttcaatattttctctcaacatacattcaaatactggaaagaacgccatctcaaacagatccaaataggcctagatcagcaagcagagtacctgaatcagtgtctggaagaggacaagaacgagaacgaagatatgaaagaaatgaaagaaaacgaaatgaaacctagcgaagcccgggttcctcagctcagcagcctggaacttaggcggtacttccaccgaattgataatttcttgaaagagaagaagtattctgactgcgcctgggagatcgtgcgagtggaaatccgacgttgcctgtattacttttataagtttacagcgctgtttagaagaaagtag

SEQ ID NO: 8641 - DNA, 939 bp, synthetic construct
  misc_feature 1..939: note = source = /note="Description of Artificial Sequence: Synthetic coding sequence"
  source 1..939: mol_type = other DNA
atggagagcgccctgcccgccgccggcttcctgtactgggtgggcgccggtacagtggcctatctagctctgagaattagctatagcctgttcaccgccctaagggtatggggagttgggaacgaggcaggcgtggggcctggactgggagaatgggccgtggttacagggtcaacggatgggatcggtaagtcctacgccgaagagcttgccaagcacggtatgaaggtagtgctaatttcccgtagcaaagataaactcgaccaggtgtcctctgaaattaaggagaaatttaaagttgagacacgaactatcgctgtggacttcgccagtgaggatatttatgataagatcaaaaccgggcttgctggattagagatcgggatcctggtaaacaatgtggggatgtcctatgagtatcctgagtacttcctcgatgttccggacttagataatgtaattaagaaaatgatcaatattaatatattgagtgtctgtaaaatgactcagctggttctacccggcatggtggagaggagcaagggcgccatattgaacatctcatctggctcagggatgctgccagtgcctctgcttacaatttactctgctactaagactttcgtggacttcttttcccagtgcctccacgaagaatatcgctccaagggcgtgttcgtccagagtgtgttaccatactttgtggctaccaagctggccaagattagaaagcccacccttgacaaaccttcccccgaaactttcgtcaaaagtgccattaagactgtaggtctgcagtcccgaactaacggttatttgattcatgccctgatggggagcatcatctctaacctgccaagttggatttacctcaaaatcgttatgaacatgaacaagagcaccagggcccactatctgaagaagactaagaaaaactag

SEQ ID NO: 8642 - DNA, 2214 bp, synthetic construct
  misc_feature 1..2214: note = source = /note="Description of Artificial Sequence: Synthetic coding sequence"
  source 1..2214: mol_type = other DNA
atggagctgggctgctggacccagctgggcctgaccttcctgcagcttctgttaatcagctctctgcctcgcgaatataccgtgatcaatgaggcttgcccaggtgcagaatggaacattatgtgtcgggagtgctgcgaatatgaccagattgaatgcgtgtgccccggtaaaagagaggtcgtgggttacaccatcccctgttgccggaacgaagagaacgagtgtgatagctgccttattcatcccggatgcactatcttcgaaaattgcaaatcttgccggaacgggtcctggggcgggactctggatgatttctacgtaaaaggtttttactgtgctgagtgcagggcaggctggtatggtggggattgcatgcgctgtggccaggtcctccgtgctccaaaaggacagattctgctggaatcctatcccctcaacgctcactgtgagtggacaatacacgcaaaaccagggtttgtgatccagttacggttcgtgatgctgagcttagaattcgactatatgtgtcagtatgattatgtcgaagtcagggatggggacaacagagatggacaaattatcaagagggtctgcgggaacgaaagaccagctcccattcagtcaatcggaagctcccttcatgtgctcttccacagcgatgggagcaagaactttgacggatttcatgctatttatgaagaaatcacagcgtgtagctcttccccgtgtttccatgacggcacctgcgtgcttgacaaggcgggctcatataagtgtgcatgcctggctgggtatactgggcaacgctgcgagaatctgctcgaggcgggtaagagtaagatcaaggcctcggaggactctttatccgtgcttgaggaacgcaattgttctgaccctggtggacctgttaatgggtatcagaagatcacggggggacctggtctaataaatggacgacatgcgaagattggaacagtcgtctcatttttctgcaacaatagctacgtcctgagcggtaatgagaagaggacctgtcaacagaatggtgaatggtctggaaaacagccaatctgcattaaggcatgtagggaacctaagatcagtgatctggtaagacgtcgcgtgctgcctatgcaggtgcagtcacgggaaacccccctacaccaattgtactcagccgcattctctaagcaaaaattacagtcagctcccactaagaagcctgctctgccatttggagacctgcccatgggctaccagcatctgcatacacagctacaatatgagtgtatcagtcccttctatcgccgcctgggctctagcaggaggacttgcctcagaacggggaaatggtcaggcagggcgccttcctgcatccccatctgcgggaaaattgaaaatataactgcaccaaaaacacaggggctgcgctggccctggcaggcagccatttataggagaacatctggagtccacgatggaagccttcataaaggagcctggtttctggtttgcagcggcgccctggtcaatgagaggacagtcgtggtcgcggcccactgcgtcacagatctcggtaaagtgactatgattaagactgcagacctgaaggtggtgctaggaaagttttacagggacgatgaccgggacgaaaagaccatacagagcctgcagatttcagccattatcctgcaccctaattacgaccccattctcctagacgctgacatcgcgatccttaagctccttgataaggcgaggattagtacgcgtgtgcagcctatttgcttagccgcgtctagagacttaagcacctccttccaggagagccatatcacagtggccggctggaacgttctcgcagatgtcaggtcccccggctttaagaatgacaccttgcgatccggcgtcgtttcagttgtggactcattgctgtgtgaagagcaacacgaagatcatggcatccctgtctctgtaaccgacaacatgttttgcgccagctgggagccaaccgctcctagcgatatttgtacagctgaaacgggcggcattgctgcagttagcttccctgggagagcctcacctgaaccgcgctggcatttaatgggcctggtgagttggtcttacgacaagacttgctcccatcggttgtccaccgcctttaccaaggttctgcccttcaaagactggatagagcggaatatgaagtag

SEQ ID NO: 8643 - DNA, 1503 bp, synthetic construct
  misc_feature 1..1503: note = source = /note="Description of Artificial Sequence: Synthetic coding sequence"
  source 1..1503: mol_type = other DNA
atgggcaccgcccggtggctggccctgggcagcctgttcgccctggcggggctcttagaaggacggctcgtcggcgaagaggaggccggcttcggtgaatgcgacaagtttttttacgctggaactccacctgctggtctggccgctgattcgcacgttaaaatctgtcaaagagctgaaggcgcagagagattcgctacactgtactctacccgggatcggatccctgtgtattccgcttttcgggctccccggcctgctcccggtggggcagagcaaagatggctcgtggagccccagattgatgatccaaactcgaatctggaagaagcaatcaacgaagcagaggctataacatccgtcaacagtctaggtagtaagcaggcactgaacaccgactatttggatagcgactaccagcgtgggcaactataccccttctctttgtcatctgacgtccaggtcgctacttttactctaacaaacagcgccccgatgactcaatccttccaggaacggtggtacgtaaacctgcatagtctgatggatcgggcactgactccacagtgtggatcaggcgaggacttgtacattctgaccggaacagtgcccagcgattaccgggtgaaggacaaggtggcggtgccagagttcgtttggctcgctgcttgctgcgccgtccctggaggcgggtgggcaatggggtttgtgaagcacacgcgggattccgatattattgaggacgttatggtgaaagatctacagaagctactgcccttcaacccacaactatttcagaataattgcggggagacagagcaggatacggaaaaaatgaaaaagatacttgaggtggtcaaccaaatccaggatgaagaaagaatggtgcaatcacagaaatcaagcagcccactgagctcaacccgcagcaaacggtcgacactcttgccgccagaggccagcgaaggcagttccagtttccttggaaaattaatgggctttatagccaccccattcattaaactgttccagctcatctactatctggtcgtggcgatactcaaaaatatagtgtacttcttgtggtgcgtgactaagcaggtcattaatggaatcgagtcttgcctgtacaggttagggagcgcaaccatctcgtacttcatggcaataggcgaggagctggtcagcattccatggaaggtcctgaaggtggttgctaaggtgatacgggcccttctgaggattctctgctgtctcttgaaagctatctgtagagtcctatcaatccctgtgcgggtgctggtggacgtagccacgtttcccgtctacaccatgggcgcgatccctattgtatgcaaggatatcgcccttggccttggcggcacagtcagcctcttatttgatacggctttcgggaccctcggaggcttgttccaggtggtgtttagcgtatgcaaacgaatcgggtacaaagtaacattcgacaatagcggcgaactttag

SEQ ID NO: 8644 - DNA, 300 bp, synthetic construct
  misc_feature 1..300: note = source = /note="Description of Artificial Sequence: Synthetic coding sequence"
  source 1..300: mol_type = other DNA
atgaagagcgccaagctgggcttcctgctgcggttcttcatcttctgttcactaaatacactgttactgggtggcgtgaacaaaatcgccgagaaaatttgtggtgacctcaaggatccgtgcaagctggatatgaatttcggctcctgctatgaggttcacttcaggtacttctataatcgcacatcaaaaagatgcgagacgtttgtgttctcagggtgcaacggcaatctgaataatttcaaactgaaaattgaacgggaggtggcctgtgttgcaaagtataagccaccccggtag

SEQ ID NO: 8645 - DNA, 390 bp, synthetic construct
  misc_feature 1..390: note = source = /note="Description of Artificial Sequence: Synthetic coding sequence"
  source 1..390: mol_type = other DNA
atgcccatggccagcccccagaccctggtgctgtacctgctggtgctggccgtgactgaggcgtggggtcaagaagctgtgatccctggctgtcatctgcacccatttaatgttaccgtcagatctgacagacagggtacatgccaggggtcccatgttgcgcaggcttgtgtgggtcattgcgaatcctccgcctttccatcgcggtactctgtcctggtcgcatccggatacaggcacaacattacctccgttagccaatgctgtaccattagcggattgaagaaggtgaaggtgcaactgcagtgtgtgggcagtaggagagaggagctggaaattttcactgcacgcgcatgtcaatgcgacatgtgtcgcctgtctcggtattag

SEQ ID NO: 8646 - DNA, 1965 bp, synthetic construct
  misc_feature 1..1965: note = source = /note="Description of Artificial Sequence: Synthetic coding sequence"
  source 1..1965: mol_type = other DNA
atggccaagttcggcgtgcaccggatcctgctgctggccatcagcctgacaaaatgcctcgagtcaaccaagcttctggccgacctgaaaaagtgcggtgacctggagtgcgaggccctcataaaccgggtctcagcaatgcgcgactaccggggaccagactgtagatatctgaatttcactaagggtgaggagatctctgtctatgtcaagctcgctggtgaacgtgaagacctgtgggctggatcaaagggaaaagagttcgggtactttcctcgcgatgcagtccaaatagaagaagtgtttatttcagaggagatacagatgtcaacaaaggaatccgattttttgtgcctattgggcgtcagctataccttcgacaatgaggattcagagttaaacggtgattacggtgaaaacatctatccatacgaggaggataaagacgaaaagagctcaatatatgaatctgacttccaaattgaacctgggttctacgctacctacgagtcaactctcttcgaggaccaggtcccggcactggaggcccctgaggatatcggctctacgagcgaatccaaggattgggaagaggttgtagtagaaagtatggaacaggatcgcattccagaagttcacgtaccacctagtagtgctgtgagcggtgtgaaagagtggtttggactgggcggggaacaagctgaggaaaaagcatttgaaagcgtgattgagcccgtccaagaatcctcttttagaagccgtaagatcgccgtggaggatgagaacgatctggaggaattgaataatggggagccccagaccgaacaccagcaggaatctgaaagtgaaattgattccgtgcccaagacccagtccgagcttgcgagtgagtccgagcacatccccaaaccgcagtccacaggttggttcggtggtggcttcacctcttatctggggttcggtgacgaggatacgggcttggagcttattgcagaagaatctaatccgcctctgcaggattttcctaactctatcagctccgacaaagaggcgaccgttccttgcactgaaattctgaccgaaaaaaaagacaccatcacaaatgattcacttagcctgaaaccgtcatggttcgatttcggcttcgcgatcctgggtttcgcctatgcaaaggaagacaaaattatgctggacgaccggaaaaatgaggaagatggcggagccgacgaacatgagcatcccttaaccagtgagctggatcccgagaaggagcaggagatagagactatcaagattatagaaacagaggaccaaatcgacaagaagccggtatctgagaaaacagatgaaagcgacaccatcccctacctgaagaagttcttatacaatttcgataatccctggaatttccaaaatatccctaaggagacggaactcccgtttcctaaacagatactggatcaaaataatgttattgagaatgaagagactggagagttttctattgacaattacccaacagataacacaaaagtgatgatctttaaaagctcttactccctatccgacatggtttctaatatcgagttgcccaccagaatacatgaagaggtgtacttcgaacccagcagctctaaggattcagatgaaaattctaagccctccgtggacaccgagggccccgcattggtcgagatagatcgcagcgttgaaaacactctcctaaattctcagatggtctcaacagataacagcttgagcagccagaactacatatctcaaaaggaggacgcgtcggaattccaaattctgaaatatctgttccagatcgacgtgtatgatttcatgaacagcgcgttctcacccatcgtgatcctcaccgagcgtgtgagcctgcccttcaagcctttcgctatcatcttgccgatcctactaaatattagagtcgccactaagtacgtttag

SEQ ID NO: 8647 - DNA, 1152 bp, synthetic construct
  misc_feature 1..1152: note = source = /note="Description of Artificial Sequence: Synthetic coding sequence"
  source 1..1152: mol_type = other DNA
atggccggcatccccggcctgctgttcctgctgttcttcctgctgtgcgccgtgggccaagtgtccccttacagcgccccctggaaacctacttggccagcttatcggctgcccgtggttctcccgcagagcacattgaacctcgctaagccagactttggggctgaggcaaagttagaagttagttcctcgtgcggtccccagtgccacaagggcacccctctccccacatacgaggaggcaaagcagtacttaagttatgaaacgttatacgccaacgggagcagaacagaaacccaggtggggatctatattttgtcgtccagtggcgatggggcccagcatcgcgatagcggctcaagcgggaaatcgcggcgcaagcgacagatctacggctacgacagcaggtttagtatatttggaaaagatttcctgctcaactacccattctccacatctgtgaaactgagcactggttgcacggggaccttagtggccgaaaagcacgtgctgacagccgcccattgtatccacgatgggaaaacctatgttaagggtacacaaaaattgagagtgggattcttgaagccgaaattcaaggatgggggtcgtggtgccaatgactcaaccagcgccatgcccgagcagatgaaatttcagtggatcagagttaagaggacccacgttccaaaaggatggatcaagggaaatgccaatgacatcggcatggactacgattacgccctcctcgagctcaagaaaccacataagaggaaatttatgaagatcggtgtatccccgccagccaagcagctgcccggcggccgaatacatttcagtggctatgacaacgataggcccggcaatctggtgtatcgcttctgtgatgtgaaggatgagacctacgacttgctgtaccaacaatgcgacgctcaacccggagcttcgggaagtggcgtgtatgtgcgcatgtggaaacggcagcagcagaaatgggaaagaaaaataatcgggatcttctctggccatcagtgggtcgatatgaatgggtccccccaggattttaatgtcgctgtgagaattacccccctgaaatacgcccagatctgctattggatcaagggaaactatctggactgccgcgaaggatag

SEQ ID NO: 8648 - DNA, 1662 bp, synthetic construct
  misc_feature 1..1662: note = source = /note="Description of Artificial Sequence: Synthetic coding sequence"
  source 1..1662: mol_type = other DNA
atgaagtggtgctggggccccgtgctgctgatcgccggcgccaccgtcctaatggagggcctgcaagctgcccagagggcatgtggccagcgaggccccggaccacccaagcctcaggaaggcaacaccgtcccaggggagtggccttggcaggcctctgtgcggcggcagggagcacatatttgctccggctccctcgtagccgacacttgggtgttaacagccgctcactgcttcgagaaggccgcggcaaccgagttaaactcatggtctgtcgtgctgggttccctccaaagggagggactgtccccaggtgccgaggaggtgggtgtcgccgcccttcaattgccacgagcatacaatcattactcccagggaagtgatcttgccctcttgcagctggcccatcccacgacccacacccctctatgtttgccccagcccgcacaccggttcccttttggggcgtcctgctgggccactggctgggaccaggatacttccgacgcaccaggaacgctccgcaatttgcgtttgcgcctaatttctaggccgacctgtaattgtatttacaatcagctgcaccagcggcacttgtccaaccctgcccgtcccggtatgctctgcggtggcccacagcccggcgtccaggggccctgccagggtgattcggggggccctgtgctttgtcttgagccagacgggcactgggttcaggcgggtattatttcatttgctagttcatgcgctcaagaggacgcccccgtattgctgaccaataccgctgcacattcctcttggctgcaggctcgtgtgcagggcgcagcattcctggcccagtctccggagactcccgaaatgtcagatgaagatagctgtgtcgcatgcgggagtctgcggacggctggaccccaggccggagccccttccccttggccctgggaggctcgtttaatgcatcaggggcagctcgcgtgcggcggcgctttggtgtcggaggaagctgttctgacagcagcacactgctttatcggacgccaggcacctgaggagtggtctgttggtctcggaacccggcccgaggaatggggtctgaagcagctcatcctgcacggggcttacacacatcccgaagggggttatgatatggctcttctgctgcttgcccagccagtgactcttggagcgtcactgcgtcccctctgtttgccctatcccgaccaccatctacccgacggagaacggggatgggttctgggtagggcacgcccaggcgctggcatttcctccctccagacagtaccagtcacactgctgggacctcgtgcatgttccaggctgcacgcagcccccggaggagatggcagccccatcctcccaggaatggtgtgcacttccgccgtcggcgagctgccatcttgcgagggactgtctggcgcccctcttgttcatgaggttcgcggaacctggtttctggccggtctccacagcttcggcgacgcatgccaaggtccagcccggcccgcagtattcacggccctcccagcttatgaggactgggtgagcagtcttgactggcaagtctactttgccgaggagcccgagcccgaagcagaaccagggagttgcctcgccaatattagtcaacccacttcctgctag

SEQ ID NO: 8649 - DNA, 936 bp, synthetic construct
  misc_feature 1..936: note = source = /note="Description of Artificial Sequence: Synthetic coding sequence"
  source 1..936: mol_type = other DNA
atgggcatcatccagagcatcctggccaccagccgggactgctacagctttaagaagaagcccattccgaaaaaacccacaatgctggccctggccaaaattctcctaatttccaccctcttctattctctcttgtctggtagtcatggcaaggagaatcaggacattaacacaacccagaacatcgcagaggtcttcaagaccatggaaaataaacctattagtcttgagagcgaggccaacctaaactccgacaaagagaacattactacaagcaacctaaaggccagccacagcccacccctcaatctgccgaacaactcacacggcattactgacttttcatctaatagctccgccgagcacagtctggggtccttgaaaccaactagtactatcagcacaagcccgcctcttatccacagttttgtctctaaggttccttggaatgcccccattgccgacgaagaccttctccccatttccgctcatcccaacgcaacacctgccttaagttctgagaattttacatggtccctcgttaatgacacagttaaaacgcctgataattcaagcatcaccgtgtcgatcctgagctctgagccaactagccctagcgtaacccctcttatcgttgaaccaagcggatggctgactacaaacagcgacagctttacaggtttcaccccctatcaagagaagactacccttcagcctaccttgaaattcaccaacaattctaaattatttcctaataccagcgatccacagaaggtcctgcggctggataatgcaccagaaccttacgatgtatcctttgggaattcctcgtattacaaccccactcttaatgattccgccatgcctgaaagtgaagagaatgctagggatggaatccctatggatgacatccctcctttaagaacttcagtgtag

SEQ ID NO: 8650 - DNA, 3120 bp, synthetic construct
  misc_feature 1..3120: note = source = /note="Description of Artificial Sequence: Synthetic coding sequence"
  source 1..3120: mol_type = other DNA
atgcagagccggctgctgctgctgggcgcccccggcggccacggcggccctgcctccaggaggatgagactgctgttacgacaggttgtccagcgccggccgggcggtgacaggcagcgacccgaagtgcggctgctgcatgccggttcaggcgccgatactggtgatacggtgaatatcggggatgtgagttataaattaaaaatccccaaaaaccccgaactggtgccacagaattacataagtgattcattggcacaaagcgtggtgcagcaccttcggtggatcatgcaaaaggatcttctgggccaggatgtgttcctcattgggccgccgggacctctccgtcgatcgatcgcaatgcagtacctcgaattgacgaagagggaggttgaatatatagctctgtctcgtgacacaaccgagacagacctgaagcaaaggcgggagattagggctgggactgccttctatatcgatcagtgcgcggttagggcagctacggaaggcagaacgttaattctcgaaggcctcgagaaggcagaaaggaatgtgctgcccgtgctaaacaatctacttgaaaaccgcgagatgcagctcgaggatggacgattcctgatgtcagccgaaaggtatgacaaactgttgagagatcacactaaaaaagagctagactcctggaagattgtgcgcgtctcagaaaatttcagagtgattgcactgggactaccggttccacgctacagtggcaacccactggatcccccgctccgatctcggtttcaggccagggatatttattacctgccattcaaggatcagcttaagctgctgtattccattggcgcaaatgtcagcgctgagaaggtctcccaactgctaagctttgctacaacgctctgcagccaggagagctctacactcgggcttccggactttccgttggatagtcttgccgccgctgtacagatcctggacagtttccccatgatgcccatcaaacacgcaattcagtggctttatccatattctatcctcctaggacacgagggcaagatggctgtggaaggcgtgcttaaaaggtttgagctgcaggactctgggtcctcattgcttccaaaggagattgtgaaggttgaaaaaatgatggagaatcacgtaagccaggcctcggtgactatcagaatagccgacaaggaggtcacaatcaaagttcctgcaggcaccaggctgctctcacagccctgcgccagcgaccggtttattcaaactctcagccataaacagctgcaggccgaaatgatgcagtcccatatggtgaaagatatctgcctaataggaggtaaagggtgtggaaagaccgttatcgctaaaaactttgctgacacccttggctataacattgagccaattatgctgtaccaggacatgaccgcaagggacctgcttcagcagagatatacactgcccaacggtgatacagcttggcggtctagtcccttagtcaatgccgccctggagggaaaactggtgctcctcgatggcatacaccgggtcaacgctggcacgctcgctgtgctgcaacgcctgatccacgatcgggaactgagcctgtatgacggttctaggctgctgcgcgaagacagatatatgaggctgaaagaggagctgcaactttcagatgaacagttacagaagagatctattttcccaatccatcccagcttccggattatcgcactcgccgagcctcctgtaatcggttcaactgcacaccagtggctgggccctgagttcctaaccatgttctttttccattacatgaagcccctggtgaagtccgaggagatccaggtgattaaggagaaggtccccaatgtgcctcaggaagcccttgataagcttctgagcttcacgcataaactgagagagacccaagatcctacggcacaatcattggctgcttctttgagcaccaggcagctgttgagaatctctaggagacttagccaatatcccaacgaaaatctgcattcagccgtcactaaagcctgtctatcacgtttcctccctagcctcgcccgctctgctcttgaaaagaatctggctgacgctacgatcgaaatcaacacggacgataatttggagccagagctcaaggactacaagtgcgaggtgacttccggaacactgaggatcggggctgtgtcggcccctatttataatgctcacgagaaaatgaaagtgccggatgttctgttctacgacaatatccagcacgtcatcgtcatggaggatatgctaaaagatttcctgctcggcgaacatctcttgttggtgggtaaccagggagtgggaaaaaataagatcgtggaccgtttccttcacctcctgaatcgccccagggagtacatacagctgcacagggacaccactgtccagaccctaactctacaaccctctgtcaaggatggcctcatcgtgtacgaagatagcccactcgttaaggctgtgaagctgggccatattctggtagtcgatgaagccgacaaggcacccaccaacgtgacttgcatactcaagaccttagtggaaaatggggagatgattctcgctgatgggcggaggatagtggccaattccgcgaacgtcaatggccgggagaatgtggtcgttattcatcctgactttagaatgatcgttttagccaaccggcccggctttccattcctggggaatgatttttttggtacactgggggatatcttctcctgtcacgccgtggataatcctaaaccccactcagagcttgagatgctgcggcagtacggaccaaatgttcccgagccaatcctccagaagttggtggctgctttcggcgaactacgcagcctcgccgatcaggggattattaattatccatattccactcgcgaggtggtaaatatagtaaaacaccttcaaaagttccctaccgaaggcctgagcagtgtagtccgcaacgtgttcgatttcgactcttataacaatgacatgcgggaaatcctgatcaacactctgcataaatacggtattcccattggggccaagccaacatcggtgcaactcgcaaaggagtag

SEQ ID NO: 8651 - DNA, 801 bp, synthetic construct
  misc_feature 1..801: note = source = /note="Description of Artificial Sequence: Synthetic coding sequence"
  source 1..801: mol_type = other DNA
atgcggctgctgttcctggccgtgctgcggccccacaccggcaacgccgtgacggctcagcgcgtccgcgctcacttagaggccgccggacatgtctgcgttctgaaagatgctttcgacttcgagtcccggtcagaaatagccaacctgattttggcagaaaactgtgaagcagctttggctctccacctgtataggggaggtcgattgctacagggacacagaatccccttcggcgtgattttcggtggcacggatgtgaatgaagacgccaatcaggccgaaaagaatactgtcatgggaagggtgctagaagaggcaaggtttgcggttgcttttactgaatctatgaaagagatggctcaagcgcagtgggtggatccggttttcacccgcgaagtcaaggctaaggtcaagagagccgcaggcgtccggttaattggtgaaatgccacaggaggacctccacgctgtagtgaaaaattgcttcgcagtggtgaacagcagcgtctccgagggaatgtcggccgcaatcctagaggcaatggacctggaagtgccggtgttagcccgcaacattccaggtaacgctgcggtggtgaagcacgaggtcaccggactcctcttcagcaaccctcaggagttcgttcatctggccaaacgcttggtatctgaccccgccctagaaaaggagatcgtcgtaaacggcagagagtatgtgcggatgtaccactcatggcaggtggagagggacacataccaacagttgataagaaagttggaagggtctacggaagactag

SEQ ID NO: 8652 - DNA, 2478 bp, synthetic construct
  misc_feature 1..2478: note = source = /note="Description of Artificial Sequence: Synthetic coding sequence"
  source 1..2478: mol_type = other DNA
atgttcagcggcttcaacgtgttccgggtgggcatcagcttcgtgatcatgtgcatattttatatgcccaccgttaattctcttccagagctgagcccccagaagtactttagcactctccagccgggaaaggccagtctggcttacttttgccaggccgactcaccccgcacatcagtcttcctggaagagctaaatgaagccgtccgacctctgcaggattacggtattagcgtggctaaggttaattgtgtgaaggaggaaatttctagatactgcggcaaagagaaagatttgatgaaggcttacttattcaaagggaatattctgctccgtgaatttcctacagacacactttttgatgtcaacgccattgtcgcgcatgtcctgttcgcgctcctcttttcagaagtgaagtacataaccaacttggaggacctacagaacattgagaatgcactgaagggcaaggccaacattatattctcctatgttcgtgctatcggcattccggagcacagggccgtcatggaggccgccttcgtgtacggaaccacctaccaattcgtcctgactacggaaatagccctattggaatccattggatcagaagatgtggagtacgcgcacctttacttcttccactgtaaactggttctggacctcacccaacagtgtaggagaacattgatggagcaacctctcaccaccttaaacattcatctcttcattaagacaatgaaagcccccctgctgacggaggtagcagaggatccacaacaagtgtccaccgttcacttgcagctgggtcttcctctcgtgttcattgtttcacagcaagcaacctatgaggctgatagacgcaccgccgaatgggtcgcttggagattgctgggtaaggcgggagtccttctcctgcttcgagactcactggaggtgaacatcccacaagacgccaatgtcgtctttaaacgcgctgaggagggggtgccagtagagtttctggttctgcacgacgtggacctgataatatctcacgtggaaaacaatatgcatatagaggaaatccaggaggacgaggacaatgacatggagggaccggacatcgacgtgcaagacgacgaagtggcggaaacggtgtttcgagatcggaaacgaaagctccccctcgagcttactgtcgaactgacagaggagacctttaacgccacagtgatggcctccgacagcatcgtgcttttctacgctggatggcaggccgtgtctatggcattccttcagtcgtatatagacgtcgccgttaagttgaagggtacatccactatgttattaactaggattaattgcgcagattggtcagacgtttgtactaaacagaacgtgactgaatttccaataattaaaatgtataaaaaaggagagaaccctgtgagctacgcaggaatgttgggtacagaagacctgctaaagtttatccagctgaacaggatttcttacccagtcaacataactagcatccaagaggccgaggaatatctctctggggaactctacaaggacctgatcttatacagcagcgtgtccgtcttaggcctctttagcccaacaatgaaaaccgccaaggaagacttttcagaagccggcaattaccttaaggggtatgtgattaccggaatttattctgaggaagatgtgctgctcctgtccacaaagtatgcagcctccctgccagccttactgctagccagacataccgagggaaagatcgagagtatcccactggcgagtacacatgcacaggatattgtacagatcatcaccgacgctcttctggagatgttccccgagattacggtggagaacttgccctcctattttaggcttcagaagcctctgctcattcttttctccgatggcacagtaaatccccaatacaagaaggccattttaaccttggtgaaacagaagtatctggactcattcaccccttgctggctgaatctcaagaacacccctgtgggacgtgggatcctcagggcatattttgacccccttccccccctgcccttacttgtgttagtcaatttgcactcgggaggtcaggtgtttgcattcccctccgatcaggcgattatagaagagaatcttgtgctttggcttaaaaaactggaagcaggcctggaaaatcatatcaccattctaccagctcaggaatggaagccaccactccccgcatacgacttcttgtctatgatcgatgcagctacgtcccagagaggcactcgtaaggttcccaaatgcatgaaagagactgacgtccaggagaacgataaggaacaacatgaagacaaaagtgccgtgaggaaagagcccattgagactctgcgaatcaaacattggaatcgcagtaactggttcaaggaggcagagaagtcttttaggcgggataaagagttggggtgctctaaagtaaactag

SEQ ID NO: 8653 - DNA, 672 bp, synthetic construct
  misc_feature 1..672: note = source = /note="Description of Artificial Sequence: Synthetic coding sequence"
  source 1..672: mol_type = other DNA
atgacctggcggcaccacgtgcggctgctgttcaccgtgagcctggcacttcagattatcaacctgggcaattcttaccagagagaaaagcataatggaggtcgtgaagaggtaaccaaagtggctacccagaagcaccgccagtctcccctgaactggacctcgagccactttggggaagtgacaggttctgccgagggttggggtccggaggaacctctcccttatagctgggccttcggcgagggggcttcagcgagacctagatgctgtcggaatgggggaacttgcgtacttggttcattttgtgtgtgccctgctcatttcacaggccgctattgtgagcacgaccaacgacgctccgaatgtggagcccttgagcacggggcctggaccctgagagcttgccatctgtgtcgttgcatcttcggagctctacactgcctgcccttacaaacccctgatagatgcgaccctaaagattttcttgccagccatgctcatggcccctcagcaggtggcgccccctctctcctactccttcttccctgcgcgttgctccacagactccttagaccagacgcacctgctcacccacgcagcctggtgccaagtgtgttacagcgagagcgccggccctgtggaaggcccggattgggacacaggctctag

SEQ ID NO: 8654 - DNA, 1320 bp, synthetic construct
  misc_feature 1..1320: note = source = /note="Description of Artificial Sequence: Synthetic coding sequence"
  source 1..1320: mol_type = other DNA
atgcccgccatcgccgtgctggccgccgccgccgccgcctggtgctttcttcaagtggaatcacgtcatctcgatgcactggcagggggagctggcccaaatcatggtaactttctcgataatgaccagtggctgtcaactgtgtcacagtatgaccgcgataagtactggaaccggttcagagatgacgattacttcagaaattggaatcccaacaagccattcgatcaggccctcgacccctctaaggatccatgtctgaaggtcaagtgctctcctcacaaggtttgtgtcacccaggactaccagactgcactgtgcgtgtccagaaagcacttgctccccaggcaaaagaaaggaaatgtagcccagaagcactgggtcggaccttccaaccttgtgaaatgcaagccctgcccggttgctcagtcggccatggtgtgtggtagcgacggccactcttatacctcaaaatgtaagctcgagttccatgcctgcagtactggtaaatcactggcaaccctgtgtgacgggccatgcccttgcctacccgagccggaacctcccaagcacaaggcggaaagaagcgcatgcaccgacaaggagcttagaaacttggcatctaggttgaaggattggtttggggctctgcatgaggacgcaaatcgggtcatcaagccaactagctccaatacagcacaaggaagattcgacacatctatcctgccgatctgcaaggatagcctgggctggatgttcaacaaacttgacatgaactatgacctgttgctcgacccaagtgaaattaatgccatttacctggacaagtatgaaccgtgcatcaagccacttttcaactcctgcgattcattcaaggatggcaaactgtctaacaacgaatggtgttattgcttccagaagcccggcggcctgccatgtcagaacgagatgaacaggattcagaaactgtccaaaggcaaatccctcctgggagcttttatcccccgttgtaacgaagaggggtactataaagccacacaatgtcatgggagcaccggacagtgctggtgtgtggataaatacgggaatgaattggcaggttcaagaaaacagggcgccgttagctgcgaggaggagcaggagacaagtggcgacttcggtagtgggggatcagtcgtgcttctcgacgacctggagtacgagagagagctcggacccaaggacaaagaaggcaaactgagagtgcacacaagggcagtcactgaggacgatgaggatgaagacgacgacaaagaagatgaggtgggctacatttggtag

SEQ ID NO: 8655 - DNA, 7872 bp, synthetic construct
  misc_feature 1..7872: note = source = /note="Description of Artificial Sequence: Synthetic coding sequence"
  source 1..7872: mol_type = other DNA
atgaaggtgaagggccggggcatcacctgcctgctggtgagcttcgcggtgatttgtctggtggccacaccaggggggaaggcgtgtccgagacggtgtgcttgttatatgcccacagaagtccactgtacctttcgatacctgacatccatccccgattctatcccccctaacgtcgagagaatcaatttaggctataactcccttgtgcgtctgatggaaaccgatttctctggtctcacaaaactcgaactgcttatgctgcacagcaacggaatccataccatccctgataagacatttagcgatctccaggcactgcaggtactgaagatgagttacaataaagtgcgtaagctgcagaaggatactttctatggtcttagaagcctcacaagactccatatggaccacaataatatcgaatttatcaatcctgaagttttctacggcttaaatttcttgcgcttggtgcacctggagggcaaccaactaacgaagctgcaccccgatacattcgtaagcctgtcttatctgcaaatattcaaaatcagtttcatcaaattcctgtacctcagcgacaacttcctgactagccttccccaggagatggtgtcgtatatgcccgatttggattcactgtatctgcatgggaatccatggacatgcgactgccatcttaaatggctgtcagattggatccaggaaaagccggacgtcattaaatgcaaaaaggaccgtagtccgagctcagcgcagcagtgccccctctgcatgaacccccggacaagtaagggtaaacccctagccatggtctccgctgcagcatttcaatgtgctaaaccaaccattgatagctccttgaagtctaaatccctgacaattctcgaagactcaagctctgccttcataagcccacaaggttttatggcaccattcggctccctgacccttaacatgacagaccagagtggaaacgaggccaatatggtgtgcagtatccagaagccctcccgcacgtcccccatcgccttcacagaggagaatgattatattgtgctgaacaccagcttctccacgtttctggtttgcaatatcgactacgggcatatccagcctgtgtggcagatcctcgccctatactcggacagtccccttattctcgaacgttcccatcttctaagcgaaacaccccagctctactataaatataaacaggtggcccctaagcctgaggacattttcaccaacatagaagcagatctgagagcagatccttcatggttaatgcaggatcagatttcattacagctgaacagaacagccactacgttttcaaccttacaaatccagtattcatcagatgctcagattactctccctcgcgcagaaatgaggcccgtcaaacacaaatggaccatgatctctagagataataacacgaaactggaacacaccgtccttgtgggaggcacagtcggcctaaactgccctgggcagggggatcctaccccacatgtggattggctgcttgcggatgggtcgaaagtccgtgccccgtacgtgtccgaagacggaagaattctaattgataaaagtggcaagcttgaacttcagatggccgacagtttcgacacaggtgtatatcattgcatttcctccaactatgacgatgcagatattctgacctatagaatcactgtcgtggagccccttgtcgaggcttatcaagagaacggtatccaccacacagtgtttataggagagaccctggacctgccatgtcacagtactggcatccccgatgcgtccatatcctgggtaatccccgggaacaatgtactctatcaatcatctagggataagaaggtgctgaataacggcaccctgcggatcctgcaggttacaccaaaagaccaggggtattataggtgcgtggccgctaatccttcaggcgtggactttcttatatttcaggtgtctgtcaagatgaaaggacaacgaccgctcgagcatgatggggaaaccgagggtagtggattagatgaaagcaatcccattgctcatttgaaggagccacccggcgcacagctgaggactagcgccctgatggaggccgaggtaggcaagcatacttcttccacttctaagagacataattaccgggagttaactctacagaggcgcggagacagcactcacagaagatttagagagaaccggcggcatttccctccttccgcaagacgcatcgatccccagcactgggcagctttactagagaaagctaagaagaatgccatgcctgacaaacgcgagaataccaccgtgtcacccccccctgtggtcacgcaattgccaaatatccctggagaggaggatgatagttctggcatgttggcacttcacgaagagtttatggtgcctgccacgaaggctctgaaccttccggcaaggacggttactgccgatagcaggacaatttcggattcccccatgaccaatattaattacggcacagaattttctcctgtggtaaattcacaaatcctgccgcccgaggaacccactgatttcaaactcagcaccgcaattaagaccaccgccatgagtaaaaatatcaatcccaccatgtcctcccagattcagggaacaacaaatcagcattcatcaactgtcttccctctcctcctgggcgctacggagttccaagattctgaccagatgggtcgcggccgagaacattttcagtctagaccccccatcacagtgaggacgatgatcaaggatgtgaacgtgaaaatgctgtcctctactacaaacaagctgctcctggagtcagtgaacactactaattctcatcaaacctcggttagagaggtgtcagagcctcggcacaatcacttttactcacacactactcagatactgagtacgtccaccttcccctctgaccctcataccgccgcacatagccaatttcccatccctcgcaacagtaccgtcaatatccctctctttagacggtttggcagacagaggaaaatcggcggccgcggccgcataatctcaccttaccggacaccagtcttgaggagacatagatactccatttttcgcagcaccacgcgggggtcatcagagaagtctacaacagcatttagcgctacagtactgaatgtcacgtgtcttagctgtcttccgcgcgagagattgacaactgctaccgccgctttgtcctttcccagcgccgccccaattacctttcctaaagccgatattgctcgagtcccctcagaggagagcaccacattagtgcagaaccctttactcttactggaaaataagccctccgtagagaaaactactccaacaatcaagtacttcagaacggagatctcgcaggtgaccccgaccggcgctgtaatgacatatgctcctaccagcatcccgatggaaaaaacccataaggtgaacgctagctatccccgcgtttcaagtaccaacgaagcaaagcgcgacagcgtgattacttccagcctgagtggggcaattacgaaacctcccatgaccattatcgcgatcaccagattctccagaaggaaaataccctggcagcagaactttgtgaataaccataaccccaaggggcgattgagaaaccagcacaaggtctctctgcagaaatctacagcagtgatgttgcccaagacctcaccagcgctcccgagagacaaagtgtctccttttcatttcacaactttgagtacgtctgtgatgcaaataccttccaataccctgaccacagcccaccacacaaccaccaagacccacaatcctggttcgctccccacgaaaaaggagctgccattccctcccttaaatcccatgctgcctagtatcatcagtaaggatagtagtaccaagagcattatctcaacccagaccgccattccggcaacaactccaacctttcctgcatcagtgataacttatgagacacagactgaacgaagccgcgctcagacaatccaacgtgagcaggaaccgcaaaagaagaaccgcactgatcccaatatcagtccagaccaaagttctggttttactacgccaactgccatgacaccacccgttctgaccactgctgaaacttcagtgaaaccctcagtcagcgcatttacccactccccacccgagaatactactgggatctcctcaaccattagctttcactccaggaccctaaacctgaccgatgttattgaggaacttgctcaggcatccacccaaactctaaaaagtacaattgcgtctgagacgacgctgagttctaagtcgcatcagagcacaactacccgtaaggcaattatccggcatagcacaattccacctttcctgtctagcagcgcaaccctgatgcccgtgcctatctccccacctttcacacaaagagccgttaccgacaacgtggctacacctattagcgggcttatgactaacacagtggtgaagctccatgaatcttcccgccacaatgccaagcctcagcaactcgtggcagaggtggctactagcccaaaggtgcacccaaatgccaagttcacaatcgggacaacccacttcatatacagtaaccttctgcacagcacccccatgcccgcattaacgacggttaaatctcagaacagtaaactcacaccgtccccctgggccgagaatcaattctggcataagccctattccgagatcgctgagaaagggaaaaagccagaagtctccatgctcgcaaccaccgggctatccgaagccacaaccttggtgtctgactgggacgggcagaagaatactaaaaagtccgacttcgataagaagcccgttcaagaggctacaacctcgaaactcctccctttcgactccctcagcaggtatatatttgaaaaacccagaatcgtggggggtaaggccgcctcgtttactatcccagctaattccgatgcctttcttccgtgtgaggccgtcggtaatcctctccccaccattcactggactcgcgtaccttcagggctggatctgtccaagcgcaagcagaactcccgggtgcaagtccttccaaacggcacgttatccattcagcgagtggaaattcaagaccggggtcagtacctgtgtagtgcctccaatctcttcggcaccgaccatctacatgttaccttgtcagtagtgtcttacccacccaggatcctggagcgtcgtactaaagaaattactgtccactccgggtctacggtggaactcaagtgccgcgccgaaggtcgcccatcaccgacagtgacttggattttggctaatcagacagtggtaagtgagtccagccagggctcacgccaggccgttgtgacggttgacggtaccctggttctccataacctgagtatctacgaccgtggcttctataagtgtgtggccagcaatcccggcggccaagacagcctgctcgtgaaaattcaggtgatagcggcgccacccgtgatccttgaacaacgcaggcaggtcattgtgggtacttggggggagtccttgaaactcccctgtacagccaaaggcacaccacagccctctgtctactgggtcctaagtgatgggaccgaggtgaaaccactccaatttactaatagtaagcttttcctgttctctaatggaactctttatattcgcaatttggcttcaagcgatcgggggacttatgaatgtatcgccactagtagcaccgggtccgaaaggcgtgtagtgatgctcaccatggaagagagagtcacctctccaaggattgaggccgcgtcccagaagcgaaccgaggtgaattttggcgataaactgttgcttaattgttcagcaacgggcgaacctaagccacagattatgtggcggttgccatcaaaggcagtggtggatcagcagcatagggtgggatcatggatacatgtctatccaaacggaagcctgttcatcggaagtgtcactgaaaaagacagtggcgtctatctgtgcgttgcccggaacaagatgggggatgacctcatccttatgcatgtgagcctgagattgaaacccgctaaaattgaccataaacagtatttcaggaagcaggtactgcatggcaaagactttcaggttgattgcaaagcttctggctctcccgttcctgagatctcctggagcttaccggatgggacgatgataaataatgctatgcaggccgacgatagcgggcacagaactaggagatataccttgtttaataatgggaccctgtattttaacaaggttggagttgctgaggagggcgactatacctgttacgcacagaacacccttggaaaagacgagatgaaggtgcacttgacggttatcactgctgcccctaggatccggcaatccaacaaaactaataagagaattaaggccggcgatacagctgtgctggactgtgaggtaacaggggaccccaagcccaagattttttggctgctaccctccaatgatatgattagcttttcgattgataggtatacattccacgcaaatggctctctgaccataaacaaggtcaaattgttagactcaggggaatatgtgtgcgtcgctcgaaacccctccggggacgacacaaaaatgtacaaactggacgtggtgtctaaacctcccttgataaatgggttgtatacaaaccgaaccgtcataaaagcaactgcagtgcgccattctaagaagcacttcgattgcagggccgaaggaaccccttctcccgaggtaatgtggatcatgcctgacaatatttttttgaccgcaccctattatggcagcagaattacagtgcataagaatgggaccctggagatcagaaatgtaaggttgagcgactcggctgatttcatctgtgtcgcgcgaaatgaaggcggagagagcgtactcgttgtgcagcttgaagtgttggagatgctaagaaggcccacctttcggaacccatttaatgaaaagatcgtggcccagctgggaaaatcaacggccctgaattgttccgtggacggtaatcctccgcctgaaatcatctggatactccccaatggaacccggttttctaatggcccacagtcctatcagtacttgattgcttcaaacggaagtttcataatctcaaagacgacacgggaagacgcaggtaaatacaggtgtgcagcacgaaataaggtggggtatatagagaaactcgtgatccttgaaatcggccagaaacccgttattcttacatatgcccccggaaccgttaagggcatctctggcgaaagcctctcgttgcattgcgtatccgacggcataccaaagcccaacatcaagtggaccatgcctagcgggtacgtagtcgacagaccgcagataaacgggaagtacatcttacacgataatggtacactggtaattaaggaagccaccgcttacgataggggaaattacatatgcaaggcacagaattcggtaggacacacactcatcacagtccccgtgatgatcgtcgcatatccgccaagaatcaccaacaggccacctcgttctattgtcaccagaacgggagctgcttttcaactacattgtgtggctctgggggtgccaaagcccgaaataacttgggagatgcccgatcactcgctgttgagtacagcatccaaagaacggactcatggaagtgaacagctacacctgcagggaacactcgtgatccaaaacccgcaaacatctgatagcggcatctacaagtgtactgccaagaatccacttggaagcgactatgccgctacctacattcaggttatctag

SEQ ID NO: 8656 - DNA, 1995 bp, synthetic construct
  misc_feature 1..1995: note = source = /note="Description of Artificial Sequence: Synthetic coding sequence"
  source 1..1995: mol_type = other DNA
atgaagaccggcctgttcttcctgtgcctgctgggcaccgccgccgcaattccaacaaacgctagactgctctccgaccacagcaagcccacagccgagacagttgccccggacaacactgcgattccatccctcagggccgaggctgaagaaaacgaaaaagaaaccgcagttagtactgaggacgatagccatcacaaggccgagaaatcatcggtcctcaaatctaaggaggaaagccatgaacagtctgcggaacagggaaagagttcctcccaagagcttggcctaaaggatcaagaggatagcgacggccatctgtctgtgaatcttgagtatgcccccacagaaggaacacttgacatcaaggaagatatgtctgagcctcaagagaagaagctatcagaaaataccgatttcctcgccccaggtgtgtcctctttcaccgactctaaccaacaggagtccatcactaagagggaggaaaaccaggaacagccccggaattacagccatcaccagctgaaccgctcctccaagcactcccaaggcctccgcgatcaggggaaccaggagcaggatcccaacatcagtaatggtgaggaggaggaagagaaagagcctggcgaggtgggaacccataacgacaaccaagaaagaaagactgagctccccagagagcatgctaacagtaaacaggaagaggacaacactcagtccgacgacattcttgaagagtcggatcaacctacacaggtatccaagatgcaagaggacgagtttgatcaaggcaaccaggaacaggaggataactcaaacgccgaaatggaagaggagaacgcaagcaacgtaaacaagcacattcaggagactgagtggcagtctcaggagggaaagacaggactggaggccatctcaaatcacaaagaaactgaagagaaaactgtatctgaggctttactgatggagccgaccgacgacggcaacacaacccctagaaaccatggtgtggatgacgacggtgacgatgatggcgacgatggaggcaccgatggtccccggcatagcgctagtgatgactatttcatcccatctcaagcttttctggaggcagagagagctcagagcatagcataccacctcaagatagaagagcagcgcgaaaaagtacacgagaacgagaatatcggcaccaccgagccaggagaacatcaggaagctaagaaggctgaaaactcctccaatgaagaggagacaagtagcgagggcaatatgcgtgtgcatgcagtggacagctgcatgagcttccagtgcaagcgaggacacatctgtaaggcggaccagcaaggcaagccccattgtgtgtgtcaagacccagttacgtgtccccctacaaaacccctcgaccaggtctgtggaaccgacaatcagacatatgccagctcctgccacctgttcgctacgaaatgtcgcctggaggggactaagaagggtcatcaacttcaactcgactacttcggcgcatgtaaaagcatccccacctgtaccgatttcgaagttatccagtttccccttcggatgcgtgattggcttaagaatatccttatgcagttgtatgaggcaaacagtgagcatgcaggctacttgaacgagaaacagaggaataaagtcaagaagatttacctggacgagaagaggctgctggcgggagaccacccaatcgaccttctcctcagggacttcaaaaagaattatcatatgtacgtctaccctgtgcattggcagttcagcgaactggatcagcatccgatggatcgtgtgttgacccactccgaactggctcccctgagggcctctctcgttcctatggagcactgtatcacaaggtttttcgaggagtgcgatcccaataaagacaagcatatcactttaaaagaatggggtcactgcttcggcatcaaggaggaagacatcgacgagaatctgctgttttag

SEQ ID NO: 8657 - DNA, 1254 bp, synthetic construct
  misc_feature 1..1254: note = source = /note="Description of Artificial Sequence: Synthetic coding sequence"
  source 1..1254: mol_type = other DNA
atgctggccctgctggtgctggtgaccgtggccctggccagcgcccatcacggcggagaacatttcgagggagagaaggtgttccgtgtcaacgtagaagatgagaaccacataaatattatccgagagcttgcttctacaacccagattgacttctggaaacccgactccgttacccagattaaaccacacagcaccgtggactttcgggtgaaggcggaagatacggtaaccgtagaaaatgtgctcaaacaaaacgaactgcaatacaaggtgctaatcagtaacctgcgtaacgtcgtggaggcccagttcgacagtagagtccgcgcgacaggccatagctacgaaaaatataataagtgggagaccattgaagcctggacacaacaggtcgcaactgaaaacccagctcttatttctcgtagtgtgatcggcactacatttgaaggaagggcgatttaccttcttaaggtggggaaggccggccagaacaagcccgctatttttatggattgtggttttcatgcacgtgagtggataagccccgcgttttgccagtggttcgtgcgagaagcagtccggacatatggccgagagatccaggtgactgaactcctcgacaaactggatttctatgtgctccccgttctgaacattgatggatacatttacacctggaccaagtcaaggttctggcgcaaaactagaagcacgcacaccggctcctcctgcattggcacagatccaaaccgcaatttcgacgccggatggtgcgaaattggagcctcaagaaacccgtgcgacgagacatattgtgggccagctgccgagtctgaaaaagaaactaaggcactggccgattttataagaaacaaactatccagtataaaagcgtacttgaccatacacagctacagccaaatgatgatatatccttattcctatgcctacaaactgggagaaaataacgctgaattaaacgcgctcgcgaaggcaacagtgaaagagctcgcctccttgcatggcacaaagtatacttacggacccggtgccaccacaatctaccccgcagccggaggaagtgatgattgggcctacgatcaagggattcggtactcgttcactttcgagttgagggatactggacggtacggcttcctgctgcccgaaagccagattcgtgcaacctgcgaagagacattccttgcgatcaagtacgtcgctagctacgtcttagaacatctctactag

SEQ ID NO: 8658 - DNA, 588 bp, synthetic construct
  misc_feature 1..588: note = source = /note="Description of Artificial Sequence: Synthetic coding sequence"
  source 1..588: mol_type = other DNA
atggccgtgagccagggcgacggcaccctgtgcttcgtgctgctgctgtgctgttggcaggagaccgaattaaggccaagaaccgttatacccggttcccccactgaaattccatttagttctaagcaggaggatatgtccgaactactggatgagattctggtgcaagaaattctcgacctgaataaaacaacccctagcgagatgccatcaactgcttcaaccttgagcacgcccctgcacgccggaatagacgaaaattatcaggcaggcggcagtgagaactatcacgagttactggagaatctccagtttagtcctggaattgaagttaagatcagcaatgatgaggcgaacgccaatgctaatctccacggcgatccatccgagaattaccgtggtcctcaagtgtcgccaggtagcgagaagagtgtgagttccaaagagaagaactctaagaatacacagtatgagaacctgagcatcctcgatcagatcctccagaacataggtaggtcttctggaaatatcttccacaaagagcaacaaagaactagcgctcaaagacggtcacagggcagccagtag

SEQ ID NO: 8659 - DNA, 2334 bp, synthetic construct
  misc_feature 1..2334: note = source = /note="Description of Artificial Sequence: Synthetic coding sequence"
  source 1..2334: mol_type = other DNA
atgaacgccaacaaggacgagcggctgaaggcccggagccaggacttccacttatttcccgctctgatgatgctaagcatgacgatgctgtttttgccggtcacaggaaccctcaagcagaatatcccacgtctgaaactgacctacaaggacctgctgttgtccaacagctgtatcccatttttggggagctccgagggactagatttccaaactctgctactcgatgaggagcgtggaaggctgcttctgggcgccaaggaccacatttttctgttgtccctggtggacctgaataagaattttaagaagatctactggcccgccgctaaagagcgtgtggagctgtgcaagctggccgggaaagatgctaatacagaatgcgcaaattttatacgagttttgcaaccttataataagacccacatatacgtctgtgggacaggagcctttcatcctatatgcggttacatcgacctgggtgtctacaaagaagatattattttcaaattggatacacacaacctcgagagtggtcgtctaaagtgcccattcgacccccagcagccttttgctagtgtcatgactgacgagtacctgtactccggcactgcttccgacttcctgggcaaagacaccgccttcacaagatctctgggtcctactcacgatcaccattatattcgcactgatatttccgagcactactggctgaacggagctaagtttattgggaccttcttcattcccgatacttataatcccgacgacgacaagatttacttcttttttagggaaagttctcaagaaggctccacctccgataagaccattttgagcagagtcgggcgtgtgtgtaaaaacgatgtcggtggccagcgaagcctgattaacaagtggactaccttcctgaaagctcgtttgatctgttccattcctgggtctgatggggccgacacctactttgatgagctccaggacatttacctgcttccaacgagggatgagcggaacccagtggtgtacggtgtattcacaacaaccagttcaatcttcaaggggtcggccgtgtgcgtgtatagtatggccgatattagagctgtgttcaacggaccttatgcccataaggagtcagctgatcatcgctgggtgcagtacgacggtcgcataccttacccgcggccaggaacctgtccatctaagacttatgatcccctcatcaagagcaccagagacttccccgatgacgtaatatcatttatcaagcggcactctgtaatgtacaagtccgtatacccggtcgccggcgggccaacttttaaacgcattaacgttgactacaggctgacacagatcgtcgtagatcacgtcatcgcagaggacggccaatacgacgtgatgttcctaggcacagatatcggcaccgttctaaaagtggtctctatctccaaagaaaagtggaacatggaagaggtggtgcttgaagagctgcagatctttaagcactctagtattatattgaatatggagcttagcctcaaacaacagcagctctatatcggaagccgcgacggactcgtccagctctctcttcataggtgcgatacctacggaaaagcctgcgccgattgttgtctggccagggatccttattgtgcctgggatggtaacgcatgttcccgctatgccccaaccagtaaaagaagagcacgtcgccaggatgtgaaatatggcgatccgattacacagtgttgggacatcgaagatagcatttctcatgaaaccgccgatgagaaagtcatcttcggcatagaatttaacagtacttttcttgaatgtataccaaagtcacagcaggccaccatcaagtggtatatccagcgcagtggggacgagcatcgggaggagctgaaacctgatgaacggatcatcaagaccgagtatgggcttcttattaggtcgctgcagaaaaaagattctggcatgtattattgcaaggcccaggaacatacatttatccatactatagtaaaactgactttaaatgtgatcgaaaacgaacagatggaaaatacccagagagccgaacatgaggaggggaaggtaaaggacttgctggccgaatccagactccgttacaaggactacattcagatactatctagccccaatttctcactggaccagtattgtgagcagatgtggcaccgggaaaagaggagacaacgcaacaagggtggcccaaaatggaaacatatgcaggagatgaagaaaaagaggaacaggcgccaccatcgcgacttggacgaactgccacgtgctgtggcaacctag

SEQ ID NO: 8660 - DNA, 1332 bp, synthetic construct
  misc_feature 1..1332: note = source = /note="Description of Artificial Sequence: Synthetic coding sequence"
  source 1..1332: mol_type = other DNA
atgcagcccagcgagatggtgatgaaccccaagcaggtgttcctgagcgtgctaatatttggggttgcaggtctcctactgttcatgtacctccaggtgtggatagaagaacagcacactggtagagtggaaaaacgccgggagcaaaaggtcacctcaggctggggcccagttaaatacctgagacccgtacctcgcattatgagcacagagaagatacaggagcacattactaaccagaacccaaagttccacatgcctgaggatgtgcgggagaagaaagaaaatctcttgctcaacagcgagcgctcgactcgcctgttgacgaagacatctcactcccagggcggggaccaggcacttagcaaatccacagggagcccaaccgagaagttgatagagaagcggcaaggggccaaaacagtgttcaacaaattctccaacatgaattggccagtcgatatccacccgctcaataagagccttgttaaggacaataagtggaagaagaccgaagaaacccaggagaagcggcgctcgttcttgcaggagttctgtaagaaatacggtggagtgtcacatcatcagtctcatttgtttcacactgtctcaaggatttatgttgaggataaacacaaaatcctatattgtgaagtgcccaaggcaggctgcagtaattggaagaggatcttgatggtgttaaacggattggcaagctctgcgtacaacatctcacacaacgcggtgcattacggcaagcacctgaaaaagctcgatagcttcgatctaaaaggcatttacaccaggctaaacacctataccaaggctgtgttcgtgagggacccaatggagcgactggtctcagcattccgtgacaaatttgagcaccccaattcatattaccaccccgtgttcgggaaggcaataattaaaaaataccgccccaacgcatgcgaagaggctctgattaacggctccggggttaagtttaaggagttcatccattatctgttagattctcaccggcctgtgggcatggacatccactgggaaaaagtgtctaaactctgttatccatgcctcattaactacgactttgtcggtaaatttgagaccctggaagaggatgccaattactttctgcagatgatcggggcccctaaagaactgaagttccccaattttaaagatcgccacagctcggacgaaaggaccaacgcgcaggtggtgcggcaatatctgaaggatctgactcgcactgaacgccagctcatctatgatttctattatctagattatcttatgttcaactatacaaccccatttctgtag

SEQ ID NO: 8661 - DNA, 3228 bp, synthetic construct
  misc_feature 1..3228: note = source = /note="Description of Artificial Sequence: Synthetic coding sequence"
  source 1..3228: mol_type = other DNA
atgcggggcggcaagtgcaacatgctgagcagcctgggctgcctgcttctctgtggaagcattacgctggccttgggcaatgcccagaagcttcccaaggggaagagacctaatttaaaggtgcacatcaacacaacctctgatagcatcctattgaagttcctgcgtccgagtccgaatgtgaagctggagggcctgctgctcggatacggatctaatgtgagtcctaaccagtattttcctttgcctgcagagggcaagttcaccgaagccattgtagacgccgagcctaagtatctcatcgttgtacggcctgctcctccaccttcccagaagaaatcctgtagcgggaagacccgctcacgaaaacccttgcagctagtggttggaaccctgacaccttctagtgtgttcctatcttggggttttctgataaacccccaccacgactggacgctcccatcccactgccccaacgacaggttttatacaatcagatatagggagaaagacaaggagaagaagtggatcttccagatttgtcccgcgaccgaaacgattgtggagaatctgaaacctaacaccgtgtatgagtttggagtgaaggacaacgttgaggggggtatctggagtaaaatcttcaaccacaagaccgtggtggggtccaaaaaggtcaatggaaagatccagtcaacctacgatcaagatcacacagtgcccgcctacgtgccccggaaactgataccaatcaccatcatcaaacaggtgattcaaaatgtgacccataaggatagcgctaagtcccctgagaaggcccccctgggaggtgtgatcctggtacatctaattatccctggactgaacgaaactacggtcaagttaccagccagtctcatgtttgaaatcagcgacgcactcaagacccagctggctaagaacgaaactttagctttacctgcagaatctaaaacccccgaagttgagaaaatttccgctcgtcctacgactgtcacccccgagaccgtcccacggtctacaaagcccaccaccagcagtgcattagatgtaagcgagactaccctggcgagtagcgaaaaaccatggattgtccctactgccaagatctccgaagactctaaagtgttgcagccacagacagcaacttatgacgtgttctcatccccaactacatccgatgagcctgagatttctgatagctacacagccacatcagatcggatcctggattccatcccccctaaaactagtcggacactggagcagcctagggctacgttggccccgagtgagaccccctttgtgccccagaaacttgagatttttacaagccctgaaatgcagcctacaactcccgctccccagcagaccacttctatcccctccacaccaaaaaggcgacctcggcccaaaccaccacgcacaaaaccagaacggaccacttcagctggaaccatcacccctaaaatctccaagtccccagagccgacttggaccactccagctccagggaaaacccaattcatttccctgaagccgaagattcctctgtctccagaagtgacacatactaagcccgcccctaaacagactcccagggcgccaccaaaaccgaagacctctcctcgacccagaatcccccagacccagcctgtacccaaggttcctcaaagagtgacggctaagccaaaaacttccccctccccggaggtgtcctatactacccctgcacccaaggatgtcctcctgccccacaagccttaccccgaagtttcacagagcgagcccgcaccacttgagacgcggggcattccctttattcccatgattagcccctccccctctcaggaggaactgcagacaacgctggaagaaaccgaccagagcactcaagagccttttaccactaaaattccacgaacgactgagttggcaaaaaccacacaggccccgcaccgtttttacactaccgtcagaccacgcacatcagataagccccacattagaccaggcgttaaacaggcacctagaccaagtggggcggatcgaaacgtttccgtcgattctacgcatccgaccaagaaacccggtactcgccgaccacctttgccgccaagacctacccacccacgcaggaagcctctgccccctaacaatgtcaccggtaagcccggtagcgcaggcataatcagctctggacccatcaccacaccccccctacgctcaacccccaggcctacgggaaccccgctggaacgtatcgagaccgacatcaagcagccaaccgtgcctgccagcggcgaagaactcgaaaacattaccgatttttctagttctcccacacgtgaaacagacccgctgggaaagccccggttcaaaggccctcacgtacgttacatccaaaagcctgataactcgccatgtagcattacggactcggtcaagcgcttcccgaaggaagaggccacagaaggtaacgctacctctccgcctcagaaccctccgacgaacctcaccgtcgtcaccgttgagggttgcccttccttcgtgatcttggactgggagaagcccctgaatgataccgtcactgagtacgaggttatctctcgggaaaatgggtcctttagcggtaaaaataagtctattcagatgacaaatcagaccttttcaaccgttgagaatctcaagccgaatacatcttacgagtttcaggttaagccgaaaaatccattgggcgagggtccagtttctaacaccgtagcattctcaacggaatccgctgaccctagggtttctgagcctgtcagtgccggaagagacgcaatttggaccgaacgcccctttaacagtgatagctatagcgagtgtaagggcaaacagtacgttaagcgaacttggtacaaaaagtttgtcggggttcagttatgcaacagtctgcggtacaagatatatctgtcggattctttgacaggaaaattctataatattggcgaccagcgggggcacggggaggaccattgccaattcgtcgattcctttctggatggtaggaccgggcaacagttgaccagcgaccagctacctattaaagagggctattttcgcgctgtgagacaggagcctgtacagttcggtgagatcggaggccacacccagatcaattatgtgcagtggtatgaatgcggtaccacaatcccaggaaagtggtag

SEQ ID NO: 8662 - DNA, 483 bp, synthetic construct
  misc_feature 1..483: note = source = /note="Description of Artificial Sequence: Synthetic coding sequence"
  source 1..483: mol_type = other DNA
atgctgcccttcctgttcttcagcaccctgttcagcagcatcttcacggaggcccagaaacagtactgggtgtgtaatagttccgatgcatccatcagctacacctattgcgacaagatgcagtaccctatctccatcaacgtaaatccatgcatcgagttgaagcgcagcaaaggccttctgcacatattttacattccaagacgtgacttgaagcaactctatttcaacctgtatatcacggtaaatacaatgaatcttccaaagaggaaggaggtaatttgtagaggtagtgacgacgactattcattttgccgcgcactaaagggtgaaaccgtgaacactacaatctctttctcattcaagggaatcaagttttcaaaaggaaaatataaatgcgtcgtagaagccattagcgggagcccagaagagatgttgttctgtctcgagtttgtgatactgcaccagccaaatagcaattag

SEQ ID NO: 8663 - DNA, 780 bp, synthetic construct
  misc_feature 1..780: note = source = /note="Description of Artificial Sequence: Synthetic coding sequence"
  source 1..780: mol_type = other DNA
atggccgccctgatgcggagcaaggacagcagctgctgcctgctgttactggcggcggtgctcatggtggagtcgagccagatcggttctagccgcgctaagttgaacagcatcaaatcatccctggggggggagacaccaggtcaagctgctaacagaagtgccggcatgtaccagggcctcgcctttggtggatccaagaagggtaaaaatcttgggcaagcctacccctgcagctccgataaagagtgcgaagtggggaggtactgccacagtccgcaccaaggctccagtgcctgcatggtgtgtagacggaagaagaagcgctgccatcgggacggaatgtgctgcccttccactagatgcaacaacgggatatgcattcctgtcaccgagagcatactgaccccgcacatacccgcccttgacggcactcgccatcgggatcgtaatcacggacattattctaaccatgacctcggttggcaaaatttaggtcgtccacacaccaagatgtcgcacattaagggccacgaaggagatccctgtttgcgctcttccgattgtattgaagggttctgctgtgctcggcatttctggacaaagatctgcaagccggttctacatcagggagaggtctgcactaaacagcgtaagaagggctctcacgggctggaaatctttcaaaggtgtgactgcgcaaagggccttagctgtaaggtttggaaggacgccacgtactcatctaaagcacgcctccacgtgtgccaaaagatctag

SEQ ID NO: 8664 - DNA, 3030 bp, synthetic construct
  misc_feature 1..3030: note = source = /note="Description of Artificial Sequence: Synthetic coding sequence"
  source 1..3030: mol_type = other DNA
atgggccagctgtgctggctgcccctgctggcccccctgctgctgctccggcccccaggcgtccaatcagccggacccatcagggcttttgtcgtaccacactcccacatggacgttggatgggtgtataccgtgcaggagtcaatgcgcgcctacgccgcaaatgtctatacctctgtcgtggaggagcttgcccgcggacagcagcgcaggttcattgctgttgagcaagagttcttccgattgtggtgggatggcgtagcgtccgaccagcagaaatatcaggtgcgtcaactcctcgaagagggaagactcgaattcgtcatagggggccaagtgatgcatgatgaggccgtgacccatctggacgatcagatcctgcagcttaccgaaggccacggattcttgtacgaaacctttgggatccggccccagttctcatggcacgtggatccttttggggccagcgctacaaccccaacactgttcgccttggccggatttaatgcccaccttggaagtaggatagactacgacttaaaggcggcaatgcaagaggccagagggctgcagttcgtttggcgcggtagccccagtctcagtgagaggcaggagatcttcacccacatcatggatcaatacagctattgcacaccttcccatatccctttcagtaacagaagtggattctactggaacggggtggctgtcttcccaaagccccctcaggatggcgtttacccaaacatgtccgagcctgtgacaccagcgaatatcaatttgtacgctgaggccctggtagccaatgtgaaacagcgggctgcctggttccgtacaccacacgtgctgtggccctgggggtgtgacaagcagtttttcaatgcgagtgtgcagttcgctaacatggatcctctgttggaccacatcaatagtcatgcagctgagttaggagtgtccgtccagtatgcaaccctcggcgattacttccgcgctctccatgctctaaatgtaacatggcgcgtaagggatcatcatgactttttgccatatagtacagagccattccaggcatggaccgggttttacacctctcgctcctctctcaaggggctcgcccgcagggcatccgcattattgtatgctggtgaatctatgttcacgagatatttgtggccggctccccgtggccatctggaccctacatgggcgttgcagcaactccagcagctcaggtgggcagtgagtgaggttcagcatcacgacgcgatcacaggaaccgaaagccctaaggtcagagacatgtacgccacgcatctagccagcggaatgctcgggatgcggaagttgatggcttccattgtgcttgacgaactccagcctcaagcccccatggcagctagtagtgacgccgggcccgcaggccatttcgcttctgtctacaatccgttggcatggactgtgacaacaatcgtgacattgaccgtgggttttcccggtgtccgggttactgatgaggctgggcatccagttccttctcagatacagaacagtacggagactccatctgcgtatgaccttctcattcttaccactattcctggcctgtcctaccgccattacaatatccggcccactgctggtgctcaggagggtacgcaggagcccgccgctactgtggcctcgaccctccagttcggaaggcgtctgcggaggaggacttctcacgccggcagatatttggttccagtggcgaacgactgttatatcgtactgcttgaccaggacaccaacctgatgcattctatctgggaaagacagtcaaatcgaactgtgcgggtcacacaggaattcctagagtatcatgtcaacggggatgtgaagcagggaccgatcagtgataattatctatttacccccggtaaggccgctgttccagcttgggaagctgtggaaatggagattgtcgcaggacagttagtgacagagatccgtcagtatttttaccgtaacatgactgcacagaattatacctacgctataaggtctcgactaacccacgtcccgcagggccacgacggagaattgctgtgccatcgaatcgaacaggaataccaggctggccctcttgaactgaatcgagaggccgtgctgcgcacgagcaccaatctgaacagtcagcaggtcatctactctgacaacaatggctatcagatgcaaaggcgcccatatgtgagctatgttaacaactctatcgcacggaactattatcccatggtgcagagtgccttcatggaggatggtaaaagccgcctagtccttctcagtgaaagggcgcacgggatttcttcgcagggtaatggacaggtcgaagtcatgctgcatagacgcttgtggaacaacttcgactgggacctcggatacaacctgacgctgaatgatacaagcgttgtgcaccctgtgctttggctgcttcttggatcatggagcctgaccacggcactcagacaacgcagtgcccttgccttgcaacaccgtccagttgtgctgtttggcgatctggccggtacagcccccaagctgccgggccctcagcagcaagaagccgtgacattacctcccaacctccatctccaaattctctctatccccggttggagatattcctctaaccacacagagcactctcagaacctgagaaagggacataggggggaggcccaggcagacctgcggagagttctacttcgactgtatcacctgtacgaagttggcgaggatccagtgctttctcagccagtaacagtgaatttagaagcagtcctgcaggcactgggcagcgttgtagctgttgaggagaggagcctcactggcacctgggacttgtcgatgctccatcggtggtcatggaggactggcccaggcaggcacaggggagataccacttcaccctcaagacctccaggaggcccaataataaccgtccatcccaaagaaataaggacttttttcattcattttcagcagcagtag

SEQ ID NO: 8665 - DNA, 1443 bp, synthetic construct
  misc_feature 1..1443: note = source = /note="Description of Artificial Sequence: Synthetic coding sequence"
  source 1..1443: mol_type = other DNA
atgctgttccggaaccggttcctgctgctgctggccctggccgccctcctggcattcgtctctctgtctcttcagttttttcatctcatacccgtgtccaccccaaagaacggaatgagttctaaatcaagaaagaggattatgcccgaccccgtgacagagcccccagttactgacccagtctatgaggctctgctctactgcaacattccatccgtcgcagaacgatccatggagggtcatgctccccatcattttaaactcgtctccgtgcatgtgtttatcagacacggggaccggtacccactgtacgtcattcccaaaacaaagcgcccagagatcgactgcaccctagtcgccaacaggaagccctaccacccaaaactggaggctttcattagccacatgtccaaggggagtggtgcctctttcgagtctcccctcaacagcttgcccctctaccccaatcatccactatgcgagatgggggagcttacccagactggtgttgtgcagcatcttcagaatgggcagctgctccgggatatttatttgaaaaaacataagctgctgcctaacgactggtctgccgaccagttgtaccttgagacaaccgggaagagcaggaccctgcaaagtgggctggccctgctttacggatttctaccagactttgactggaagaagatatactttcggcatcaacccagcgctcttttttgctccgggtcctgctactgcccagttaggaaccaatacctggaaaaggaacagagacggcagtacctgctgaggttgaagaactctcaattagaaaaaacttacggagaaatggctaagatcgtggatgttcctacaaagcagctaagagccgcgaatccaatagacagtatgttgtgccacttctgccacaacgtttcttttccttgtactcgaaacgggtgcgtggatatggagcatttcaaagtaataaaaacccaccagatagaggacgaaagggagaggcgggagaagaaactgtactttgggtactcacttttaggggcccacccaattcttaaccagaccattggacgcatgcaacgtgccacagaggggagaaaggaggagctctttgccctctattccgcacacgacgtgaccctgtcacccgtattaagcgccctgggccttagcgaagccaggttccctcgcttcgctgctagactcatatttgagctgtggcaggaccgggagaagccttcagaacattctgtccggattctgtacaatggtgtagatgtcacttttcacactagcttctgtcaggatcatcataaaagatcaccaaagcccatgtgtcccctcgaaaatctggtgaggtttgtgaaaagagatatgttcgtggccctcgggggatccggcaccaattattatgacgcgtgtcaccgggaaggcttttag

SEQ ID NO: 8666 - DNA, 1341 bp, synthetic construct
  misc_feature 1..1341: note = source = /note="Description of Artificial Sequence: Synthetic coding sequence"
  source 1..1341: mol_type = other DNA
atgctgcaccccgagaccagccccggccggggccacctgctggccgttttgctcgcactcttggggacggcatgggccgaagtctggcctcctcagctgcaggagcaggccccaatggccggcgccctgaaccgcaaagaaagcttccttctgctatccctgcacaacaggctgagatcttgggttcagcccccagccgccgatatgcgcaggttggattggtctgattcattggcgcagctggcccaggcaagggccgccctgtgcggcactccaaccccctccctggcaagtggcctttggagaactctgcaggtcggatggaacatgcagctgttaccagcaggcctagttagctttgttgaagtggtctccctatggtttgccgaaggccagaggtattcacacgctgcaggcgaatgtgctagaaacgctacatgcactcattacactcagctcgtctgggctacttcctcacagttgggctgtgggcggcatctgtgctctgcaggtcaagccgccatagaggccttcgtttgtgcatactcgccccgaggcaactgggaggtgaacggtaaaactatcgttccttacaaaaagggagcctggtgctcgctgtgtaccgcaagtgtcagcgggtgtttcaaagcctgggaccacgctggcgggctgtgcgaagtgcctcggaatccctgtcgtatgagttgtcagaaccacggccgccttaatatctcaacctgccactgccactgcccacctggttacactgggagatactgccaggtccgctgctcgcttcagtgcgtccacggcaggtttcgagaggaggagtgctcttgtgtgtgcgacatcggatacgggggcgcgcagtgtgcaaccaaagtgcactttcctttccacacgtgcgatttgcgtattgacggggattgctttatggtctcatcagaagcagatacatattatcgtgcacgcatgaaatgccagcggaagggtggcgtcttagcgcagataaaatcacagaaggtgcaagatatccttgcattctacctcggtcgtctagaaaccaccaatgaagtcattgattctgattttgagaccaggaacttttggatcggcctcacctacaagactgccaaagattcattcagatgggccacaggcgagcaccaggctttcacaagctttgcgttcgggcagcctgataaccatggttttgggaactgtgtcgagctgcaggcctcagctgccttcaactggaacgaccagcgctgcaaaactagaaataggtacatatgtcagtttgcccaagaacacatttccaggtggggcccaggatcctag

SEQ ID NO: 8667 - DNA, 2313 bp, synthetic construct
  misc_feature 1..2313: note = source = /note="Description of Artificial Sequence: Synthetic coding sequence"
  source 1..2313: mol_type = other DNA
atggtggagagcgccggccgggccggccagaagcggcccggcttcctagaaggaggccttctgctcctcctgttgctggtcacagcagccttagtggccctcggcgtgttatacgctgaccgcagaggtaaacagctgccgcggctggccagccggctgtgcttcctgcaggaagagagaacctttgtgaaacgtaaaccacgaggaatacctgaagcacaggaggtcagcgaggtatgtaccacaccaggttgtgtcatagccgctgctcgcattctgcaaaatatggaccccaccacggaaccttgtgacgacttctatcagtttgcttgcggcggttggctgcgccgccacgtgatccccgaaaccaattctcgctacagcatttttgatgtgctgagggacgagttagaggttatcctgaaggccgtgctggaaaatagcactgccaaggatcggcccgccgtggaaaaggcgcggaccctttatcgttcttgtatgaaccagagtgttattgagaagcgcgggagccaacctctcctcgacattctggaagtagtgggaggttggcccgtcgcgatggaccgttggaacgaaaccgttgggctggaatgggagctcgagcggcagctcgcgctcatgaatagccagttcaatcggcgggtcttaatcgatcttttcatctggaatgacgatcagaacagctcccgacatataatctacattgaccaaccaactctgggcatgccttcccgagagtactacttcaacggggggtccaatagaaaagttagggaagcttacctccaattcatggtgtccgtcgcgactctgttgagggaggacgccaacctgcctagggatagttgtttggtacaggaagacatggtgcaggttcttgagctggagacacagctggctaaggcaaccgtgccacaggaagagcggcatgatgtgattgccctgtatcaccggatgggtctggaggagctgcagagtcagtttggactgaaaggctttaactggaccctgtttattcagacagtactgtcaagcgttaagataaagttactgcctgatgaagaagtggtggtgtacggtatcccatacctgcaaaacctggagaacatcatcgacacttacagtgctcggacaatccagaactatttggtctggaggcttgtgcttgacagaataggatccctatctcaacggttcaaagatacacgtgtgaactataggaaagcacttttcggaaccatggttgaggaggtacgttggcgtgagtgtgtgggatatgttaactcaaacatggagaatgctgtcggttctctgtacgtgagagaggcattccctggagattctaagtctatggtcagggaactgatagataaagttagaaccgtgtttgtggaaacacttgacgagctcggctggatggatgaagaatccaagaaaaaggcccaagagaaggccatgagtatacgagaacagatcggccaccccgactatattctggaggagatgaatagacggctggacgaggagtactctaacctgaacttctcagaagacctgtatttcgagaacagcttgcagaatctgaaggtcggcgctcagaggtcactgagaaaacttcgcgagaaagtggatccaaacctttggatcattggagcagctgtcgtgaacgccttctactcacccaatcggaaccagatcgtgttcccagctggtattttgcagccgcccttcttctctaaagaacagccccaggcgttaaatttcggcgggattgggatggtgattggacacgaaattacccatggctttgatgacaatgggaggaatttcgataaaaatggaaatatgatggactggtggtcaaattttagcactcagcactttagggaacagagcgagtgtatgatctatcagtacggcaattatagctgggatctcgccgacgaacagaatgtgaacggattcaataccctgggtgagaatatcgcggacaacggcggagtgcggcaagcttacaaagcctacctgaagtggatggctgagggaggtaaagaccagcagttgccaggccttgatctcacccacgaacagctttttttcatcaattacgcacaggtttggtgcgggtcctaccgccccgagtttgccatccagtcaatcaagacagatgtacattcgccactgaagtaccgagtgttggggtccctccagaatctggccgcctttgccgatacatttcactgtgcacgcggcactcctatgcatccgaaagaaagatgtcgggtctggtag

SEQ ID NO: 8668 - DNA, 1317 bp, synthetic construct
  misc_feature 1..1317: note = source = /note="Description of Artificial Sequence: Synthetic coding sequence"
  source 1..1317: mol_type = other DNA
atgagcaagcgggacaaggccggcaaggacaccgcccggggcaaggggaaggacatatctaagtatggatcagttcaaaaatctttcgccgacaggggactacccaaacctcccaaggagaagctccttcaagttgaaaagctaagaaaagagagcggcaaaggatcatttctgcagcctacagccaaacctcgggcactggcacaacaacaggccgtcatcaggggctttacgtactataaagcgggtaagcaggaggtcaccgaggctgtggcagataatacgcttcagggaacctcttggttggagcaactgccgcctaaggtggaggggcggagtaactccgccgaacctaattcagcggaacaggatgaggcggagccgcgttccagtgaacgcgtggacctggccagcggtaccccaacctcaattcccgcaacaacaacaacggctacgactacccccacacctaccacttccctgctacctactgaaccaccatcagggcctgaggtatccagccagggccgcgaagcctcatgtgagggcacacttagagccgtggacccaccggtccgccaccatagctatgggagacacgagggcgcctggatgaaggacccggcagctcgtgatgaccggatatacgtgaccaattactactatggcaatagcctggtcgaattcaggaatcttgaaaatttcaaacagggacggtggagcaatatgtataagctgccctataactggatcgggaccggtcatgtggtctatcagggagccttctactataatagagcctttactaagaacatcataaagtacgatttgcggcaacgcttcgtcgcatcatgggccttactgcctgatgtagtctacgaagacacaaccccatggaagtggcgggggcacagcgatatcgacttcgccgtcgatgagtcagggctgtgggtaatttaccctgcggtagatgatagggatgaggctcaaccggaggtcatcgtactttctcgcctcgaccccggcgatctctcagtgcacagggagaccacgtggaaaaccaggctgcgtagaaattcctatgggaattgctttttggtctgtggcatcttatacgctgtggacacatataaccagcaggaaggccaggtcgcctatgcctttgatacccacactggcaccgatgcgagaccccagctgccctttctgaacgagcatgcatacacgacccagatcgactataaccccaaggagcgcgtcctgtacgcatgggacaatggtcatcagctgacctacactttgcacttcgttgtttag

SEQ ID NO: 8669 - DNA, 3570 bp, synthetic construct
  misc_feature 1..3570: note = source = /note="Description of Artificial Sequence: Synthetic coding sequence"
  source 1..3570: mol_type = other DNA
atgcccggcctgctgaactggatcaccggcgccgccctgcccctgacggcttctgacgtgaccagttgtgtatctggctatgcgctgggtttgacggccagtctcacatatggaaacctggaggcacagccatttcaaggtctgtttgtgtacccactcgatgagtgcacaaccgttatcggattcgaagcggtgatcgcagaccgcgtagtgaccgtccagatcaaggataaggctaagctggaatcaggacatttcgatgcctctcacgtgcggtctccaaccgtgaccggcaatatcctccaggacggcgtgagcatcgctcctcattcctgcactccaggcaaggtgaccttggatgaggatctcgagcggattctctttgtagcaaacttggggaccatcgcccccatggagaatgtgacgatcttcatatcaacaagcagcgagctgcctactttgccttcaggggccgtgcgcgttttgctaccagctgtttgtgcgcctactgtgccccagttctgcacaaagtctactggcacttccaatcagcaggcacagggcaaagatcggcattgctttggagcctgggctcctggctcctggaacaagctgtgtctcgccaccctgctgaataccgaggtatcaaacccgatggaatacgaattcaactttcagcttgagattcgaggcccttgtttactggctggtgtggagtcaccaacccatgagattagagcggacgctgctcctagcgcccgctccgcaaagtctattattatcaccttagcgaataagcacacatttgacaggcccgtggagattctgatccacccaagcgagccccacatgccacacgttctgatcgaaaagggtgatatgactctgggagaatttgatcaacatctgaaggggcgcaccgatttcataaaaggaatgaaaaaaaaaagcagggccgagcggaaaacggaaatcattagaaagcgcttgcataaggacataccacaccattcagtcataatgctgaacttctgccctgatttgcagagtgtgcaaccatgcttgcgcaaggcacacggcgagtttatctttctaatagacagatcttccagtatgtccggaatcagcatgcatagagtgaaagatgccatgctggtggcccttaaaagtttgatgcctgcttgtctgtttaatattattggctttggatcgacttttaaaagcctctttccttctagtcagacttattccgaggatagccttgcaatggcctgtgatgatatccaacggatgaaggctgacatggggggaaccaatatcctgtcccctttaaagtgggtgatcaggcagccagttcaccggggacatccacgcttactgtttgtgatcacagacggcgcagtgaataacaccggcaaagtgctagagctggtgcgcaaccatgcttttagtacccgctgctactcctttggcattggcccgaacgtgtgtcaccggttggtcaagggcctcgcctcagtgtccgaaggctctgctgaattgctgatggaaggtgagcgcctgcagcctaagatggttaaatcgctcaaaaaggcaatggcccctgttctctcggatgtgacggttgagtggatcttcccggagacaaccgaggtgctggtgagccccgtctctgcgagcagtctgttcccaggagagaggttggtcgggtacggcattgtgtgcgacgcttcattgcacatctcaaacccacggtccgataagagaaggcggtactccatgctgcatagccaggagtcggggtccagtgtgttttaccactctcaggacgatggtcctggactggaaggtggggattgtgctaagaattccggagcccctttcatcctaggccaggcaaagaacgctcgtcttgctagcggtgattcgaccacaaagcatgacttgaacctgtctcaacgcagacgtgcatactccacaaatcagatcacaaatcataagccactgccaagggctactatggcttccgacccaatgcccgcggccaaaagatacccgcttcgtaaggcccgcctccaggacttaactaaccagacaagcctggacgtacagcgatggcagatagacctccagcctctcctgaactccggacaggacctgaatcagggcccaaagctgcggggtccgggagctcgtcggccatcactcttgccccagggatgccaaccattccttccctggggccaggagactcaggcatggtcaccagtacgggagcgtacctcagattctagaagcccgggggatctggagccatcccatcacccgtcagcttttgagaccgaaaccagcagtgactgggacccccctgctgagtcgcaagagcgagcctccccttctagaccggcaaccccagctcctgtgctcgggaaggccctcgttaagggattacatgatagccagaggctacagtgggaggtcagcttcgaacttggaactccaggacctgagcgaggaggcgctcaggacgccgacctctggtcagagacatttcaccacctagcagcccgggccatcatccgagactttgagcagcttgcggaacgtgaaggtgaaattgaacagggatcgaatagacgttaccaggtcagtgccctacacactagtaaggcctgcaacattatctccaaatatacagcattcgtccccgtggatgttagcaaatcccgatatctgcctacggtggtagaatatccaaattccgcggccctgaggatgctcgggtcacgcgctcttgcccagcagtggaggggtactagctcagggttcggaaggcctcagacaatgttaggtgaggatagtgcccctggaaatggccctcagcggtcactggcaaccaatacattgtcatccatgaaagcctccgagaacctgttcggaagttggctgaacctgaacaagtctaggctcctcacccgtgctgccaaaggctttctttccaagccactgatcaaggctgtggagagcacgagcgggaatcagagcttcgactatatcccgctggttagcctgcagctggccagcggagctttccttctgaatgaggcattctgcgaggctactcatattcccatggaaaagctcaagtggacaagcccctttacttgtcacagagtgagccttaccactagacccagtgagagtaagacaccaagtccacagctatgtacttcctcacctcctcgccatccctcctgtgactccttcagcctagaaccattggctaagggcaagctggggcttgagccacgcgcggtggtggaacacacaggtaagttgtgggcaactgtggtaggattagcttggctggaacattcaagtgcctcctatttcacggagtgggagcttgtggctgcgaaggcaaattcctggctggagcaacaggaagtgccagaagggaggactcaggggactctgaaagcggccgctcgacagctctttgtgcttctgcggcactgggacgagaatctggaatttaatatgttgtgctacaatcctaattacgtgtag

SEQ ID NO: 8670 - DNA, 1344 bp, synthetic construct
  misc_feature 1..1344: note = source = /note="Description of Artificial Sequence: Synthetic coding sequence"
  source 1..1344: mol_type = other DNA
atgccccacgtgctgatcgagaagggcgacatgaccctgggcgagttcgatcagcatctcaaagggcggaccgatttcatcaaaggaatgaagaagaaatcacgtgcagagcgtaaaacagagatcatccggaagcggctccacaaagatattcctcatcatagcgttattatgttaaatttctgtccggacctgcagtctgttcagccgtgtttgcgcaaggcacacggcgagttcatcttccttatagaccgcagttcgagtatgtcaggcataagcatgcatcgtgttaaagatgcaatgttagtggctttgaaaagcctcatgcccgcctgcctctttaatattatcggattcggatccaccttcaaatccctgttcccttcgagccagacctattcagaggactctctcgccatggcatgcgacgatattcagcggatgaaagcggatatgggaggcactaacatcttatcacccctgaaatgggtgatcagacagcccgtgcacaggggacaccctcgtctcctattcgtgatcactgatggcgccgtgaacaataccggtaaggtgctggaactggtacgcaaccatgcgttctccactaggtgttactcattcgggataggtcctaacgtttgccaccgactggtgaagggcctggccagtgtgagtgagggctccgccgaactgttaatggaaggggaacgattgcagcctaagatggtcaaatcactgaagaaagctatggcccccgtactgtcagatgtcactgtggaatggatttttccggaaacaaccgaggtgcttgtgtcacccgttagcgctagcagcctgtttccgggagagcgcctggtgggttacggcattgtatgcgacgctagtctccacatttcgaaccctcgaagtgataagcggcgcagatactccatgctgcacagccaagagtcaggatcttccgtcttttatcattcccaggacgatgggcccgggctcgagggcggggactgcgccaagaattccggggccccttttatcctcgggcaggcaaagaatgcccgactcgcctccggggacagcaccaccaaacatgatctcaacctgtcacagagacgtagagcttattctactaatcaaattaccaatcataaaccgttgccaagggctacaatggcctccgaccctatgccggcagcgaagcggtaccctctgaggaaggccaggctgcaagacctcactaaccagacttctttggatgtgcaaaggtggcagattgatctgcaggccttcatctgcttaacttccgaagacacattccagatccgcacccccaccggccaatag

SEQ ID NO: 8671 - DNA, 726 bp, synthetic construct
  misc_feature 1..726: note = source = /note="Description of Artificial Sequence: Synthetic coding sequence"
  source 1..726: mol_type = other DNA
atgtggaccgtgcggaccgagggcggccacttccccctgcacagccccactttttcatggagaaatgtggctttcctgctgctgctttccctggcactggagtggacatctgcaatgcttacgaagaagatcaagcacaaaccagggttgtgtcccaaagagcggttaacctgtacaacagaactgcctgatagttgtaatacggactttgactgtaaagaatatcagaagtgttgcttttttgcctgtcagaaaaagtgcatggatcccttccaagaaccttgtatgctgcctgtccgacatggcaactgcaatcatgaggcacagcgctggcattttgattttaaaaactacaggtgcacccctttcaaatatcgaggatgtgaaggtaatgccaacaattttctgaacgaagatgcctgtcggaccgcgtgcatgcttatcgtgaaagacggacagtgccccctgtttccctttacggagagaaaagagtgtcctccgtcttgtcactcagacatcgactgcccgcagaccgacaaatgctgtgagtctagatgtggctttgtctgtgcacgtgcctggacggttaagaagggattctgtcccaggaagccactcctgtgcaccaaaatagataagccaaaatgcctccaagacgaagagtgtcccctggtcgagaaatgttgcagccattgcggcctcaagtgtatggatccccggcgctag

SEQ ID NO: 8672 - DNA, 1074 bp, synthetic construct
  misc_feature 1..1074: note = source = /note="Description of Artificial Sequence: Synthetic coding sequence"
  source 1..1074: mol_type = other DNA
atgcggcccccccccgccctggccctggccggcctgtgcctgctggccttgccagctgctgcggcttcttattttgggctgaccggaagagaggttctcaccccctttccaggcctgggaaccgcggctgccccagcccaaggtggggcccacctcaaacagtgtgaccttctgaagctttctcgaaggcagaaacagctgtgtcgccgcgaaccaggcctggcggagactctgcgggacgcggcccatctgggactgctcgagtgccaattccagtttcggcatgagagatggaattgctcactagaaggccgaatgggacttcttaagcgtggctttaaggagactgcctttctttatgccgtcagcagcgctgctttgacccacactctggctagggcttgcagcgcagggagaatggaaagatgcacctgtgacgacagtcctggcctagagtccaggcaggcctggcagtggggcgtgtgcggtgacaatctgaagtatagcaccaaattcctgtcaaatttcctgggtagtaaaagagggaacaaagacctgagagcccgcgccgacgcccataacacccacgtcggcataaaggctgtgaagtctggtctacggaccacatgtaaatgtcacggagtgagtgggagctgtgccgtgcgtacatgctggaaacagcttagtcctttccgcgagactggtcaggttctcaaattgcggtatgattcagcagtcaaggtctctagcgctacaaacgaagctctgggccggctcgagttgtgggcccctgcccgccagggctccctaaccaagggtttagcccctcgtagcggcgatctggtgtatatggaggattcaccgtctttctgcagaccttctaagtactctcctggcactgcaggacgcgtctgctcaagagaagcttcatgctctagtctctgctgcggaagggggtacgatacacaaagcagactggtcgccttcagctgccattgccaggtgcaatggtgctgttatgtcgagtgtcagcagtgtgtacaggaagagctggtctatacttgcaaacactag

SEQ ID NO: 8673 - DNA, 810 bp, synthetic construct
  misc_feature 1..810: note = source = /note="Description of Artificial Sequence: Synthetic coding sequence"
  source 1..810: mol_type = other DNA
atggtgcggtgcctgggccccgccctgctgctgctgctgctgctggggtcagcgagcagcgtaggaggaaatcgttgtgttgacgcggctgaagcctgtacagccgacgcccgctgtcagaggctcagatccgaatacgtggcccaatgtctcggcagggcagcccagggcgggtgtccgagagcccgctgtcgccgagctctcagaaggttctttgctaggggtcccccagcactaacccatgctctgctcttttgtccttgcgctgggccagcctgtgcagagcgcagacgacagaccttcgtgccttcgtgcgccttctccggccccggaccagctccaccaagttgtctggaaccgctgaatttttgtgagaggtctagggtctgcaggccaagactgctagcatttcaggtcagctgtactccagctccttctgcccccgacgggtgtttgcttgaccagggagctagatgtttgcgcgcgtatgcaggactggttggaacagcagtgactccaaattacgtcgacaacgtgagcgctagagtggcaccttggtgtgactgcggggcaagtggaaatagacgagaggattgtgaagccttccggggccttttcactaggaatcgctgtctagacggagctatccaggcgtttgcctctggatggcccccggtactacttgatcagctgaaccctcagggagacccagagcatagcttgcttcaagtctccagcacaggccgcgcactcgagaggaggtctctcctgtctatcctccccgtgctggcactgcccgctcttttgtag

SEQ ID NO: 8674 - DNA, 1728 bp, synthetic construct
  misc_feature 1..1728: note = source = /note="Description of Artificial Sequence: Synthetic coding sequence"
  source 1..1728: mol_type = other DNA
atgagcggcaactgggtgcaccccggccagatcctgatctgggccatctgggtgttagccgcgcctaccaaagggccatcagcagaaggcccacaacgtaacactagactcggctggattcaggggaagcaggtgacagtcttgggtagcccagttcctgttaatgtgttcctaggagtgccctttgcagccccgccactgggctcactccgctttactaatccacagcctgctagcccttgggataaccttcgagaggccaccagttatccaaacctgtgcctacagaactctgaatggctcttgctcgatcagcacatgttaaaagtgcattaccccaaatttggcgtatcagaggactgtttatacctgaacatttacgccccagctcacgctgatactggatccaagctgccagtgctggtgtggttccctgggggcgccttcaagacaggtagcgcatccatctttgatgggtccgcactcgctgcctacgaggacgtgcttgtggtggtggtacaatatagactgggaatttttgggttcttcacaacctgggaccagcatgcaccggggaattgggctttcaaagaccaggtggctgccctcagctgggttcaaaagaacatcgaattcttcggcggggacccttcctccgtgaccattttcggcgaatccgctggcgccatttcagtcagctcgctgatcctttcaccaatggctaaggggctgtttcataaggctatcatggagagcggcgtcgcaatcatcccttatcttgaagcacatgactatgagaaaagtgaggacctgcaagtggtagcgcatttttgcggaaacaacgcatccgattccgaggcattactgcggtgtttgcgaaccaaaccctcgaaagaattgctgactctctctcaaaagaccaagagtttcaccagagtggttgatggagccttttttcctaatgagcctctcgatctcctgtcccagaaggcattcaaagcaattccgtccataattggagtgaataaccatgagtgcggctttcttctgcccatgaaagaagctccggagatcttgtccggctccaataaatccctcgcgttgcatctgatacagaatatccttcacatcccccctcagtatttgcatctggtggccaacgagtacttccacgacaaacactccctgacggagattcgcgattcgttactggacttattgggcgatgtgttctttgtggtgcctgccctaattactgcccgatatcatcgcgacgcaggcgcacccgtgtatttctacgagtttcgccacagaccccagtgctttgaagataccaagccagcatttgtgaaagccgaccacgcagatgaggtgcgcttcgtattcggcggggctttcctcaagggcgatatcgtgatgttcgagggggccaccgaggaggagaaactgctttctcgaaagatgatgaagtattgggctacctttgccagaaccgggaatccaaatggaaacgacttgagcttgtggccagcttataatctcaccgagcagtacctgcagctagacctcaatatgagtctggggcagcggctgaaagagcctagggtggatttttggacctcaactataccactaattctatctgcatccgatatgctgcacagtcctctgtcaagtcttactttcttgtccctgctccagcccttctttttcttttgtgccccttag

SEQ ID NO: 8675 - DNA, 1026 bp, synthetic construct
  misc_feature 1..1026: note = source = /note="Description of Artificial Sequence: Synthetic coding sequence"
  source 1..1026: mol_type = other DNA
atgggcaccctgccctggctgctggccttcttcatcctgggcctgcaggcatgggacacacccactattgtaagcagaaaagagtggggtgcacggcctctcgcatgtagggcacttctcacactgcctgtagcctacataataactgatcagctcccaggtatgcagtgtcagcagcaaagcgtgtgttctcagatgctccgagggctgcagagtcactcggtatacaccataggctggtgtgatgtcgcgtacaacttcctcgtgggagacgatggacgagtctacgaaggggtaggctggaacattcagggcctgcatacgcaagggtataataacatttcgcttggtatcgcttttttcggaaacaagattgggagtagcccatctcctgccgcactgtccgctgccgaagggctgatctcttacgccatccagaaagggcatctgtcaccaagatatatccagcccctcctcctcaaagaggaaacctgtctcgatccccaacaccccgtgatgccacgaaaggtctgtcctaacatcatcaaacgcagcgcatgggaagcccgtgagactcactgtcccaaaatgaacctgcccgccaaatacgtaatcatcatacacactgccggaacctcttgtacggtgagtacggactgccagacagttgtacggaatattcagtcctttcatatggatactcggaacttttgtgacattggatatcacttcctggtaggccaggacggcggcgtatatgaaggagtcggatggcacattcaggggagccacacctatggctttaacgacattgctctcggaatcgcctttatcggatactttgtggagaagccgcccaacgccgccgctctggaagctgcacaggatctgattcagtgtgccgttgtggaagggtacttgacaccgaactatctcttaatggggcactccgacgtggtgaatatcctgtcaccaggtcaagccctatacaacataataagcacgtggcctcattttaaacactag

SEQ ID NO: 8676 - DNA, 897 bp, synthetic construct
  misc_feature 1..897: note = source = /note="Description of Artificial Sequence: Synthetic coding sequence"
  source 1..897: mol_type = other DNA
atgggcatcgtgtgcgcccagtgcagcttcatcctgctgctgagcatcattagagcaaggcccccaccgtttctcttctgccctctcagttcacagaggaccgaaagcccctataagcccgtccacttgggactcggccctactgacaaagtggccgcgatcgccatggcaagaataatagacttggttccgtgggatgacggttcaacccatgtctatgccagtcctgcaatcttgcttccaatggagcgccagcgcaaccaacttgctggtgtgaaacagcaactgtaccaccctgccctgcccactttgagacacatggaccgcgacacagtcaaagcatgtctgccagatgagcattgtcagtctacaacgtattgccggaaggacgaattcgataatgcacattttactctgctcggtgttccgaacaaacccctgcagtgtctggacatcaccgccacgggacagaagctgcgaaatcgataccatgaagggaaacttgctcccatcgccccaggcattaaccgagtcgactggccctgctttacccgcgcaatcgaagactggtcccatttcgtgagctctgcaggtgagttcaagcttccatgccttaggaagcgggccgaagggctcagcggctacgccgtacggtatctgaagccagatgtgacacaaacttggcgccaagaggctctttgcggggcgtgggccggccgcccttgttctcccgattctcccagaccgtacccctgctgcccaccccagtactgcctgagtcagaacccttcactggataggtacggccagaaacccttgccttttgacagtctgaacacatttagatcattcggttcctcctactctcgggtcaactacctgaccccatggcattag

SEQ ID NO: 8677 - DNA, 5799 bp, synthetic construct
  misc_feature 1..5799: note = source = /note="Description of Artificial Sequence: Synthetic coding sequence"
  source 1..5799: mol_type = other DNA
atggcccccggcgccctgcggggcggctgcgagcagcgggcccccggtgggggcgctcgcactgctgctttaggcccatggccgtggcctagtcctgggccagccccctccccaggtgctgcaccacccagaagcagaaagatgagtggagcattgctgtggcccctgctgcctctgcttttgctgctgctcagcgcccgcgacggcgtgcgggccgcccagcctcaggcgcctggttacttgatcgcagccccgagcgtgttcagagcaggagtagaggaggtcattagcgtcaccattttcaattctcctagagaggtgacagtccaggcccagctggtggcgcaaggagaaccggtggtacagagccagggggctatacttgacaaggggacgattaaactgaaagtgcctaccggtctgcgcggccaggccctccttaaggtttggggaaggggatggcaggccgaggaaggtccactgtttcataatcagacctcagtgacagtcgacgggagaggcgctagtgtttttatccaaaccgacaagcctgtgtacaggccccagcatcgggtactgatctccatctttaccgtgagtcccaacctgcggccagtcaacgaaaagcttgaggcttacattctcgacccccgcggctcaaggatgattgaatggagacacctgaaaccgttttgctgcgggatcaccaatatgtccttccctttgtctgatcagcccgtgctgggcgaatggttcatattcgtagagatgcaggggcacgcttataacaaaagtttcgaagtgcagaaatatgttctgccaaagttcgaactgcttattgatcccccccgctacatccaggatctagatgcgtgcgaaaccggcacggtgcgggctagatacactttcggaaagcccgtggctggcgcactcatgattaacatgaccgttaatggtgttggttattatagccatgaggtggggcgtccagtgttgcggactacgaaaatcctaggctctagggactttgatatttgtgtgcgggacatgattccagcagatgttcctgagcatttccgtggtcgtgtgagcatctgggccatggtgactagtgtggacgggtcccagcaggtggcttttgatgactcgactcccgtgcaacggcagcttgtagatatccgctattctaaagacacacggaaacagtttaaacctggactcgcctacgtcggcaaggtggagctgagctatcccgacggttcccctgcagaaggtgtgactgtgcagattaaggccgagctcacaccgaaggataatatatacacgtctgaagtggttagccagcggggtttggttggatttgagatcccttccattcctacttccgcccagcacgtgtggctggagacaaaggtcatggccctcaacggtaaacctgtgggcgcacagtaccttccatcttacttgagtcttgggtcctggtactcaccctcccagtgttacctgcaactccagccaccctcccaccccctgcaggttggtgaggaagcttacttttctgtgaaatctacctgcccctgtaacttcaccctgtactatgaggttgcagctaggggtaatatagtgctctctgggcagcagccagctcacaccacccagcagcgcagcaagagagctgccccagcactagaaaagcctatacggcttacacatctgtccgagacagagccccctcctgcccccgaggccgaggttgatgtatgcgttacttcactgcatctggcggtaacaccgtcgatggtacctttaggtcgtctgctagtgttctacgtccgcgaaaacggagagggagtggcagacagccttcaatttgcagtggagacattctttgaaaatcaggtctcagtgacctactccgccaacgaaactcaaccgggtgaagtggtggatcttagaatacgggcggcccgtggtagttgcgtgtgtgtcgcagccgtcgataagagtgtgtacctccttaggtcaggctttagactgacaccagctcaggtgtttcaagaactggaggactacgatgtgagcgactcttttggggtgtcccgagaggacgggccgttctggtgggccggactcactgcccagagaaggagacgatcaagcgtgtttccttggccttggggaattacaaaagattccggctttgcctttacagagacaggtctcgtcgtgatgaccgatagggtcagcctcaatcacaggcaggatgggggcctctatacggatgaagcggtccccgctttccagccacatacggggtcacttgtggctgtcgctccctctcggcaccctccaagaacagagaagcggaagaggactttcttccccgagacctggatctggcactgtctgaatatcagtgacccttcaggcgaagggactctatcagtcaaggtgcccgactctattacctcctgggtaggcgaagctgtcgcactgagcacgagtcagggactcggcattgcggagccttctctgcttaagacttttaaacccttttttgtagacttcatgctgcctgccctgattattaggggagagcaggtcaagattcctctgtcagtgtacaattatatgggcacttgcgcagaagtgtacatgaaactctcagtgcctaaaggcatccaatttgtcgggcatccaggaaagaggcacgtcacaaagaagatgtgcgtggcacccggggaggccgaaccaatctgggtggtcctcagtttctcggacctgggactcaacaacataactgcaaaggccttggcctacggagatactaattgctgtcgcgatggacgaagttctaaacaccccgaggagaaccacgcagataggcgcgtgccaatcggggtcgatcacgtcaggcggagtgtgatggttgaggccgagggggtcccccgagcttacacctacagcgcattcttttgcccaagcgaaagggtacatattagcacccctaataaatacgaattccagtacgtccaaaggcctttgcggctgacccggttcgatgtggctgttagagcacacaacgacgcaagagtcgccctgtcaagcgggccccaagacactgccggcatgatcgagatcgtgctgggcggccaccagaacacccgctcgtggattagtactagcaaaatgggtgagcctgtcgcatccgcccacaccgcgaagatattgtcatgggacgagtttcggacattttggattagctggcgtgggggattaatccaggtcggtcatggccctgagcctagtaacgagtcagttattgtggcgtggacactcccacgccccccagaagtgcagttcattggattttcaaccggatggggaagtatgggagagttcagaatttggaggaagatggaggttgacgagtcctattccgaggcctttactctgggtgtcccacacggagctatccccgggtctgaacgggccaccgcttccataataggggacgtgatgggccccactctgaaccatctgaataatcttttgcggctgccatttgggtgcggggaacaaaatatgatccactttgcccccaacgtgttcgttttgaaatatttgcaaaaaactcagcagctgtccccggaagtggaacgcgaaaccactgattatctggtgcagggataccagagacagctgacctacaagcgacaggatggctcttactccgcttttggagagcgtgacgcaagcggctctatgtggctcaccgccttcgttctgaaatcattcgcacaagcaagatcattcatctttgtagaccccagagagctggccgcggccaagtcgtggatcatccaacagcagcaggccgacgggtcattcttggctgtgggcagggtccttaataaagacattcaaggaggcattcatggtaccgtcccgctcacagcctatgtcgtcgtggctcttctggaaacaggcactgcatcagaagaagagagagggtctacagataaggcccgacatttccttgaaagcgctgcccccctcgcgatggatccttattcgtgcgccctcacaacctatgcactgactcttttgaggtctccagctgctccggaggcattacggaagcttcgctcattggctatcatgcgcgacggcgtgacccattggtccctgagcaacagctgggacgtggataaaggaaccttcttatcattttccgaccgggttagccaaagcgtcgtatctgccgaagttgaaatgaccgcctacgcactccttacttatacactcctaggcgatgtggccgcagcgctgccggtggtaaaatggctttcccagcagcgcaacgctttgggcggttttagcagtacacaagatacttgtgtagctctgcaagccctggccgagtacgctattctgtcctatgctggaggcatcaatctgacagtttctctggcgtctaccaatttggactatcaggagacgttcgagctgcacaggaccaatcaaaaggtgcttcagaccgccgccatcccaagccttcctacaggtctctttgtgtcagccaagggcgacggctgttgcctcatgcaaatcgacgtaacatacaacgtccccgacccagtggcgaaaccggccttccaactactcgtcagtctgcaggagccggaggcccaagggagaccccctccaatgcccgcttctgctgctgaaggctccagaggagactggcctccagccgatgacgacgatccagccgctgaccagcaccatcaggagtataaggtcatgctggaggtgtgtactcgttggctgcacgctggaagctcaaacatggccgtcttagaggttcccctgctgagtgggtttcgagctgatattgagtccctcgagcagctgctgttagataagcacatgggaatgaagagatacgaagtggctgggaggcgcgtgctcttctactttgatgagatcccctcaaggtgcttgacctgtgtgcgatttcgagccttgagggagtgtgtggttggccgaaccagtgcactgcccgtttcagtttatgactactacgaaccagcattcgaggctaccaggttctataatgtgagcacacatagcccgttagcacgcgagctctgcgctggtcctgcctgtaatgaagtggaaagagctcctgctcggggcccaggatggtttcctggcgagtctggccccgccgtcgcccctgaagagggcgcagcaatagctcgatgcggatgtgaccacgactgtggggcacagggcaatccagtctgtggtagcgatggggtcgtttacgcctcagcctgccggcttcgggaggcagcgtgtaggcaggctgcgcccctggaaccagcacctccaagttgttgtgccctggaacagaggctcccggcctcttcatcttcaacttatggagatgacctggcctctgtggctcccggacctctgcagcaggacgttaaactcaatggggctggtcttgaggtggaggattctgaccccgagcccgaaggagaggcagaggatcgggtgacagccggtcctaggcctccagtgagttcgggtaacctggagtcatccacacagagtgcaagtcccttccaccgctgggggcagactccagctccacagcgtcactccggaagagtggtaggggcccacagacccggactgctgagtccggtgttcgtttatagccccgcctttcagtcaggcggggaagaaggtctctggatgagcaatacctgcacactgcgttag

SEQ ID NO: 8678 - DNA, 1209 bp, synthetic construct
  misc_feature 1..1209: note = source = /note="Description of Artificial Sequence: Synthetic coding sequence"
  source 1..1209: mol_type = other DNA
atggtgtgcgcccgggccgccctgggccccggcgccctgtgggccgccgcttggggcgtcctcttgttgaccgcaccagccggcgcacagcgcggtcgcaaaaaagtggtgcacgtgctcgagggagagtcgggatcagtcgtcgtgcaaactgcccccggtcaggttgtgtcacaccgaggtggcactattgtacttccgtgcagataccactatgaggccgctgctcacggccatgacggggtgaggttaaaatggaccaaggtggtcgacccactcgcctttactgatgtctttgtggccttaggcccacaacatagagcctttggctcatacagaggacgggcagagttgcaaggagacgggccaggcgacgcaagtctagtgctccgaaatgtgactctccaagattacggccgttatgaatgcgaagtcacaaacgagctggaggacgacgccggcatggtgaagttggatctggaaggggtggtgttcccatatcatccgagaggagggcgatataagcttacctttgcagaggctcagcgggcatgcgccgagcaggatggtatccttgcgtctgccgaacagctgcacgcagcctggagagatggcctggactggtgcaatgccggatggcttcgggacggctcagtccaataccctgttaacaggcccagagagccatgcggtggtctaggaggaaccgggagcgccggcggcggcggcgacgcgaacggtggactgcggaactatggctatcggcataatgctgaggaacggtatgacgctttctgctttacctcaaacctccccggacgagtcttcttcctgaagcccttacgacctgtcccttttagcggagctgcaagagcctgtgcagcgcgcggcgctgccgtcgctaaagttggccagctgttcgcggcttggaagctccagttactggaccgctgtactgcaggatggttagccgacggcagcgctcgatacccaattgtgaaccctcgtgctaggtgtggcggtcgccggcctggtgtgcggagtttaggattcccagacgccacacggcgcctatttggtgtgtattgttatcgagctcccggtgcgcccgatcctgcaccaggcggatggggctggggatgggccggggggggagggtgggcaggtggggctcgcgaccctgctgcttggacccccctccacgtgtag

SEQ ID NO: 8679 - DNA, 1740 bp, synthetic construct
  misc_feature 1..1740: note = source = /note="Description of Artificial Sequence: Synthetic coding sequence"
  source 1..1740: mol_type = other DNA
atgagcgccctgcggcccctgctgctgctgctgctgcccctgtgccccgggccaggacctgggccaggctctgaagcaaaggtgacccgctcctgcgctgaaacgcgccaggttctgggcgccagagggtattcgctgaatctaattccaccggcactgattagcggggaacatctcagggtatgccctcaagagtacacttgttgctccagcgagaccgaacagcggcttatccgcgagactgaagctacctttcgcggtctagttgaagactccggtagtttcctggtgcacaccctggcagcacggcataggaagtttgacgaattttttctggagatgctctcagtcgcgcagcactccctgactcagctgttcagccatagctatgggcgcctgtatgctcagcacgcattgatttttaacgggctcttcagcaggttgcgtgacttctatggagaaagcggggaagggttggacgacactctcgcggacttttgggcccaactgttggaaagagtcttccccttgctgcacccacagtactccttcccacctgactacctactctgtctgagccggctggcttctagcacagacggttccctccagccttttggcgatagtccaaggaggctgcgactccaaatcactaggaccctggtagccgcccgggccttcgtgcagggattggagacaggacgtaacgtggtgtccgaggctctcaaggtgccggtctccgagggctgttctcaggctcttatgcgccttatcggttgccccctgtgtaggggcgtaccgtcccttatgccctgtcagggtttctgtctgaacgtcgtccgcggctgcctcagttccagaggactggaacccgattggggcaactatctggacggcctcctgatcctcgcagataaactgcagggcccattctctttcgaactgacagccgagtctatcggagtgaaaatcagtgaggggctgatgtacctgcaggagaactcagccaaagtgtctgcccaggtctttcaagaatgcggccctccggaccccgtgcctgccaggaacagacgcgcccctcccccccgggaagaggcagggcgcttatggtcaatggtgaccgaggaggaaaggcctacaaccgctgcaggaacaaacctgcatcgtctggtgtgggagcttcgggaacgcttagcccggatgaggggcttttgggctcggctcagtctgacagtttgcggtgactcacggatggcggccgacgctagtctggaggcagcaccttgttggacaggtgcaggccgcggccgatatcttcctccagtggtgggagggagccccgcagagcaagtcaataatccagaacttaaggttgacgccagcggccctgatgttcctacgagaaggaggcgcctgcaattgcgggctgccacagctcgcatgaaaacagcagccctggggcatgacttagacggacaggacgccgatgaggatgcaagtggatcaggcggcgggcaacagtacgccgacgattggatggcaggcgccgtggcaccacccgcgagacccccaagacctccttaccctccgcggagagacggctctggaggcaagggtggcggtggctccgcacgctataatcagggaaggtctaggagtggaggagccagtataggcttccacacccagacgatcttaatcctgtccctgagcgctctggctttgctcggtcccagatag

SEQ ID NO: 8680 - DNA, 498 bp, synthetic construct
  misc_feature 1..498: note = source = /note="Description of Artificial Sequence: Synthetic coding sequence"
  source 1..498: mol_type = other DNA
atggccctgctggccctgctgctggtggtggccctgccccgggtgtggacggatgccaacctcacagctcggcaacgagaccctgaggattctcagcggacagatgagggggataaccgcgtgtggtgccatgtctgtgagcgggaaaacacctttgagtgtcaaaatcctcgtcgctgtaagtggactgaaccatattgcgtcatagcagccgttaagattttcccccgtttcttcatggtcgcgaaacagtgcagtgctggctgcgccgctatggagcgaccaaagcccgaagaaaaacgattcctccttgaggagcctatgccatttttttacctgaaatgttgcaaaatccggtactgtaacttggaggggccaccaatcaacagctcagtattcaaggaatatgccgggagcatgggcgaatcttgcgggggtctatggctggcaattcttctcctgctcgcaagcatcgccgctgggctgtcgctttcgtag

SEQ ID NO: 8681 - DNA, 933 bp, synthetic construct
  misc_feature 1..933: note = source = /note="Description of Artificial Sequence: Synthetic coding sequence"
  source 1..933: mol_type = other DNA
atgaacggcctgagcctgagcgagctgtgctgcctgttctgctgcccaccctgtccaggccgtatcgccgccaagcttgcattcctgcctccagaagccacttattccctggtgcctgagcctgagcctggccccggtggagccggggctgcccctctgggtactctgagggcctcctctggggccccgggaaggtggaagctgcatttgacagaaagggccgacttccagtattcacagcgggagttggacaccatcgaggtgtttcccaccaagagcgccagagggaacagagtctcttgcatgtacgtgagatgcgtccccggagcaaggtacactgtgctgttctcccatggtaacgccgtggatctgggccagatgagttccttctatattggactcgggtcaaggcttcactgtaatatttttagttacgattactcaggttacggcgccagctctggcagacccagtgagcggaacctttatgctgacattgacgccgcctggcaagcattaaggacacgctacggcataagccccgattctataatactctatggtcagtctatcgggacagtccccaccgtggatcttgcaagtaggtacgaatgtgcggcagtggtcctgcactcgccactgacctccggaatgagagttgcttttcctgataccaagaaaacttattgttttgatgcgttccctaacatagaaaaagtctccaagattacgtctcctgtcctcattattcatgggacagaggatgaagttatagacttttcccacggcttggcattgtacgagagatgtcccaaggccgtcgaacccctgtgggttgagggcgccggccacaacgacatcgagctatattcacagtacctagagcggcttcgaagattcatctcacaggagctccccagccagcgggcctag

SEQ ID NO: 8682 - DNA, 1905 bp, synthetic construct
  misc_feature 1..1905: note = source = /note="Description of Artificial Sequence: Synthetic coding sequence"
  source 1..1905: mol_type = other DNA
atggcccagggcgtgctgtggatcctgctgggcctgctgctgtggagtgacccagggaccgcgtcgcttcctctcctgatggacagcgtgatccaggcactcgctgagttagaacagaaggttcctgctgcaaaaacacgccatacggcctcagcttggctgatgagtgcacctaacagcggacctcacaatcgtttgtaccactttttgctgggtgcttggtcgcttaacgccactgaactcgacccttgcccgctgtctccagagctgctggggctaactaaagaggttgctaggcatgacgtgagggagggaaaagagtatggggttgtgttggctcccgacggctctacagtggcagtcgaacctctgctcgctggtctggaggccgggctccagggtcggcgtgttatcaatctgcccctggactctatggctgcaccatgggaaacaggggacaccttcccagacgtggtggccattgctcccgatgtccgggcaacaagttctccaggattacgagacgggagccctgacgtgacaaccgctgatatcggagctaatactcctgacgcaacaaaaggatgccctgacgttcaggcatctctgcccgatgccaaggcaaagtctccccctaccatggtcgacagcctgctggctgtgaccctcgcgggaaacctcggcttgacctttctcaggggaagccaaacacagtctcaccccgatttaggtaccgaaggttgctgggaccagctgagtgccccccgcacctttaccctgctggatcctaaggcgtctctcttaacgatggcatttctgaacggggccctggatggtgtgattttgggtgactacctgagcagaacaccagaaccaaggcccagtctgagtcacttgctgtcccagtattacggagctggtgttgctcgcgacccgggctttcgttcaaactttcgccgacagaacggcgcagccctgacaagcgcttcaatactcgcccaacaggtatgggggacactggttcttttacagagactggaacccgtgcacctccaactccagtgcatgtcccaagaacagctcgcacaggtcgccgctaatgcgacaaaagaatttactgaagcattcttggggtgtccagcgatccacccccgatgtcgctggggcgccgccccataccggggccggcctaagctattgcagctgccattgggctttctctatgtgcaccacacctatgtgccagcccctccttgcacggattttaccaggtgcgccgccaacatgagaagcatgcagcgctaccaccaggacacacagggctggggagacattgggtatagctttgtcgtaggctccgatgggtatgtttatgaagggcggggatggcattgggtgggcgcccacactctgggccacaacagtcggggtttcggcgtggctatagtaggcaattataccgccgccttaccaactgaggctgctctgaggactgtgcgggatacactccccagttgtgcagtgagagcgggcctgctccgccccgactacgccctcctgggtcatcgacagctggtccgcactgactgtccaggcgacgccctgtttgatctgcttagaacttggccccatttcacggcagtatccctcagaagtctgcactacacggcgcgtcgcccttccgtgtacactagcagcacccggccccttccaccggcttgtaacagctgcgctagaactgcctctgctaggccccccacctccagacgccacgtgtatagcggaaatctgggacctgcattcgccggacactctgcgggaaacattcctgaccctgtgaccagcgcctatgccgctagcgctcagccccaaacccagcctgcttgtccgttcccctcttcctag

SEQ ID NO: 8683 - DNA, 777 bp, synthetic construct
  misc_feature 1..777: note = source = /note="Description of Artificial Sequence: Synthetic coding sequence"
  source 1..777: mol_type = other DNA
atgctggtgctgtacggccacagcacccaggacctgcccgagaccaacgcaagagttgttgggggaacggaggcggggcgcaattcttggccttcacagatcagtttgcagtacaggtctggtggctctcgctatcacacttgcggtggcactcttatccgtcagaactgggtgatgacagccgcccactgcgtagactatcaaaaaacattcagggtggtggcaggtgaccataatctaagccagaacgacgggacggagcagtacgtcagtgtgcaaaaaatagtcgttcacccttattggaattctgataatgtggccgccgggtatgacattgcactgctccgtctagcccagagtgtaaccttgaattcctatgtgcagctaggcgttctgcctcaggagggagcaatcctagccaacaattctccttgttacattacagggtggggcaagacaaagactaacgggcagttggcccaaaccctacagcaggcgtacctccccagcgtcgattatgctatttgctcatcttccagctattgggggagcaccgtgaagaatacaatggtgtgtgcagggggcgatggggtcagaagtggttgtcagggtgactccggcggtccactgcactgtctggtgaatgggaaatactctgtgcatggcgtaacatcatttgtgtcttctcggggttgcaatgtttctcggaagccgactgtgttcactcaggtgagtgcttatattagttggataaacaatgtaattgcctcaaattag

SEQ ID NO: 8684 - DNA, 993 bp, synthetic construct
  misc_feature 1..993: note = source = /note="Description of Artificial Sequence: Synthetic coding sequence"
  source 1..993: mol_type = other DNA
atggccgcccggcggagccagcggcggcggggccggcggggcgagcctggtacggcacttcttgtccctcttgccttaggactggggttagcactcgcgtgtctcggactgctgctggccgtggtgtctctgggatcccgagcttcgctttctgcccaggaacccgctcaggaagagttggtcgctgaagaggaccaggacccatctgaattgaatcctcagactgaagagtctcaggaccctgcaccatttcttaaccgactggttcgcccgagacgctccgcccccaaaggacggaaaacgcgcgcacgcagagccattgctgcccactacgaagtgcacccacgccccggccaggacggcgcccaggcaggtgtggacggaacagtgtcaggctgggaggaagcacgcattaacagcagtagcccgttgcgatacaatcgacagattggtgagttcattgtaacacgagcagggctctattacctctattgccagtcctcagatgccctggaagcctgggagaacggcgaaagaagccggaagcgtcgagcagtgctcactcagaagcagaagaagcagcacagtgtcctgcatctggtcccaatcaatgctaccagtaaagacgactctgacgtgacagaggttatgtggcagccagccctacggcggggccgtggacttcaagctcagggctatggtgtcaggatccaagacgctggcgtgtacctactgtattcacaagtgctgttccaggacgtcacctttacaatgggtcaggtagtgtcaagagagggccagggccgccaggagactttgtttaggtgtatcagatcaatgccgagtcacccagatcgggcctataattcttgctattcggccggagtgttccaccttcaccagggtgatatcctgtctgtcatcatacctagggcgcgggccaagctgaatctcagtccccacggcacctttctgggatttgtgaagttatag

SEQ ID NO: 8685 - DNA, 2253 bp, synthetic construct
  misc_feature 1..2253: note = source = /note="Description of Artificial Sequence: Synthetic coding sequence"
  source 1..2253: mol_type = other DNA
atggccaagccccggctgctggtgctgtacttcgccctgatcgtggtgcccgcgtgggtgtcttccattgtgctaactggtacctcagagccccccgatgcacaaaccgtcgcgcctgcggaggacgagacacttcaaaacgaagcagataaccaggaaaatgtgctttcccagctgctgggggattatgacaaggtgaaagcaatgagtgaagggtctgactgccagtgcaaatgtgttgttcgccccttaggaagagatgcctgtcagcgtatcaacgccggagctagtaggaaggaagatttttacaccgtggagaccatcaccagtgggtcgtcatgtaagtgtgcatgcgttgctcctcctagcgctcttaacccctgtgaaggagacttcagattacaaaagctgagggaggctgactcccaagatctgaagctttctaccatcatcgacatgctggagggtgctttctacggactcgaccttctaaagttgcactctgttactacaaaattggtcggtagagtggacaagctggaggaagaagtgtctaaaaatctgaccaaagaaaatgaacagataaaagaggacatggaggagatacgaaccgagatgaataagcgcggcaaagagaattgctccgagaatattctggattccatgcctgatattagatccgccttacagcgagatgcagctgccgcttatgcccatccagagtacgaggagcgatttctacaggaagaaactgtttctcagcagataaacagcatcgagctgctccaaacacggccactcgctcttccggaggtggtcaaaagccagagaccactacagaggcaagttcacctgcggggaaggccagcttcccagccaactgtcattagggggattacctactacaaggcgaaggtgtcagaggaggagaatgacatcgaggagcagcaggacgaatttttctctggcgacaacggggtggacctgcttatcgaggatcagctcttgcgtcacaatggactgatgacctcagttacaagacgtccagctgctactagacagggccactctactgccgtgacctccgatcttaacgctagaacagcgccctggtcaagcgccctgccccagccctctacatccgacccatctattgccaaccatgcctctgtgggacccacactgcagacaacaagcgtgtcaccagacccaactcgagagagcgtgttgcagccatccccccaggtgcctgcaacgacagtagctcataccgcgactcagcaacctgccgcccccgctccacctgccgtctcacctagagaggctctgatggaggcaatgcacaccgttccagtgccaccaacaaccgtaaggacagatagtttgggcaaagacgcgcccgccgggtgggggaccacacccgcatctcccaccttaagtccagaagaagaggatgatatcaggaacgttataggtcggtgcaaagatacgctgtcaaccatcactggtccaactacacagaacacttatggtcggaatgaaggcgcttggatgaaagaccccctcgccaaggatgagcgaatctacgttactaactattattatggcaacaccctggtcgaatttcggaatctcgagaactttaagcaaggccgctggtctaattcctacaagttgccgtactcttggataggaacaggccatgtggtgtataatggggcgttttattataatagagccttcaccagaaacatcatcaagtatgatttaaaacaaagatacgtagccgcgtgggctatgttgcatgacgttgcttatgaggaggccacaccgtggagatggcaaggccacagcgatgtggatttcgccgtcgacgaaaacggactttggttaatctatcccgctttggatgacgagggcttctcccaagaagtaatcgtgctctcaaagctgaacgccgcagatcttagtactcagaaagagacgacatggcggactggcttgcgccggaacttctacggaaattgcttcgtcatctgtggagttctgtacgcagtggactcatacaatcagagaaatgcaaatataagctacgccttcgacactcataccaatacacaaattgtcccccggctcctcttcgaaaacgaatactcatacaccacacagatcgactataaccccaaggacagactgctgtacgcctgggataacggccatcaggtgacataccacgtaatcttcgcttattag

SEQ ID NO: 8686 - DNA, 678 bp, synthetic construct
  misc_feature 1..678: note = source = /note="Description of Artificial Sequence: Synthetic coding sequence"
  source 1..678: mol_type = other DNA
atgaagctgggctgcgtgctgatggcctgggccctgtacctgagcctcggtgtgctgtgggtcgctcagatgctcctagcggctggctgtcacgccgaactgttccctgcaccgattctgcgcgccgtgcctagtgccgagccacaggctgggtcacctatgactctaagctgccagaccaaacttcccctgcagagatccgccgcacgattgctttttagcttctataaggatgggagaatcgtgcagtcacgaggactctctagtgagttccaaatcccaacagcaagcgaagaccactccggatcatactggtgcgaagccgccaccgaggacaaccaggtgtggaaacaatcccctcagttggagattcgtgttcaaggtgcctcctcttcagccgccccccccacacttaacccggctcctcaaaaatccgccgccccaggtacagcccccgaggaggctccagggcccttaccacccccccccaccccaagttccgaggatccgggcttttcttccccgctcgggatgccggacccccacttatatcaccagatgggattgttactgaagcacatgcaggatgtgcgagtcctgttaggccatctgctaatggagcttcgcgaactgtccggccataggaagccgggcacgacaaaggccacagccgaatag

SEQ ID NO: 8687 - DNA, 891 bp, synthetic construct
  misc_feature 1..891: note = source = /note="Description of Artificial Sequence: Synthetic coding sequence"
  source 1..891: mol_type = other DNA
atgagccggcaggagcccaagatgttcgtgctgctgtacgtgacctccttcgcgatctgcgcctcggggcaaccccgtggcaatcagctgaagggcgaaaactatagtccgagatacatctgttccatcccaggcctaccaggaccacctgggccaccaggcgctaatgggtcgcctggtcctcacggcaggataggcctgccggggcgcgatggccgagacggccggaaaggggagaagggggaaaagggcaccgccgggctgagaggcaagaccggccctctgggcctggctggcgagaaaggggaccagggggagactggaaaaaagggacctatcggccccgagggggagaaaggcgaggtcggaccaattggtccacctggacccaaaggagacaggggggaacagggagaccctggcctgccgggggtatgtcgatgtggcagcatcgtgcttaaatccgccttctcggtgggcattaccacgtcttatcccgaagaaagattgcccattatctttaacaaagttcttttcaatgagggtgaacactacaatccagccacaggtaaattcatttgtgccttccctggaatctattacttttcctatgacataacgcttgcgaacaagcatctcgccattggccttgtccacaacgggcagtaccgcatcaaaacatttgacgcaaatactggtaatcacgacgtggcgtccggcagtaccgtcatttatcttcagcctgaggacgaggtctggctggagattttttttacagaccagaacggcctgttttcagacccaggctgggctgattcactattctccggcttccttctctacgtcgatactgactatttagactcaattagcgaggacgatgaactgtag

SEQ ID NO: 8688 - DNA, 1275 bp, synthetic construct
  misc_feature 1..1275: note = source = /note="Description of Artificial Sequence: Synthetic coding sequence"
  source 1..1275: mol_type = other DNA
atgggcagcctggtgctgaccctgtgcgccctgttctgcctggccgcatatcttgtgagcggttcaccaataatgaatctggagcaatctcctcttgaggaagatatgtctctattcggagatgtgtttagcgagcaggacggagtggactttaacacattactgcagtcaatgaaagacgaatttttaaaaacccttaacctgagcgacatcccaactcaagatagcgcaaaggtggacccacctgaatacatgctggagctatataataagtttgccacggaccgcacatctatgccatccgccaacattatccggagcttcaaaaatgaggacctattctcccagccggtctcttttaatgggctcaggaagtacccacttctctttaatgtcagtatcccacaccacgaggaggttattatggccgaactgcggctctatactttggtccaaagagacagaatgatctatgacggggtggatcgaaaaattaccatattcgaggtgctggagtccaagggggacaatgaaggtgaaagaaacatgctcgtgcttgtgtcaggagaaatctatggaaccaatagcgaatgggagacgttcgatgtgactgacgccataaggcgttggcagaagagtggcagcagcacacaccagctcgaagtgcacatcgaatctaaacatgacgaggccgaagatgcttcctctgggcgactggagatcgacacatctgcccagaataagcacaacccactactgatagtgttcagtgatgaccaaagctccgataaggagaggaaagaggagctgaacgagatgatcagccacgagcagctgccggaactggacaatctgggcctggacagcttctcttcaggcccgggcgaggaggccctcctacagatgagaagtaacatcatctatgattctaccgctagaatccgtcggaatgcgaaggggaactactgcaagagaacccccctttacatcgacttcaaagagatcgggtgggatagctggattatagcccctccgggctacgaagcatacgagtgcaggggcgtgtgcaattaccccctagcggaacatctcactcctacaaagcatgccatcatccaggctctggtgcacctgaaaaatagccagaaggcttctaaagcctgctgcgtgccaaccaagctggaacccatctcaattctatacctggacaagggggtggtaacttacaaatttaagtatgaagggatggcagtgagcgagtgtgggtgcagatag

SEQ ID NO: 8689 - DNA, 381 bp, synthetic construct
  misc_feature 1..381: note = source = /note="Description of Artificial Sequence: Synthetic coding sequence"
  source 1..381: mol_type = other DNA
atgcacctgagccagctgctggcctgcgccctgctgctgaccctgctgtcattgcggccctctgaggcaaagcccggtgccccaccaaaagttcctaggactcctccagccgaagagctggcagagccccaggctgcaggtggaggacagaaaaaaggcgacaaagcgcccggaggtggtggcgctaacctcaaaggcgatcgctctaggctgctgcgagacctccgcgttgacactaagtcacgtgctgcttgggcaagattgctgcaggaacacccgaacgccaggaagtataagggagcaaataagaagggccttagcaagggatgttttggcctcaaattagacaggattggtagcatgtctggactaggctgctag

SEQ ID NO: 8690 - DNA, 423 bp, synthetic construct
  misc_feature 1..423: note = source = /note="Description of Artificial Sequence: Synthetic coding sequence"
  source 1..423: mol_type = other DNA
atgcggagcccccggatgcgggtgtgcgccaagagcgtgctgctgagtcactggttgttcttggcgtacgtgctcatggtgtgttgcaaactgatgtccgcttcaagccaacacctcagaggtcacgctggacaccatcaaattaaacagggcacatgtgaagtcgtcgccgtccatcggtgttgcaataaaaaccggattgaagagaggtcccagaccgtgaaatgttcctgtttcccaggccaagtggctgggacgactagggcccagccctcatgcgtggaagccagcattgtcatacagaagtggtggtgccacatgaatccgtgcttggaaggggaggattgtaaggtgctgccggactactcaggatggtcttgcagctcgggcaataaggtcaagactacaaaagtaaccagatag

SEQ ID NO: 8691 - DNA, 1332 bp, synthetic construct
  misc_feature 1..1332: note = source = /note="Description of Artificial Sequence: Synthetic coding sequence"
  source 1..1332: mol_type = other DNA
atgctgatgctgttcgtgttcggcgtgctgctgcacgaggtgagcctctcgggacagaacgaagctccaccaaacacacactccatcccgggggaacctctctataattacgcgtcaatccgtctaccggaagaacatatccccttctttttacataacaacaggcatattgccactgtctgccggaaggattcactttgtccgtacaaaaagcatttggagaagctcaagtactgctgggggtacgaaaaatcctgtaagcccgaatttagattcggctaccccgtgtgttcatatgtggacatgggttggactgatactctggaatcggccgaggatattttctggaagcaggctgatttcggctatgcacgggaaaggctggaggagatgcacgtgctatgtcaaccgaaagagaccagtgattcgtccttggtgtgttctcgatatctgcagtattgtcgggctacaaatctgtacctcgatctgcgaaacatcaaacggaaccatgaccgtttcaaagaagacttttttcagtccggcgaaatcggtggccattgcaagttagatattcgcaccctgacctccgagggacaacgcaaaagtccgttgcagtcctggtttgccgagctgcagtcttacacacaactcaacttccggcctatcgaggacgccaagtgtgatatcgtcatagagaagccaacttactttatgaaactagacgcaggcgtcaatatgtaccaccacttctgtgattttattaatctatatatcacacagcacgtgaataattctttcagcactgatgtctacatcgtcatgtgggatacggacggtaagatccgggtcacaatactggcccgtagcactgagtaccgcaagattctgaaccagaacgagttagtgaacgctctaaaaacagtatcgaccttcgaggtccagatcgtggactacaaataccgggagctgggattcctcgaccaattgcggattactcataacacagatatctttatcgggatgcacggagccggcttaactcatcttcttttcctgcctgactgggctgcggtcttcgagctgtacaattgcgaggatgaaaggtgttaccttgacctggccagactgagaggcgtccactatatcacatggcggcggcagaacaaagtgttcccccaggacaaaggccaccatccaacgctaggggagcacccaaaattcactaactactcgtttgatgtagaagagttcatgtatctagtgttacaggccgccgatcacgtgctgcagcatccaaaatggcctttcaagaagaagcacgacgagctctag

SEQ ID NO: 8692 - DNA, 336 bp, synthetic construct
  misc_feature 1..336: note = source = /note="Description of Artificial Sequence: Synthetic coding sequence"
  source 1..336: mol_type = other DNA
atgggccccagcagctgcctgctgctgatcctgatccccctgctgcagctgatcaatccaggttcaacgcagtgcagcctggacagcgttatggataaaaagataaaagacgtcctgaattcgctggaatattccccatctcctatctctaaaaaactctcttgcgcatcagtgaagtcgcaaggccgtccatctagctgccccgctggcatggccgttaccggatgcgcgtgtgggtacggttgcggatcctgggacgtgcagcttgaaaccacctgtcattgccagtgcagcgtggtggactggaccacagctaggtgttgccacctcacttag

SEQ ID NO: 8693 - DNA, 1965 bp, synthetic construct
  misc_feature 1..1965: note = source = /note="Description of Artificial Sequence: Synthetic coding sequence"
  source 1..1965: mol_type = other DNA
atggcccccaagaagctgagctgcctgcggagcctgctgctgcccctgtctttaacattactattgccacaggcggacacacgatcatttgtggttgatagaggccatgatcggttcctcctggacggcgccccctttcggtatgtatcaggatcccttcactatttcagagtgccacgcgtcctgtgggcggatcgccttttaaaaatgagatggagcggtctgaatgcaatccagttctacgtgccgtggaactatcacgaaccacaaccaggggtatacaatttcaatggcagccgcgacctaattgctttcctgaatgaggcggcgttggcaaatctgctggtgatccttcgtcccggaccctacatctgtgctgagtgggaaatgggcggattgccgagttggcttctgagaaagcctgaaattcatctccgcacgtctgatccagatttccttgccgccgtcgacagctggttcaaggtgctgttgcccaagatctatccatggttatatcataatggaggcaacataatctctatccaggtggagaatgaatacgggtcttacagagcatgtgacttctcatacatgaggcaccttgcagggctgtttcgggctctgctaggtgagaagatcctgctcttcacaaccgatggtccggagggtcttaaatgcggaagtctccgcggtttatacaccactgttgactttggtcctgcagacaatatgacgaaaatctttacactgctgcggaaatacgaacctcacggcccattagttaattctgagtattacacaggctggcttgattattgggggcaaaaccacagcacacggtccgttagtgctgttacgaaggggctggagaacatgctaaagctcggagcttccgtgaatatgtacatgtttcacggtggcactaattttgggtattggaatggtgcagataagaaaggcaggtttctgcctatcaccacgtcatacgattacgacgccccaatcagtgaggcaggtgatcccacccccaagctattcgctttgagggacgtcatctccaaatttcaggaggtgcccctgggccccctccctccaccctccccaaaaatgatgctaggtccagttaccctgcacctggtgggacacctgttggcatttctcgatctgctgtgcccccgggggccaattcatagtattttacctatgacctttgaggccgtcaaacaggatcacggttttatgttatacagaacctacatgacccataccattttcgagcctacacccttctgggtgcccaacaatggagtgcatgaccgcgcctatgttatggtagacggagtgtttcagggcgttgtggagcggaatatgagggacaaactgttcttgactggcaagctgggatctaaactagacatactggtggaaaacatggggcgtctcagtttcgggagcaatagcagtgactttaaaggtttactgaagccaccaattctgggacaaaccatactgacgcagtggatgatgtttccgctgaaaatagataatctcgtgaagtggtggttccctctccaacttccaaaatggccctatccacaggctccctccggaccaaccttctatagtaagacctttcccattctgggctctgtcggggacacatttctttaccttcctggctggacaaagggccaggtttggatcaacgggtttaacctgggacggtactggactaaacaaggtcctcaacaaacactttacgtccctcgcttcctgctgttcccacgcggcgcattgaacaagataactcttctcgagctcgaggacgtgcctttgcaaccacaggtgcaattccttgacaagcccatcctgaactcaacaagcacattgcataggacacatatcaattcactgagtgctgatacactaagtgcatcagagcccatggaattgagcggacactag

SEQ ID NO: 8694 - DNA, 2502 bp, synthetic construct
  misc_feature 1..2502: note = source = /note="Description of Artificial Sequence: Synthetic coding sequence"
  source 1..2502: mol_type = other DNA
atgaacatggagatcggccacccccacgagggcaaggacgacctgggcgacaaacgcgtcatcatgggcaccaagttccccatggagttaggaatcagggtgggactggggaaggaggattctagatgcggcgaaagtcccgtggtctctaataaatgcgaaggtcgaatggccccacctgaaacaaagtttcccctgtcgaaggggctagagatgggtcttgaacggcagaacatttcacgcacagtgatgcaaaggggctccttaggagtggatagcgtgtccgcaagtcaagggacaaaaccaagcttgctacccggccgaatgggactggagaatgaatctctcttggctggctacacacacgagcggataatccagccacccttgggacgcgtatgcggctcatcacaagcagcgggcagtaggagagccccacttgcttcgggccccgaaggtgtcgaggaactggtgggaaagcctgctttcgtgatggaaccgaggcaggagatggaaaaggaaagtacctgtgtcctgatgaaacctaataccgaaatcaagctgccagtcgaggtggatataggcctgacacaggcggaagggcccgacgaaacaaaaaataccgaaccacagatggggcttgtgatcgagcctccccagtgccagttcgcccagcagcacgagcagcggaaggaggctggcaatattgaaagcggggtcgagcctccagaccgcatccgcccaatctattcaggcaagttctttgatcggacaccttgttggccctctgccggcaaagttattcctgtgggttaccgcgtggctacctgcctaacagagaaactgccccggctcatcacacccccagaggctaaaaagtattttaattttagatatccccctgccggcgtcgaacgtgtcttctacgggagagccaatgaccctcagatcgccccgtacctcactcacggtattaggagcaaaatttccgtgctggccaacacactgatcaaccctcagccaataaccactttccagcagaaaattaaggacaaaaaagagtccatatatctgagcaatagacgagctcctctgggcaaatctcatgatcaagcgccaggcctccctaaagggatggacactactaataccacattcggcacggccgtgattaaagaatactctgcgaaggatgtggtcaatcctcccaaatcctacgaggaagtttttaaggaagggaatgagggtcatgatctgtatgtggtgagccacaacgactattatgcgggtgaggccaaaaatcgcaaatacaatccctccagcttccaccgctgctctgtctatggcgtgccaaccccgcattttaatgacggcagagctatggccaagtcactctattggctccacgaactgcaaatgaagcgtggagcaaagttcgtgtccaagcgggcagacgactttaaggagaagttccaacacaagctgggaagagttctggatcctattgctgagaccatgaatgtgccacccgattgtacattcggtgcatgtttgaggccagaggagtacggggtgggcgacctaatccacaacagactccctgacgagtacctccgcgggaaagatcggcagagagctctgattgcggcagtcagacaccatttgaagaaggtgaactaccagaagttcgataccttgctcgctgccttcagacattacgataaaaagggcgatggaatgattgacaaagacgagctgcaggaagcctgtgatcaggcaaatctgtccctggatgataaattgcttgaccaactcttcgattattgcgacgttgacaacgatggattcatcaactacttggagtttgccaacttcctcaattggaaagataaaatgttacttaaggaatacgaggaaagagtcatcatcaaaggaaggaagcccgactgtgttaatccaacggaggccaatgttgaggagcctgagcagacccttctcattaagcctgaagacatcgtgctgaaagaggcgggatctaccgaaaagaccctgagaaccttgcttcggccttcggataaggtgagtaattattacaagaccacatctagcgagataaatgcaatagtaggtgcgatccccagcacatgctaccccatctgcggagtgcccacaatccgctctgacatcccagcaccgcgcataaggaggattagcgatcgcaccaactacggcgaggaaggatccgcctacagcctgctctacccgaccatttttgccagaaaaggggtgtttgagagggatttcttcaaaacccgctctaaagaggaaatagcggagatcctctgtaacataggcgtcaagttatccgacgaggagtttgaaaatgtgtggaatctcgcaagtaagaagcaccatcgaggggaggtgtgcgtggaaaacataagaaacgtgctggacgaacttcgacacgcagacagaatcaagtgcaagacactcatgtag

SEQ ID NO: 8695 - DNA, 2004 bp, synthetic construct
  misc_feature 1..2004: note = source = /note="Description of Artificial Sequence: Synthetic coding sequence"
  source 1..2004: mol_type = other DNA
atgggcagcagccggctggccgccctgctgctgcccctgctgctgatcgtgatcgatttatccgactcagccggcatcggttttcgtcatttaccccactggaacactcgctgtccattagcctcccacacagatgattcatttactgggtcttcagcttacatcccttgccgcacctggtgggccctgttcagcactaagccgtggtgtgtcagagtctggcattgtagccgctgtttatgccaacatctgttaagcggtggatcgggactgcaacggggcttgtttcacctgttggtgcagaagagcaaaaagtctagcacgtttaagttttaccgccgccacaagatgcccgcaccagcacaaaggaaactgttgccaaggcggcacctcagtgagaagagccaccacatttccattccatctcccgatatatcgcacaagggattgagaagtaagcgtactcagccctcagaccctgagacatgggaatcattaccaaggctagactctcagaggcacgggggcccggaattctcctttgacttgctcccggaagctagagctatccgggtgaccatcagtagtggccccgaagtcagtgtgagattatgtcaccagtgggctctggaatgcgaagaattatctagtccatacgacgttcagaagatcgttagcgggggacatactgtcgagcttccatacgaatttctcctcccttgtctgtgcatagaggcatcctacttgcaggaggataccgtacggcgcaagaaatgcccatttcaaagttggcccgaggcctacggcagcgacttctggaaatctgtccattttacagattattcacagcacacacagatggtcatggctctgactctgaggtgccccttgaagttggaagctgccctctgccagaggcatgattggcatactctttgtaaggacctgcctaatgcaactgcacgcgagagcgatggatggtacgtgcttgagaaagttgacctgcacccgcaactgtgctttaaattcagcttcggcaacagttcccacgtggagtgtccccatcagacaggcagtttgacatcctggaatgtctctatggatacacaagcccaacagttgatccttcacttcagctcccggatgcacgccacctttagcgctgcctggtcgcttcccggcttaggccaggatacgctcgtccccccggtatataccgtctcacaggccagagggtctagtcccgtttctttagatctcatcataccctttctccggccagggtgctgtgtgctggtttggcgaagtgatgtgcaatttgcctggaaacatctgttgtgccccgacgtgagttacagacatctgggcctgttgatattggctttgctggctctcctcacattgttgggcgtggtgttggccctcacttgccggcggcctcagagcggcccaggcccagcaagacccgtccttctgctccatgctgctgattccgaggcgcagcgtcggttagtgggcgccctggcagagttgttgcgagccgccctgggcggcgggagagatgttattgtggacctctgggaggggagacatgtggctcgcgttggtcctctgccatggttatgggctgcacgtacgagagtggccagagagcaggggacagtcctcctgctgtggtctggagccgatctccgtcccgtgagtggacccgacccccgggctgccccacttctagcattattacacgcggccccccgaccactgcttctgctcgcatacttcagccgtctgtgcgctaagggtgatatccccccgccacttcgggctctgccacgctaccggctgctgcgcgacctgccacgcctattgagagccttagacgccaggcctttcgcagaagccacttcttgggggcgcctcggggcaaggcagcgcaggcaaagtcgcctggagctgtgctctcgtcttgaacgagaggccgcccggttggcagacctcggatag

SEQ ID NO: 8696 - DNA, 609 bp, synthetic construct
  misc_feature 1..609: note = source = /note="Description of Artificial Sequence: Synthetic coding sequence"
  source 1..609: mol_type = other DNA
atggagctgtggggcgcctacctgctgctgtgcctgttcagcctgctgactcaggtaacgacagagccccctactcagaaaccaaagaaaatagtcaacgctaaaaaagacgtagttaacacaaaaatgttcgaggaattgaagtcaagactggacactctggcccaggaagtagctctgctgaaagaacaacaggccctccagaccgtctgtctgaagggaaccaaggtgcacatgaaatgtttcctggcgttcactcaaacaaagacctttcatgaggcatcagaggactgcatttcgagaggaggaacacttgggactccacaaaccggatcagaaaacgacgccctctacgagtacctgcggcagagcgttgggaatgaggcggaaatatggctcgggctgaatgatatggctgccgagggcacttgggtggacatgacaggtgcgcgaatagcctacaagaattgggagacagagataaccgcacagccggacggagggaagactgagaattgcgcagtgctgagtggcgccgcgaacggcaaatggttcgacaaaagatgtcgcgatcagctgccctacatttgtcaatttggcatcgtatag

SEQ ID NO: 8697 - DNA, 1839 bp, synthetic construct
  misc_feature 1..1839: note = source = /note="Description of Artificial Sequence: Synthetic coding sequence"
  source 1..1839: mol_type = other DNA
atgctggagggcctgggcagccccgccagcccccgggccgccgccagtgcttccgttgctggaagcagcggccctgctgcttgctcgcccccttcctccagcgcgcctagatcacccgagtctcctgcccctcgtcggggtggcgttagagcatccgtcccccagaaactggccgaaatgctcagttctcaatatggcctgattgtcttcgtcgccgggctcttgttactgctggcatgggccgtgcatgcagccggcgtttccaaaagtgacttattatgctttctgaccgccttgatgctcctgcagcttctgtggatgctgtggtacgtcgggaggtccagcgcacaccgccggctttttcggctgaaggacactcatgcaggcgccggatggctgagagggtccattacactgttcgccgtcatcacagtcatcctcggatgcctcaaaatcggttacttcattggttttagcgagtgtctttccgcaacagaaggggtcttcccggtgactcattctgtacatacgttgctgcaggtgtacttcctgtggggccacgctaaggacattatacagtcatttaagactttggagaggttcggcgtgatccactccgtattcacaaacctgctcctttgggccaacggcgtgttgaacgagtccaagcaccagctgaacgagcacaaagagaggctgataaccttagggtttggcaacatcaccaccgttctagacgatcatacccctcagtgtaattgcacccctcctaccttgtgcacagccatttcccatggtatctattacctatatcctttcaatattgaataccagatactggcgtcaaccatgctctatgtactttggaagaacatcggaagaaaagtagactctcatcagcatcagaagatgcagtttaagagtgatggtgtcatggttggcgctgtcttaggcctcacagtcctagctgctaccatcgccgtcgtggtcgtgtaccttatccacattggtcggagtaaaacaaagtcagagagcgctcttatcatgttttacctgtacgcaatcacgctgttgatgttgatgggggcagctggattagccggaatacggatttacaggatagatgaaaagagtctggatgagtctaaaaatccagcccggaagctggacagtgacctcctcgtcggtacggcttctggctcttggctgatttcatggggaagcatccttgcaatcctttgcgcagagggccatcctcgctatacttggtacaatttgccatacagtatcctggccattgtggagaaatatattcagaatctcttcattttcgaatcaattcacagggagcctgaaaagttgagcgaagatatccaaacacttcgagtagtgactgtgtgcaatggcaatacaatgcccctggccagttcttgccctaagtccggcggcgtggcaagggacgtagcgccacaagggaaggatatgccacctgccgccaatgggaacgtctgcatgcgcgagagtcatgataaggaggaagagaagcaagaggagtcgagttggggcggctccccttcacctgtacggctcccaagattccttcaaggcaatgcaaagagaaaggtgcttcgcaatatagccgcttttctgtttctgtgtaacatcagcctgtggattccacctgcctttggctgccgccctgaatacgacaacggtctcgaagagatagtttttggatttgagccttggatcatagtcgtgaaccttgccatgcctttcagcatcttctacaggatgcatgcagccgcttcactgtttgaagtgtattgcaaaatatag

SEQ ID NO: 8698 - DNA, 786 bp, synthetic construct
  misc_feature 1..786: note = source = /note="Description of Artificial Sequence: Synthetic coding sequence"
  source 1..786: mol_type = other DNA
atggagctgctgcaggtgaccatcctgttcctgctgcccagcatctgtagcagcaactccacaggagtgcttgaggctgccaacaacagtctggtcgtcaccacgacaaagcctagcattacgacacctaacactgagtccctgcagaaaaacgtagtcacgcccactaccgggactacacctaaaggcacaatcacaaatgaactgcttaagatgtctttaatgtcaacagccactttcctgacatctaaagacgaaggcctcaaggccaccacaaccgacgtgcggaaaaacgactctattattagcaatgtgactgtcacctctgttactctgccgaatgctgtgagcacattacagagtagcaaacccaagactgagacgcagtcaagcatcaaaactaccgagatccctggctccgtcctgcagcctgatgcgagcccgagcaagaccggaaccctgaccagcatccccgtcactatccccgaaaatactagccagtcccaggtaattggcactgaaggcggcaaaaacgcttccacaagtgctactagtcgcagctattcttctatcattctgcctgttgttatcgccctcatagttataaccctgagcgtgtttgtgttggttgggctttatagaatgtgctggaaagctgatcccggcacccctgagaatggtaatgatcagccccaatctgacaaggaatctgtcaaattacttaccgtcaagaccatatctcatgaatcgggagagcacagcgcccagggaaagaccaagaactag

SEQ ID NO: 8699 - DNA, 6408 bp, synthetic construct
  misc_feature 1..6408: note = source = /note="Description of Artificial Sequence: Synthetic coding sequence"
  source 1..6408: mol_type = other DNA
atgcccgccctgggccccgccctgctgcaggccctgtgggccggctgggttctcactctgcagccgctgccccccactgccttcactcctaacgggacatacctccaacacctcgctcgggatccaactagcggtactctttacttaggcgctactaacttcctcttccagctgagtccagggttgcagcttgaagctacagtcagcacaggtcctgtgctggatagcagagattgtctgcctccagtcatgccagacgaatgtccacaggcacagcctacgaataacccaaatcagctgctgctcgtctctcccggggctctagtggtgtgtggttctgtgcatcagggagtgtgtgaacagagacgcctgggccagttggagcaactgttactccgtccggagaggccgggcgatacgcaatacgtggccgccaatgatcccgcagtgtccacagtgggactcgttgcacaaggtctcgctggcgaacccctgctgttcgtcggacggggctacactagtcgaggcgttgggggaggtatacctcccatcactacgcgcgccttgtggccacccgatcctcaagctgcattcagctacgaggagactgctaaactggctgtgggccgtctcagcgaatacagtcaccatttcgtaagcgccttcgccaggggcgctagcgcgtatttcctgtttctccgccgggaccttcaagctcagtcccgggcattccgggcctatgtgtctcgcgtatgtttaagggaccagcattactatagctatgtcgaactccccctggcctgcgagggaggacgctacggacttattcaggcggctgctgttgcaactagcagagaagtggcccacggggaggtcctgttcgcagccttctcctcagcagcccccccgacagttgggcgcccgccctcagccgccgcaggtgcttcaggagcttcagcgctatgtgccttccccctagatgaagttgatcgactggctaaccgcacccgcgatgcctgctatacgagggagggtcgcgctgaagacggtaccgaagtggcctacattgagtacgacgtgaatagcgactgtgcccagttgcccgtcgacactctagacgcctacccatgtgggagcgaccacaccccgagccccatggcttctcgtgtgcccctggaggctactccaattctggagtggccgggaatacagctcacagcagtagcggtaaccatggaggacgggcataccatcgcgtttttgggagacagtcaagggcaactgcacagagtgtatcttggccccgggagcgatggacacccctacagcacccagagtattcagcaagggtcagccgtgtccagagatctaacatttgacggtacgttcgaacacttatatgtcatgacccagtcgacacttctaaaagtgcctgtcgccagctgtgcacaacacctggattgcgcaagttgtctcgctcatcgggatccctattgcggctggtgtgtgttgttaggcagatgctctagacggagcgagtgctccagaggccagggccctgaacaatggttgtggtctttccagcccgaactggggtgcctgcaggtcgcagctatgtctcccgccaatattagtagagaagaaacacgggaagtttttctctctgtgcctgacctgccccctctgtggcctggcgaatcttactcctgtcacttcggcgagcatcagtcccccgctcttctgactgggagcggcgttatgtgtcccagccctgacccaagtgaggcacccgtcctccccaggggggctgactatgttagtgtgagcgtggagctgaggttcggcgccgtagtaatcgctaagacctctctgagtttctacgactgtgtcgctgtgaccgaactacggccctctgcccaatgccaggcttgtgtgagttctaggtgggggtgtaactggtgcgtgtggcagcacctgtgtacccacaaagcaagctgtgacgctggccccatggtcgcaagtcaccaaagccccctggtttcccccgatccccctgcccgcggaggtccgagtccctccccgccaacagcccccaaggcgctcgccactcctgcacctgacaccctgccggtggagcctggagcccctagtaccgcgacagcttctgatatttcaccaggagcaagtccgtcacttctaagcccttggggcccctgggctggctcaggtagcataagtagcccaggatcaaccggaagtccccttcacgaggagccaagccctccctctccccaaaatggccccgggactgccgttccggcacctacagactttagaccctctgcaacccctgaggatctattagcctcacctctgagtccttctgaggtggccgcagtgccccctgcagatccaggccctgaagctctgcaccccaccgtgcctttggacctacctcccgccactgtacccgctacgacttttccgggcgcgatgggaagtgtgaaaccagctcttgactggcttaccagggaggggggtgaactgcccgaagcagatgagtggactggcggggacgctcctgccttttccaccagtaccttgttgagcggggacggagattcggccgaactggaaggaccacccgctccattgattttgccctccagcttagactaccagtatgacacacccggattatgggaactggaagaagccacactgggcgcaagttcctgcccatgcgtggaatcagtgcagggttccacactgatgccagttcacgtcgagagagagattcgtttacttggtcgaaacctccacctgttccaggacggccctggcgacaatgagtgtgtcatggaattggaggggttggaggttgtggtggaggctcgtgtcgagtgtgagcctcccccagacacacaatgtcatgttacctgtcagcagcaccagttatcatatgaagccctccagcctgagctcagagttggtttattccttcgcagggctggacgcctgagggtggacagcgctgaaggcctgcacgtagttctttatgattgttctgtgggccatggggattgtagtcggtgtcaaactgctatgccccagtacggctgtgtatggtgcgagggagagcggccccgctgcgtgaccagggaggcttgcggagaggccgaagctgtggcgacgcagtgtccggctcccctcatacattccgtggaacctctgaccgggcctgtcgatggaggtaccagggtgaccatcaggggctcaaacctggggcagcatgtgcaggacgttcttggcatggtcactgtggctggagtgccttgtgccgttgatgcccaggaatatgaagtaagctcaagtttagtgtgcataaccggcgccagcggagaagaggtcgccggcgccaccgcagtggaggtacccggtagaggcagaggcgtctctgaacatgattttgcataccaggaccccaaggtgcatagtatttttcccgcccgggggccgcgtgcaggtggtacgcggttaaccctgaatggctcaaaactgcttactggaaggttagaggacatccgcgttgtggtgggtgatcagccttgtcacctgctccctgaacagcaatccgaacagctgcgctgcgagaccagccctagaccaactcctgcaacgttgcccgtggccgtgtggttcggagccacagaaagacggcttcagaggggacaattcaaatacaccctagaccctaatattacctcggccgggccaaccaagagtttcctctccggagggagggagatctgtgtgagagggcagaatcttgatgttgtgcagactccgcgtatccgtgttactgtggtgagtaggatgcttcagccctctcagggcttggggcgccgtcgcagggtggtacccgaaacagcatgcagccttgggccaagctgtagtagccaacagtttgaagaaccctgtcatgttaattctagccaactgataacatgtaggacccctgctctacctgggctcccagaagatccatgggttagagtggagtttatcctcgataacctggtcttcgactttgcaactttaaatcctacccccttttcgtatgaagccgatccaacactgcagcctctgaatccggaggatcccacaatgcccttccggcataagccaggcagcgttttttctgtcgagggagagaacctcgacctggcaatgagtaaggaggaagtcgttgcaatgataggggacggaccgtgtgtggtgaaaactttaaccagacaccacctctattgtgagcccccagtggagcagccgctgccgcgccatcacgccctgagagaggcccccgatagcctgccagagtttacagtccagatgggtaacctgagattctctctaggacatgtgcagtatgatggcgagagtccgggggcatttcctgttgccgctcaagttggcttgggcgtgggcacaagtctgttagctctgggagtcatcataatagtgctgatgtatcgacgcaagtcaaaacaggcactgagagattacaagaaggtgcagatacagttggaaaatcttgaatctagcgtgagggacagatgcaagaaggagtttactgatctcatgaccgagatgaccgatctgacttcggatctgcttgggagcggaatccctttcctggactataaggtttatgcagaacggatcttcttccccggccatcgagaatcacccctccatagagatctcggtgtccccgagtctagaaggcctactgttgaacaggggctgggacagctgtctaacttactgaactcaaagctgtttctgaccaagttcattcacactctcgaatcccagcgcactttctctgccagggacagagcatatgtcgcctcccttttgactgtcgcactacatggaaaactagaatattttacggacatactgagaactttgctctccgaccttgttgctcagtacgtcgcaaaaaatcccaaactcatgctgaggagaacagaaaccgtcgttgaaaagcttctgacaaattggatgagcatatgtctctacacatttgtaagggactccgtcggggagcctctctatatgcttttcagaggtataaaacaccaagtggataaaggcccagtggactctgtgacgggaaaagcaaaatataccttaaacgacaaccggctgcttcgggaggacgttgagtaccggcctcttacgctgaatgccctgctggccgtgggtcccggagccggcgaggcccaaggggtccctgtgaaagtgctggactgcgacaccatttctcaagcgaaggaaaagatgctcgatcagttatacaaaggagttcccctaacccaacgccctgatcctcgcactctagatgtggaatggcgatccggggttgccggccatcttatactcagcgacgaggacgtgaccagcgaggtgcagggcctctggaggcggctgaatacccttcagcattacaaagtacctgatggcgccaccgtcgcactggtgccttgtcttacaaagcatgtgctgcgcgagaaccaagattatgtgcctggggaacgaacccccatgctggaagacgtggatgaagggggtatccgcccctggcatctagtgaagccttcagatgagcccgagcccccgcgccccagacgtggctccctgcggggtggggaacgggaacgcgccaaagccatcccggagatatatctgacccggttgctgtctatgaagggtacattacagaaatttgtggatgacttgtttcaggttatcctgtcaacttcgagacctgtgccccttgcagtgaagtacttcttcgatctcttggacgagcaggctcagcagcatggcatcagcgaccaggatacaatccacatctggaaaaccaacagcctcccactgcgattttggatcaatattataaagaaccctcagttcgtattcgacgtgcaaaccagtgataacatggacgccgtcctcctggtgatcgctcagaccttcatggacgcctgcaccctggcagaccataaactgggccgcgacagtcctatcaataagctgctgtatgcccgcgacattcccaggtataagcgcatggtagagaggtactacgctgacatcagacaaaccgtacctgctagtgaccaagaaatgaactctgttcttgcggagctcagttggaactattccggcgacctgggggccagagttgcacttcacgaattgtacaagtacattaataaatattacgaccaaattattactgcactggaggaagatgggacagctcagaagatgcagctaggctatagattgcagcagattgcagcagctgtagaaaataaggtcacggacctgtag

SEQ ID NO: 8700 - DNA, 297 bp, synthetic construct
  misc_feature 1..297: note = source = /note="Description of Artificial Sequence: Synthetic coding sequence"
  source 1..297: mol_type = other DNA
atgaagctgatggtgctggtgttcaccatcggcctgaccctgctgttgggcgttcaggccatgccggccaacaggctgtcttgctatcggaagatacttaaagatcacaattgtcataacctgccagaaggggttgcagatcttactcagatcgacgtgaacgtgcaggaccacttctgggacggcaagggatgcgagatgatctgctattgtaatttctccgagctactttgttgtcctaaagacgtgttttttggacccaagataagcttcgtaataccatgcaacaatcaatag

SEQ ID NO: 8701 - DNA, 1443 bp, synthetic construct
  misc_feature 1..1443: note = source = /note="Description of Artificial Sequence: Synthetic coding sequence"
  source 1..1443: mol_type = other DNA
atgaagcggagcgtggccgtgtggctgctggtgggcctgagcctgggtgtgccacagtttggaaagggggacatctgtgaccccaacccttgcgagaatggcggcatttgtctgccaggtctcgctgacgggagtttttcctgcgaatgccccgatgggtttaccgatcctaactgttcatccgtcgttgaagtggccagcgatgaggaggaacccacctcagccggcccgtgcactcccaatccctgccacaacggcggaacctgcgaaattagcgaggcctatcgcggtgacacatttattgggtacgtttgtaagtgtccgcgggggttcaacgggatccattgccagcataacatcaatgagtgcgaggttgaaccttgcaaaaatgggggtatatgtaccgatctggtggcaaattattcgtgcgagtgtccaggagaattcatgggtcgcaattgccagtacaaatgctctggccccctcggcatcgaaggtggcatcatttcgaatcagcagatcactgccagcagcacccatcgggcactgtttggactgcagaagtggtacccctattacgcccgcctgaacaagaaaggactcattaatgcctggaccgctgctgaaaatgacaggtggccttggattcagattaatctgcagcgaaagatgagggttaccggagtgattacacagggcgcgaaacgcatcggaagccctgaatatataaaatcatacaagatcgcatactccaacgacggcaagacatgggcaatgtataaagtcaagggcactaacgaagatatggtgtttcgcggcaacatcgataataacaccccttacgcaaactcctttacccctccaattaaagcccagtacgtgcggttatacccacaggtgtgccgcagacactgcactctgcggatggagctcctcggatgcgaactttccggctgctctgagccgctgggaatgaagtctggtcacatccaggactaccagatcactgcaagtagtatattccgaaccctgaatatggatatgttcacctgggaaccccgcaaggctcgtctcgataagcaggggaaggtcaacgcctggacaagtggccacaacgatcagtcgcagtggctgcaggtggacctcctggtgcctaccaaagtgaccggcatcataacgcagggcgccaaggacttcggccacgttcaatttgtgggatcatacaaactggcttacagcaatgacggagagcattggactgtctatcaagacgaaaagcaacggaaagacaaggtgtttcaggggaactttgataacgacacacaccgtaagaatgtcatcgatccccccatctacgctaggcacattcgaattttgccatggagctggtacggcagaatcactttgaggagcgaactacttggttgcaccgaggaagaatag

SEQ ID NO: 8702 - DNA, 1323 bp, synthetic construct
  misc_feature 1..1323: note = source = /note="Description of Artificial Sequence: Synthetic coding sequence"
  source 1..1323: mol_type = other DNA
atggccgtgaagctgggcaccctgctgctggccctggccctgggcctggcgcaaccagcttcggccaggcggaagcttctggtgttcctcttggacggatttaggtcagactatatttccgatgaggctctcgaatcccttccaggtttcaaagaaatcgtgtcaaggggcgtgaaagtcgactaccttacaccagactttccctcgctcagctacccaaactactataccctgatgactggacggcattgcgaggtgcatcagatgatcggaaactatatgtgggaccctactactaacaaatccttcgacatcggcgtgaacaaagatagcttgatgccgctctggtggaacggtagcgagccactgtgggttactttaactaaagcaaagcgcaaagtttatatgtactattggccgggctgtgaagtggaaatcctcggtgtgcgccccacgtattgcctagaatacaaaaatgtcccaaccgatatcaactttgcgaatgccgtctcggatgctctggactcattcaagagtgggcgggctgacctcgctgctatctatcatgagcgcatcgatgtggagggacaccattacggccctgcttcaccccagcggaaggatgctttgaaggctgtcgataccgtgttgaagtatatgacaaagtggatacaggagagaggtctgcaggaccggttgaacgtcattattttctcagaccacggcatgaccgatattttttggatggataaggtgatcgaactgaacaagtatatttctcttaacgatctgcagcaagtcaaggataggggaccggtggttagcctatggccggccccaggtaagcacagcgagatttacaacaaattgagcactgtcgagcatatgaccgtgtatgagaaggaggccatacccagccgattttattataagaaagggaaattcgtgagtcctctcacactggtggcagacgagggctggttcattaccgaaaacagggaaatgctcccattctggatgaattcaacaggcaggagggaaggctggcaacgaggctggcacggctacgataatgagttgatggacatgcgagggatatttctcgctttcggacccgactttaaatccaacttcagagcagcacctattcggagcgtggatgtgtacaacgtgatgtgcaacgtagtgggcatcacccccttgcccaataatggaagctggtctcgggtaatgtgcatgctgaagggcagggcctctacagccccacccgtctggccttcacactgcgctcttgccctgattctcctctttctgcttgcttag

SEQ ID NO: 8703 - DNA, 351 bp, synthetic construct
  misc_feature 1..351: note = source = /note="Description of Artificial Sequence: Synthetic coding sequence"
  source 1..351: mol_type = other DNA
atggagagcagccgggtgcggctgctgcccctgctgggcgccgcccttctgctcatgctcccgctgcttggtaccagggctcaggaggacgcggaactccagcctcgagcgctcgatatctacagtgctgtcgatgatgcttctcacgagaaggagttaattgaggcactgcaggaagtactaaaaaaactgaagtccaagcgggttccaatctacgagaagaagtacggccaggtgccaatgtgcgacgccggagagcaatgtgcggttcggaagggcgcacgtattggaaaactgtgtgactgtcctaggggcacctcgtgtaattccttcctactgaaatgtctgtag

SEQ ID NO: 8704 - DNA, 1365 bp, synthetic construct
  misc_feature 1..1365: note = source = /note="Description of Artificial Sequence: Synthetic coding sequence"
  source 1..1365: mol_type = other DNA
atggcccggcccaacaagttcctgctgtggttctgctgcttcgcctggttgtgttttcctattagtcttggatctcaggcatctgggggggaggcccagattgcagccagtgctgaactggagtctggggccatgccatggtcgctccttcagcacatcgacgaacgggatcgggcgggccttctgcctgccctctttaaggtgttgagtgtgggtaggggaggttcaccacgactgcagccagattcccgcgcactgcattatatgaaaaagttgtataagacatacgcaaccaaggagggcatccccaaaagcaatcggtctcatctgtataataccgtgcgcctgttcaccccttgcactcgacataaacaggcccccggcgaccaagtgacaggaattctgcctagtgtcgagctattgttcaaccttgaccgcatcacaactgtggaacacttactcaagagcgtgttgctgtacaacattaacaattccgtgtccttttccagcgctgtgaagtgcgtttgcaatctgatgatcaaggagccaaaaagttctagtagaaccctcggacgagccccctattccttcacttttaacagtcaattcgagttcggcaagaagcataaatggatccagatcgacgtcacttcacttcttcagccgcttgtggcttctaataagaggtcaattcatatgtccattaactttacttgcatgaaggaccaattagaacatcccagcgctcagaatggattgttcaacatgactttagtcagtccctcccttatcctttatctgaatgatacttcagcgcaggcttatcattcttggtactcactgcattacaagcgtaggccgtcccaaggcccagaccaagaaagatccttgtctgcctacccagttggcgaagaggcagctgaggacgggcggagttcacatcaccggcataggagaggtcaggaaacagtgtcatcagagcttaagaagccactcgggccagcatccttcaatctaagcgagtacttcaggcagttcctgctaccccagaacgagtgtgagctccatgattttcgcctgagctttagtcagctgaagtgggacaactggatcgtagccccccaccgctataatcctcgctactgtaagggtgattgccctcgagcggtcggccaccgctatggatcaccggtgcacaccatggtgcaaaatattatctacgagaaactagactcctctgtcccgagacctagttgtgtgcctgctaagtactcccccctatccgtgctcacaatcgagcctgacggcagtattgcctacaaagagtacgaagatatgatcgccaccaagtgcacatgtcgatag

SEQ ID NO: 8705 - DNA, 234 bp, synthetic construct
  misc_feature 1..234: note = source = /note="Description of Artificial Sequence: Synthetic coding sequence"
  source 1..234: mol_type = other DNA
atgtggcacctgaagctgtgcgccgtgctgatgatcttcctgctgctgctgggccaaatcgacggctctccgattcccgaagtctcaagcgccaagcggcggcccaggagaatgacgcccttctggaggggcgtgtctttgagacccatcggcgccagttgtagggacgactctgagtgtatcacaaggctatgtcgcaagagaagatgttccctttccgtggcacaggagtag

SEQ ID NO: 8706 - DNA, 912 bp, synthetic construct
  misc_feature 1..912: note = source = /note="Description of Artificial Sequence: Synthetic coding sequence"
  source 1..912: mol_type = other DNA
atgagcgagccccagcccgacctggagcccccccagcacggcctgtatatgctttttctgcttgttctggtgttctttctgatgggacttgtgggcttcatgatttgccatgttttaaagaagaaaggttatcgctgtaggacaagtcgtggaagcgagccagacgacgcccaacttcagcctcccgaggacgacgatatgaatgaagacacagtggaaagaattgtgcgttgtatcatccagaacgaggccaatgccgaggcccttaaagagatgctcggcgatagcgagggagagggtacagtccagctgtcaagcgtggacgccacatcatctttacaagatggggctccttcgcaccatcacacggtgcaccttggaagtgcggcaccatgtctccactgtagccgctcaaaaagacctcccttggttcgtcaaggcaggtccaaagaaggcaaatctcggcccaggaccggggagaccaccgtgtttagcgtggggcgcttccgcgtaacacatattgagaaacggtatgggctgcatgagcaccgtgacggcagccccaccgaccgctcatggggctcaggaggcggccaagatccggggggaggtcaaggatcagggggaggacaacctaaggcagggatgcccgccatggaaagacttccacctgagcgaccacagccccaggtgcttgcctctcctcccgtccagaatggaggcctgcgcgactcatcacttaccccccgtgctttggagggcaatccgagggcctccgcagagcctacgctccgcgctggtgggagaggcccttcacctggccttcctactcaagaggcaaacggccagccatccaaacctgataccagcgaccaccaggtttccttaccacagggtgccggatcaatgtag

SEQ ID NO: 8707 - DNA, 795 bp, synthetic construct
  misc_feature 1..795: note = source = /note="Description of Artificial Sequence: Synthetic coding sequence"
  source 1..795: mol_type = other DNA
atgcggaccctgtggatggccctgtgcgccctgagccggctgtggccaggtgcccaggccggatgcgccgaggccgggcgatgctgcccaggtcgggatcccgcgtgttttgcccgcggatggaggttggacagagtctacggcacctgcttttgtgatcaagcctgcagatttacaggtgattgttgcttcgattatgatcgggcctgtccggcacgaccctgttttgtcggagaatggtcaccgtggagcggctgcgccgatcagtgtaagccaaccaccagagttcgccggagaagcgttcaacaggaaccacaaaatggcggcgccccctgccctccgcttgaagagagggcagggtgcctggaatattcaacaccccaaggtcaggattgtggtcacacctacgtacccgcttttattacaaccagcgccttcaacaaggagcgaacacggcaggccacctcacctcactggtcaacacacaccgaagatgccggctactgcatggagtttaaaactgagtctcttactccacactgtgccctcgaaaactggcccctcaccagatggatgcagtacctgcgagagggctataccgtctgcgtggattgtcagccccctgctatgaactctgtctccttgaggtgttccggggacggcctcgattcagatggtaatcaaaccctgcactggcaggccattgggaaccctcgctgccagggcacttggaaaaaagtgcgtagagtggatcagtgttcttgccctgccgtgcatagctttatctttatctag

SEQ ID NO: 8708 - DNA, 312 bp, synthetic construct
  misc_feature 1..312: note = source = /note="Description of Artificial Sequence: Synthetic coding sequence"
  source 1..312: mol_type = other DNA
atgcggcagcggctgctgcccagcgtgaccagcctgctgctggtggccttactctttccaggatcctcacaagcccgacacgtgaaccactccgccacagaagcactcggtgagctaagagagcgggctcctggacaaggtaccaacggcttccagctgctgcgccacgccgttaaacgcgatcttctgccaccccgcacacctccatatcaggtgcatatcagtcatagagaagcaaggggccctagctttagaatctgtgtggactttctgggaccccggtgggctaggggctgctccacaggtaattag

SEQ ID NO: 8709 - DNA, 3867 bp, synthetic construct
  misc_feature 1..3867: note = source = /note="Description of Artificial Sequence: Synthetic coding sequence"
  source 1..3867: mol_type = other DNA
atggccagcgtggcctgggccgtgctgaaggtgctgctgctgctgccaacgcagacctggagtcccgtaggtgctgggaaccctccagattgtgatgcacctctggcctcagcactaccaagaagttccttctcttcatcatcggagctgagtagttcgcatgggcctggcttctcgcggttgaatcgccgggacggcgctggggggtggacaccgcttgtttccaacaagtaccagtggctgcagatcgatctaggagagcggatggaagtgaccgcagtggccactcagggcggctatggcagcagtgactgggttacctcataccttctgatgttctcagacggtggccgaaattggaaacagtaccgcagagaagagagcatatggggcttccctggaaatacaaatgcagactccgtggtgcactatcgattacagcctccttttgaagcccggtttttgaggttcctcccattggcgtggaatcctaggggacgcatcggcatgagaattgaagtctatgggtgtgcttacaagagcgaagtggtgtacttcgacggtcagagcgctctgttgtatagactcgataaaaaacccctgaaacctatcagagacgtgatttctttgaaatttaaggctatgcagtccaacggcattctacttcatcgggaaggccagcacggaaaccatatcacacttgagctgatcaaagggaagctggtgttctttctgaatagcggcaacgctaaactgccatccacaatcgccccagtgacactgactctcggctcacttctcgatgatcagcactggcactccgttctcatcgaattgctcgacacacaggtgaatttcactgtggataagcacacacaccacttccaagctaagggcgatagctcttatttggaccttaatttcgaaattagtttcggaggaatacctactcccggaagatccagagccttccgtcgcaagagctttcacggttgtcttgagaacctgtattacaacggggtcgacgttactgagctcgcaaagaagcataagcctcagatccttatgatgggcaatgtttctttctcctgtcctcagccgcagactgttcccgtaacgttcttaagttcacgctcttatctcgcccttcccgggaattctggcgaggataaggtgagtgtgactttccagttccgaacctggaaccgcgccggtcacctgctgttcggtgagctccgccgaggttctggctccttcgtgctgttcctgaaagatggaaaactgaagctcagtcttttccagccgggacagagtcctagaaatgtgacagctggcgcgggtttgaacgatgggcagtggcactccgtgtcgttttccgctaagtggtctcatatgaacgttgtcgtcgacgacgataccgcagttcagcctttggtcgccgtgctaatagattctggagacacctattattttgggggctgcttggacaactcttccggaagcggttgtaagagtcctttgggtggatttcagggatgtttaaggctgattacaatcggtgataaggctgtggatcctatattggtgcaacagggagcactgggcagctttagggatttacaaatcgattcatgcgggatcacggacaggtgtctgcccagctattgtgaacacggcggcgaatgctcccagagctgggatactttttcctgtgactgcctgggcactggttacacaggagaaacatgccatagctcgctttatgagcagtcctgcgaagcacataagcatcggggtaatccatccggactgtactacatcgatgcagacggaagcggacccctcggccctttcctcgtatactgcaatatgacagccgacgctgcctggactgtcgtccagcacggtgggccggacgcagtgaccctgagaggtgcccccagcggacaccccagatccgcagtctcctttgcttacgcagctggcgccgggcagctgcgctccgcggtgaacttggctgaaaggtgcgaacaaaggctggccctgagatgtgggacagcaagacgaccagattctcgggacggaacccctcttagttggtgggtcgggcgcaccaatgaaacccacacttcatggggggggagtctgcctgatgcacaaaagtgcacctgcgggttagaggggaactgcatcgactcacagtactattgtaattgcgacgcgggtcggaatgagtggacgtccgatacaatagtgctgagtcaaaaggagcacttgcccgtgacccagattgtcatgaccgatgccggcagaccacattcagaagccgcgtatactctggggccccttctgtgcagaggagatcagtctttctggaattccgccagtttcaatacagaaacgagttacctccactttccagctttccacggagagctgacagccgacgtctgcttcttcttcaaaacaaccgtgagcagcggcgtgttcatggagaacctgggcattaccgatttcattcggattgagctgagggccccaactgaggtcactttttcgttcgacgttggtaacggcccttgtgaagtgaccgtacagtctcccaccccctttaatgacaatcagtggcaccatgtgcgggcagagcgaaatgtgaaaggcgcatccttgcaggtcgatcagcttccccagaaaatgcaacctgccccggcggacggacatgtgcggctgcagctgaacagccaactatttattggaggcacggccacccggcaacggggatttctgggatgtattaggtccctgcagctgaatggggtcgccctcgatcttgaagaaagggccaccgttacacccggcgtcgagcctgggtgcgcaggccattgctctacctacggacacctctgcagaaacgggggtaggtgtcgcgagaaacgccgcggcgtgacttgcgactgtgcattcagcgcatatgatgggccattctgttccaatgagatttcggcctacttcgctaccggttccagtatgacatatcattttcaagagcattatacgttaagcgaaaatagttcctcgctggtctcctcccttcatagggatgtgacactaacgagagaaatgatcacattaagttttagaactaccaggaccccctcactgcttctgtacgtgtccagcttctacgaagaatacctgtcagtgatcctggcgaataacggatctctacagatcagatacaagcttgacaggcatcagaaccctgatgccttcacttttgattttaagaacatggccgacggacagctgcaccaggtgaaaatcaacagagaagaggccgtggtaatggtggaagtaaaccaaagcaccaagaaacaggtcatattgtcttccgggactgaatttaatgcagtcaagtccctaatacttgggaaagtgttggaagcagcaggggccgatcccgacacccggagggccgctacttccggtttcactggatgcctgtccgccgtacggtttgggagagccgcccccctgaaggctgcactgaggccatcggggccctctagggttacagtccgtgggcacgtggctccgatggccaggtgtgccgccggggcagcaagcggttcaccagcgcgcgaactggctccccggctggctgggggagcagggagatctggacccgctgatgagggagaaccccttgtcaatgccgacagaagggacagtgcggtcattggaggagtaatcgcagtggttatctttattctgctgtgcattaccgcaatagctattcgtatatatcagcaaaggaagctcagaaaggaaaacgaatcaaaggtcagcaagaaagaggagtgctag

SEQ ID NO: 8710 - DNA, 369 bp, synthetic construct
  misc_feature 1..369: note = source = /note="Description of Artificial Sequence: Synthetic coding sequence"
  source 1..369: mol_type = other DNA
atggtgcccggcccccccgagagcgtggtgcggttcttcctgtggttctgctttctattaccccccacccggaaagccagctgtgaccctagggacctgaagtcttgtaataggccctgtgtttggtcaaggctgctgaagccaaactcctctctgagtaatctggagaccgcctactttccgcagatcctaagatttctgcgaccatggtacttctcacggtcacacttgaactatcatcagaaggcccctgccagatgggaatggctctactcgatttaccgaaaaggcactaaggcacagcgacgcaatgtacttcggtcaccttgcgcaccgccccagccgtcgtggccttgcagcgtgatatag

SEQ ID NO: 8711 - DNA, 1887 bp, synthetic construct
  misc_feature 1..1887: note = source = /note="Description of Artificial Sequence: Synthetic coding sequence"
  source 1..1887: mol_type = other DNA
atggcccccagcgccgaccccggcatgagccggatgctgcccttcctgctgctgctatggttcctccccataaccgaaggttcccagagggcggagcccatgtttacagccgtgacaaacagcgtgttgccacctgactatgattccaatcctacacagctaaattacggagtagcggttacggacgtcgaccacgatggagacttcgaaatcgtcgtggccggatacaacgggcctaacctggttttgaaatacgatcgcgcccagaagcggctggtgaacattgcggtagacgagcggtcctcaccttactatgccctgcgggaccgacagggaaacgccatcggcgtgacagcttgtgacatagacggtgatggcagagaggagatctattttctgaataccaacaacgctttcagcggagtcgccacttacacagataagctcttcaagtttagaaacaatagatgggaggacattctgtccgatgaagttaacgtggccaggggagtcgcttctctctttgcaggccgcagcgtggcctgtgtggataggaagggctcaggacgctactcgatttatattgcaaattacgcctatggcaacgtgggccccgacgctctgattgagatggaccccgaggcctctgacttgtccaggggtattctggccctgcgcgacgtcgcagccgaagccggtgtgtcaaagtacaccgggggacgaggtgtgagcgtgggtccaatcctgagcagttctgccagtgacatcttttgcgataacgaaaacggtcctaatttcctgttccataaccgtggcgacggcacgtttgttgacgccgctgcgtcagctggggtcgacgacccgcaccagcacggacgcggcgtggctctggcagactttaaccgcgatggcaaagtagatatagtttatggcaattggaacggccctcacagactctacctccaaatgtcgactcatggaaaggttcggttccgggacattgcctccccgaaattttcaatgccctcccctgtcaggactgtaattaccgccgatttcgacaacgatcaggagcttgaaatttttttcaacaacatcgcgtatcgctcaagcagcgcgaatcgcttgttcagggtgatacgaagggagcatggtgatccactgatcgaagaattgaacccgggcgacgcgctggaaccagaggggcggggcaccggaggcgtggtgactgatttcgatggggatgggatgcttgacttaattttgtctcatggggagagcatggcgcagcccttgtccgtcttccgagggaatcagggctttaataataactggctgagagttgtgcctcgaactcgctttggcgcattcgcccgcggcgccaaggtagttctttataccaaaaaaagcggggcccacttaaggattattgatgggggcagcggatatctctgcgaaatggaacccgtcgctcacttcggtcttggcaaggatgaagcatccagcgtggaagtgacttggcctgatggcaaaatggtctcaagaaatgtagcctccggggaaatgaacagcgttcttgagatcttataccctcgggacgaagacacgctccaagatcctgctcctctggaaacaccaatgaacgctagctccagtcactcctgtgcgctcgagacctccccctacgtgtctacaccaatggaggctaccggagctggacccacaagaagcgctgtaggagcgacatcacctaccaggatggcacagcctgcatggggactcagtgcatcacacagggcgcccgcacccccacctcctcccctgttgctcccattgcctctcctactgccactgttggagctgcccctgcttcaccggtccagttag

SEQ ID NO: 8712 - DNA, 1008 bp, synthetic construct
  misc_feature 1..1008: note = source = /note="Description of Artificial Sequence: Synthetic coding sequence"
  source 1..1008: mol_type = other DNA
atgcagggccagggccggcggcggggcacctgcaaggacatcttctgctcaaagatggctagttacctctacggagtgctcttcgcggtcgggctgtgcgctcccatctattgcgtgtcccccgccaacgcccctagtgcgtatccgcgcccctcctccacaaaatccactcctgcaagtcaggtgtactccttaaacaccgatttcgcatttcgtttatatagacgccttgtgctggagacccccagtcagaacatctttttttcccccgctcgcatcaactcccatgtgaagaaaaagacacaggggaaggtcgtggatattattcagggtctcgacctgctaacagcgatggttttagtgaatcatatattttttaaagccaaatgggagaaaccattccacccagagtacactcgaaaaaactttccatttctggttggagagcaggtaacagtgcacgtccccatgatgcatcagaaggagcaatttgcctttggtgttgataccgagttaaattgcttcgtcctgcagatggactacaagggcgacgctgtggcttttttcgtgctgccgtcgaaaggcaagatgaggcagctggagcaggccctctctgcaaggacgctgagaaagtggagccacagcttgcagaaaagatggattgaggtcttcattccaagatttagcatcagtgcctcatataatttggagactattctccccaagatgggaattcagaatgtgtttgataaaaatgctgatttttcggggatcgcaaagcgagacagcctccaggttagcaaggccactcacaaggcagtacttgacgtgagcgaagaggggactgaggccacggctgccacgaccacaaaatttatcgtgagaagtaaagatggcccaagctactttacagtctccttcaacagaacctttctcatgatgataaccaataaagccacagatggcatcctgtttctgggcaaggttgagaatccaacaaagtcatag

SEQ ID NO: 8713 - DNA, 768 bp, synthetic construct
  misc_feature 1..768: note = source = /note="Description of Artificial Sequence: Synthetic coding sequence"
  source 1..768: mol_type = other DNA
atggtgctgctgctggtgatcctgatccccgtgctggtgagcagcgctggtacatccgcccactacgaaatgctcggcacatgtcgaatggtatgcgacccctatggcgggaccaaggctccatctaccgcagctacccccgacagagggcttatgcaatctctgccgacatttatccaggggccgaaaggggaagctggaagacccggaaaagccggcccgaggggccctccaggagaacccggccccccaggtccaatgggaccacccggggagaaaggtgaaccaggccgccagggtctgcctgggccaccaggcgcgccggggctcaacgcagcaggagccatcagcgcagccacgtatagcacggtccctaaaatcgccttctatgcaggcctgaaaagacagcacgagggatatgaggtactcaaattcgatgacgtagtgaccaacctgggaaatcattacgatcccactacagggaagtttacctgtagcattccaggcatttatttctttacataccacgtactgatgcgcggaggcgacggcaccagcatgtgggccgacttatgcaagaataatcaggtccgcgccagcgctatagcccaggacgcagaccagaactatgactacgctagcaactctgttgtgctgcatctggagccaggggacgaagtgtacattaaactagatggcggtaaagctcacggaggtaacaacaacaagtactcaacattcagcggctttataatttatgctgactag

SEQ ID NO: 8714 - DNA, 1617 bp, synthetic construct
  misc_feature 1..1617: note = source = /note="Description of Artificial Sequence: Synthetic coding sequence"
  source 1..1617: mol_type = other DNA
atgagcttcagcgccaccatcctgttcagcccccccagcggcagcgaggcacgctgttgttgttgcgcttgtaaatccgagaccaatggggggaataccggatcgcagggcggaaacccacctccatctacaccaatcacagtcaccggacacggtctggccgtccagtcatccgagcagttactccacgtgatttatcagcgtgtggacaaagcagttggcctggcagaggctgctctgggccttgcaagggctaataatgaactcctgaagcggttacaagaagaggtgggagacctacggcaggggaaagtctcaatcccggatgaagacggggaatctcgagcccatagctctccaccagaggaacccgggccactgaaagagagcccgggggaggcttttaaggctctcagcgccgtggaggaagagtgtgactccgtcggcagcggagttcaagttgtgattgaagaactaaggcaactcggggcggcttccgtggggcctggcccactgggtttcccggctactcaacgggatatgcggcttccaggctgcaccttggcggcgtccgaggccgctcctctcctcaaccctcttgtcgacgactatgtggcctcggagggagctgttcagagagtactggtgcctgcctacgctaaacaacttagccctgctacccagctagcgattcagagggccacccctgagaccgggccagaaaatgggaccaagttgcctcccccccgtccggaggacatgctgaacgccgccgcagctctcgactccgcactggaggaatccggaccagggtctacgggcgagctgcgccattcattggggctgacagtctctccatgccggacccgagggagcggacaaaaaaattcaagacgcaagcgagacctggtgctgtctaagctcgtgcacaatgtacacaatcatattactaacgataagcgcttcaacggctcggagtccatcaagtcttcttggaatatcagcgtggtcaaatttcttctggagaagctgaaacaggagcttgtcacaagcccccataattacacagacaaggagctcaagggcgcttgcgtggcatactttctgaccaaaaggcgcgagtacagaaactccttgaacccgtttaaggggctgaaggagaaggaggagaaaaaactgcggtcgagaagatacaggttgtttgccaaccggagcagtattatgcgccacttcggtcccgaggaccagcgactgtggaacgatgtgactgaggagctaatgtcagatgaagaagattctctcaacgaacccggcgtgtgggtcgcacgcccccctcgattccgcgcccagcgactgactgagctgtgctaccatttggatgctaattcgaagcatgggaccaaggcaaatcgagtgtacggcccacccagcgaccgactcccttccgccgaggcgcagctactgccccccgagctgtacaatcccaactttcaggaggaagaggatgaggggggtgacgagaacgctccggggagtccttcctttgaccagccgcacaaaacctgttgcccagacctaaatagcttcatcgagattaaagttgagaaagatgaatag

SEQ ID NO: 8715 - DNA, 2853 bp, synthetic construct
  misc_feature 1..2853: note = source = /note="Description of Artificial Sequence: Synthetic coding sequence"
  source 1..2853: mol_type = other DNA
atgctgctgctgggcatcctgaccctggccttcgccggccggaccgcaggcggctcggagcctgagcgagaggttgtcgtgccaatccgcctggacccagacatcaacggccgccggtattattggaggggccccgaagatagcggtgaccagggcttaatattccagatcactgcctttcaggaagacttctacctgcacttaactcccgatgcacaatttttggcccctgctttcagtaccgaacacttaggagtaccacttcagggtttgaccggcggaagtagcgatctgcggagatgtttctatagcggagacgtgaacgctgaacccgattcattcgccgctgtctctctatgtggggggctccggggcgcatttggataccggggggcagagtacgtgatatctccactaccaaatgcctccgccccagcagcccagagaaactcccagggcgcacatctcttgcagagaaggggagttcctggtggcccttcaggggacccaacgtccaggtgtggcgtggcctccggttggaaccccgccatcctccgggcgcttgacccctacaagcctcgaagggccggctttggggagagtcggagccgacgacgcagtgggcgggctaagcgctttgtttccatccccagatacgtggagaccttggtagtggccgacgagtccatggttaaattccacggcgctgacctggaacattatttgcttaccctgctcgcgactgcagctcgactgtatcgtcatccctccatcctaaaccccatcaatatcgtcgtcgtgaaggtactgctcctgcgggatagagacagcggcccgaaggtcacaggaaatgctgccctcacgctcaggaacttctgcgcatggcagaaaaagctaaacaaggtgagcgataagcaccctgagtactgggataccgccatcctgttcacacgtcaggacctttgtggcgcgaccacttgcgatacattgggaatggcagacgtcgggaccatgtgcgacccaaagcggtcctgcagtgttattgaggatgatggattgccctcagccttcactactgctcacgagctgggtcacgtgttcaatatgccacacgacaatgtcaaggtatgtgaagaggtcttcggaaagctgcgggccaaccacatgatgtccccaaccctaatacagatagaccgggccaatccatggtctgcatgttctgctgcaatcattactgattttctggactcaggccacggcgattgtctccttgaccagccttctaagccaattagccttcctgaagatcttcccggcgcctcatacacgctttcccagcagtgtgagctggccttcggggttggatctaagccttgcccttacatgcagtactgtaccaagttatggtgcaccggaaaagcaaagggccaaatggtgtgccagacaagacatttcccatgggccgacgggaccagttgtggtgaaggcaagttgtgcctcaagggggcttgtgtagaacggcacaatttgaacaagcaccgggtagacggtagttgggcaaaatgggatccctacggcccgtgttcccgcacttgtggcggcggagtccagttggcccgccgtcaatgcactaaccctacacccgctaatggcggtaaatactgcgaaggtgtgagggtgaaatatcgaagttgtaacttagaaccctgtccttcttctgcttctgggaaatcatttcgggaggaacagtgcgaagccttcaatggctacaatcactccaccaatcgactgacactggccgttgcttgggtccccaagtacagcggtgtatcgcctcgggataaatgtaaactcatatgtagagcaaatggcacagggtacttctatgttttggcccccaaggtggtggacggaaccctatgctctccggactcaacgagcgtttgcgtgcagggtaagtgcatcaaagccggctgtgacggcaacctgggcagtaagaaaaggtttgataagtgcggcgtgtgcggcggagataacaaaagttgcaagaaggtaacaggtctgtttaccaagcccatgcacggatacaactttgtcgtcgcaatccctgcaggcgcctcctcaatagatatcaggcagagaggctataaaggactgatcggagatgacaactacctcgcactgaaaaattcacagggaaaatatctgttaaacggccatttcgtagtcagcgctgtcgaaagagacctggttgtcaagggctcactgctgaggtacagtggtaccggaactgcagtggagtcactgcaggcctctaggccaatcctggagccccttacagtggaagtgttgagtgtgggtaagatgacaccccccagggtccggtacagcttttacctccctaaggagccgcgagaggacaagtcttctcacccaaaggaccctcggggaccctcagtcttacacaacagcgtgttgagcctcagtaaccaggtcgagcagcccgacgaccggccccctgcacggtgggttgctggctcatgggggccctgctctgcatcttgcggttctggtttgcagaagcgtgctgtggattgccgcggaagcgccggccagcggacagtacctgcttgcgatgctgctcatcgccctgtggagacccaggcttgcggggaaccatgtccaacatgggagcttagtgcgtggtccccatgcagcaaatcatgcgggcgcggcttccagcgtcgcagcctgaagtgtgtgggccacggcggacgtcttcttgcccgggaccagtgcaacctgcaccgtaaacctcaggagctggacttctgtgttttgcgcccctgttag

SEQ ID NO: 8716 - DNA, 1521 bp, synthetic construct
  misc_feature 1..1521: note = source = /note="Description of Artificial Sequence: Synthetic coding sequence"
  source 1..1521: mol_type = other DNA
atgaccagcaagccccacagcgactggatcccctacagcgtgctggacgacgagggacgcaatctccggcagcaaaaactggacaggcagcgcgctttgctggagcagaaacaaaagaaaaagcgccaggagccactgatggtccaggccaacgccgatggacgccctcgcagcaggagggcccgtcagagtgaagaacaggccccgctggtagagtcttacctgtcttctagtggctctacttcataccaggtccaggaggctgattctctggcgtccgtgcagctgggggcgacccggccaacagcgcccgcttctgctaagcgcacaaaggccgctgccaccgccggcgggcagggcggagccgcgcgcaaagaaaaaaaagggaagcataagggaacctccggacctgcagccctcgccgaggataaaagcgaggcacaggggcccgtgcagatacttacggttggccagtcagatcacgctcaggacgctggcgaaactgccgctggaggcggtgaaagaccatctggacaagacctgcgggccaccatgcagagaaagggcatcagcagtagtatgtctttcgatgaagacgaggaagacgaagaggagaactcctctagcagctcacaactgaacagtaacacgcggccaagcagcgccacttccaggaagagcgtgcgagaagctgcttccgcacccagtcctaccgcgcccgaacaacctgtggatgtcgaggtgcaggacctggaggagtttgcgctgcgtcctgctcctcaaggaattacgataaagtgcaggatcactcgcgataaaaaggggatggatcgtggaatgtaccccacatactttctgcacctggacagggaagacggaaaaaaagtctttctgctggctggaaggaaacgaaaaaagagcaaaactagtaactacttgatttccgtggacccaaccgatctgagtcgcgggggtgattcttatatcgggaagctgaggtcgaatttgatgggcaccaagttcacagtgtacgataatggcgtgaatcctcagaaagcctcaagctccactctggaatcgggcaccctgcggcaggagctggcagccgtgtgttacgagacaaacgtgctggggttcaaaggacccaggaagatgagcgtcattgtgcccgggatgaatatggtgcatgaacgagtatctatacggcctaggaacgagcacgagactctcctagctcggtggcaaaataagaataccgaaagcattatcgaactgcagaacaaaaccccagtatggaacgacgacacgcagtcctacgtgttaaactttcacggccgggtcacgcaggccagtgtcaaaaactttcaaataatccacggaaacgacccagattatattgtgatgcagttcgggcgtgtggctgaagacgtgtttacaatggactacaactatcccttgtgtgcactgcaagcatttgcaattgctctcagctcgttcgacagcaaattagcctgcgaatag

SEQ ID NO: 8717 - DNA, 594 bp, synthetic construct
  misc_feature 1..594: note = source = /note="Description of Artificial Sequence: Synthetic coding sequence"
  source 1..594: mol_type = other DNA
atggccaagaacggcctggtgatctgcatcctggtgatcaccctgcttctggaccagactacctcacacaccagtcgcctgaaagctagaaaacactcgaagcgaagggtcagggataaggacggcgacctcaagactcagattgagaaactttggacagaggtaaacgccttgaaagagatccaggccttgcagaccgtgtgcttgcgaggcaccaaggtccacaaaaagtgttatcttgcgagcgagggtctgaagcactttcatgaggcaaatgaggactgcatttctaagggcggcatattagtgatcccccggaacagcgatgaaattaatgcgttgcaggattacggcaaaaggtctttacctggcgtgaatgatttttggctgggcataaacgacatggtcaccgagggtaaatttgtcgatgtcaacggcatcgcaatatcctttttgaattgggatagagcccagccgaacgggggaaaacgcgaaaattgcgtcctctttagccagtcggcacagggcaagtggagcgacgaagcgtgtagatccagtaagcgctacatttgtgaattcacgatcccccagtag

SEQ ID NO: 8718 - DNA, 2424 bp, synthetic construct
  misc_feature 1..2424: note = source = /note="Description of Artificial Sequence: Synthetic coding sequence"
  source 1..2424: mol_type = other DNA
aagaagaagcggaagatcagcctgctgcccaagccccccaagcacgatgccccactgaccattgagttcccaaatctcgacaagacaagtgccgaatggctcaaggtcaacggcctcaaggcaaaaaaattgtcactctatcaggtgctcgcaccaaacgccttctcaccagtggaagaatttgtccccatacttcaaaaaactgtgtcctccacaatacacgagaaagctatgatccaattcgaatggcatgacggcacagttaagaatatccatgtcgaccccccgttcctgtacaaatatcaacagcagctgagccgcgctatgcggatgtacgagaggcgcattgaatggctgtcacttgcttcacgcaggatttgggggactgtatgtgaaaagcgcgttgtggtgttgctcgacattagcgctaccaatagtatgtatatcatccatattcagcattccctgaggctcttgctggaggaacaactgagtaacaaagactgcttcaatctgatcgcttttggaagcacaatcgaatcctggagacctgaaatggtgcccgtttcccacaataatcttcagtctgcttggagatgggccctcaaccttagatgtcgaggatctagaaacgtgctgtctgccctgaggaaggctgtggaagtggattttaaagacaaggacaaacaccagtctcaggggatttacctgttcacgggggggatacctgaccaggacatgcccacgctgtccgcttacatggccgaagcatgcgggggatgtgatttgcagttaaatgtatgtctgttctacgtcggagagcccaagatggataccacccctcccgcccggtacgcgtctcacacagatactgccgcagcctataaggaggtgacaagagccgccggcggaaggtttcattggttcggcgatacaggtatatacgaaagcgacgacatcaattccatcatgtcagagatggagaaggctctgaactactcccagaagtgtgcgttcctcatggcatcattgaagaatcattctggcaaggtacttggttcgagtgccctcccaaaagagaagccaaagaccctgcagctgcgctctcaaccgaagaagctgtgtccacctcgacccaccgtcccactaggcgccaggatgtcaatcaaggatgatcccgatcgcgagaagagcccccctctgaagagcttgaagtggcggccattgagttcgagggtgggcatttctccggcagcggctcaaccaaccaaggaggggatgatggaactgcgtagaaaaactaaatcacgggaggccgagacctcgctactgctcttttacaccgaaaagggaaacgatgtggggagtgtgtataagaagtacccacagggtcgcggactccgacggacttcaagttcaatagacttgccccgtaaagacaccgtttgctctagtcaggaatgggtcgccaagtacggactgaagaagctgaagcttgaaatatctcgctgcatgggtcctaactgcacccatcaaaaatcaggccaaagatccgctagcgcaaagcattgttccatcttcccttctgtcgagatccacggagtggtgaggcacatccaatggaccccgcgggaaatggaggtatacattaggcacctggagaaagtgcttaggcggtacgtgcagcggctacaatggctgctgtctgggagcagaaggctcttcgggactgttttggagtcgaaggtttgcattctactagacacatccggaagcatgggaccttaccttcaacaggtgaagaccgaactggtgctactgatctgggaacagctccgcaagtgctgtgactcgtttaatctgctctcttttgcggaaagtttccagtcttggcaggataccctcgtggaaaccaccgacgccgcatgtcatgaagctatgcagtgggttacccacttacaggcgcaggggtccactagtatccttcaagctctattgaaggccttctccttccacgatctcgaaggtctttatctgcttaccgacggaaagccagataccagctgcagcctagttctgaacgaagtgcagaaactgcgagaaaaaagagacgtgaaagtgcatacaatttccctcaattgttcggaccgtgcggctgtcgagtttctgagaaaactcgcgagctttactggcggcagataccactgcccggtgggggaggatactctgagcaaaatccatagtctgttgactaagggatttataaacgagaaagaccctacactaccccccttcgagggcgatgaccttcggattttagcccaagagattactaaggctcgttcgtttttgtggcaagcccagtcctttcggagccagctacaaaaaaagaacgatgccgaacccaaggtgaccctgtcctag

SEQ ID NO: 8719 - DNA, 639 bp, synthetic construct
  misc_feature 1..639: note = source = /note="Description of Artificial Sequence: Synthetic coding sequence"
  source 1..639: mol_type = other DNA
atggtgagccggatggtgagcaccatgctgagcggcctgctgttctggttagctagtggctggacgcctgcctttgcctactcgccgagaaccccggacagagtatcagaagctgatattcaacgactgctgcacggggtgatggagcagctgggcattgctagaccccgggtcgagtacccggcccaccaagcgatgaatctggtggggccccagtcgatcgagggtggagctcacgagggcttacaacatctaggtcctttcggcaatatccccaatatcgtagccgagctgacaggtgacaacatcccaaaggacttctcagaggatcaaggttatcctgaccctcccaacccctgccctgtgggcaaaacggctgacgatggctgtctggagaacacccctgacacggccgaattttcccgcgagttccaactgcaccagcatttgttcgaccctgagcatgattaccccgggctggggaaatggaataagaaactcctctatgagaagatgaaaggcggtgaaagaagaaaaagacggagcgtcaacccttacctgcagggacagagactcgataacgtcgtagccaagaagtccgtgccacacttctccgacgaagacaaagatcctgaatag

SEQ ID NO: 8720 - DNA, 1524 bp, synthetic construct
  misc_feature 1..1524: note = source = /note="Description of Artificial Sequence: Synthetic coding sequence"
  source 1..1524: mol_type = other DNA
atgtgcaccaagaccatccccgtgctgtggggctgcttcctgctgtggaacctctatgtgtcaagcagccagaccatatatccaggcataaaggctagaattacccaacgggcacttgactacggggtgcaagcaggcatgaaaatgatcgaacagatgcttaaggagaagaaactacccgacctctcaggcagcgagtctcttgagtttcttaaggtggactacgtcaactataacttcagcaacataaaaatttctgccttcagcttccctaatacaagcctggcctttgttccaggagtgggcatcaaggcactcacgaaccacgggactgccaacattagtacggactggggttttgaaagccccctttttcaggatacgggcggggccgatcttttcctctccggggtgtattttactggcataatcattctgacacggaatgacttcggacacccgaccctgaagttgcaagactgctacgcccagttaagccatgcgcatgttagtttctccggggaattatctgtcctttataattcattcgcagagcctatggaaaagccaattctcaagaatttaaatgagatgttatgcccaatcatcgcgtctgaagtcaaagctttgaatgctaatctgagtactctggaagttctgactaagattgacaactatactctgctggattacagcttaatctcgtcccccgagatcacagagaattacttagacctgaacctgaagggagttttctaccccctggagaacctgacagatccccctttttcaccggtcccatttgttctccctgaacgttcaaacagcatgctgtatatcggcattgcagaatatttcttcaaaagtgcaagctttgcccatttcaccgcaggtgtctttaacgtgactctctccactgaagagattagtaaccattttgtgcagaattctcaagggctggggaacgtgttgtcacgaattgccgagatttacatactctcccagcctttcatggtacggatcatggccacagaaccccccatcattaatctccagcccggcaactttactcttgacataccagcttccattatgatgctcactcagccgaagaacagtacagttgaaacaatagtgtccatggacttcgtggcctccacttcggtgggattggtgatcctggggcagaggctggtctgcagcctgtctctgaatagattccgactggccctccccgagtccaacagaagcaatattgaagtcctcagatttgagaacatactgtcaagcatcctccattttggcgtcctacctctggccaacgcaaaactccagcaaggatttcctcttagtaacccacataaatttctgtttgtaaactccgacattgaggtgctagagggatttcttctgatctccacggacctgaagtatgagacttctagtaagcagcagccctccttccacgtatgggaaggccttaatctgatttctcgtcaatggcgcggcaaaagcgcaccctag

SEQ ID NO: 8721 - DNA, 474 bp, synthetic construct
  misc_feature 1..474: note = source = /note="Description of Artificial Sequence: Synthetic coding sequence"
  source 1..474: mol_type = other DNA
atgcacccctggctgggcagcgccctgggcttccccaagtgccggggtatccacctttgcgcctgcggcaatgggtggacgccaggagagacactcagtcagaacaagaccgagatcaccaaaaacaaggtgacatgctggcgacctcacggttgtgagcccaacacaggcttgggatatcagggctcacatacaagcaaatacactcttctgccctggaatctgctgaaaaccaaaccacttcccccctcacacggcaaggagggggggaaggaggccaaagtaccatctggtgacaattccgggcggggtgaagtcccgcgagctcaggagggtcaggctgcctgtggtcgcgcagcttctggagactctcaggaggggatgagacgcgggtatgaggagcgggccaccgcccagcgtcccgctgtccgttctgcagaaactactgctcatggcacctggatttacccatag

SEQ ID NO: 8722 - DNA, 213 bp, synthetic construct
  misc_feature 1..213: note = source = /note="Description of Artificial Sequence: Synthetic coding sequence"
  source 1..213: mol_type = other DNA
atgagcaacaacatggccaagatcgccgaggcccggaagaccgtggaacagctcaaattggaggttaacatcgacagaatgaaggtgagccaggcagcagccgagctactggctttctgcgagacccacgccaaggatgacccactggtgacccctgtccccgcggccgagaaccccttccgtgacaagagactgttctgtgtcctgttatag

SEQ ID NO: 8723 - DNA, 645 bp, synthetic construct
  misc_feature 1..645: note = source = /note="Description of Artificial Sequence: Synthetic coding sequence"
  source 1..645: mol_type = other DNA
atggccctgctgctgtgcctggtgtgcctgaccgccgccctggcccatggatgtctgcactgccactcaaacttttctaagaagttttccttctacaggcatcacgtcaattttaagtcttggtgggtgggtgacattcctgtgagcggcgccctgcttaccgattggtcagatgacacgatgaaggagctgcatctagccatccccgccaagattactcgggagaagctagatcaggtggccaccgctgtgtatcaaatgatggaccagctctaccagggtaagatgtattttcctggatatttccccaacgagcttaggaatatatttcgagaacaggtgcatcttattcaaaacgcaatcattgagtccagaatcgactgccagcaccggtgtggtatttttcaatacgaaacaatctcttgcaataactgcaccgactctcatgtcgcctgcttcggatacaattgcgagagttctgcccagtggaagagcgccgtgcaaggcctgctcaattacatcaataactggcacaagcaggacacctccatgagccttgtgtctcccgcacttaggtgtttagagcccccacacctcgctaaccttacgctcgaggacgccgccgaatgtttgaaacaacactag

SEQ ID NO: 8724 - DNA, 459 bp, synthetic construct
  misc_feature 1..459: note = source = /note="Description of Artificial Sequence: Synthetic coding sequence"
  source 1..459: mol_type = other DNA
atgagcccccacctgaccgccctgctgggcctggtgctgtgcctggctcagaccatccatacccaagagggagcactcccaaggccgtcaataagtgcagagcccgggaccgtgatcagccccggatcccacgtgacctttatgtgccgcggtcccgttggtgtacagacgttcagacttgaacgggaagaccgggcgaaatataaagactcttataatgtcttcaggctggggccctccgagagcgaggcgcgcttccatatcgacagtgtctcggaggggaatgctggactctatcgttgtctctactataaaccccctggctggagtgagcacagtgacttcctcgagctgctggtcaaagagtcgagcggcgggcccgactcccctgacacggaaccagggagttccgccgggacagtgcccggcacggaggccagcgggttcgatgcgccgtag

SEQ ID NO: 8725 - DNA, 900 bp, synthetic construct
  misc_feature 1..900: note = source = /note="Description of Artificial Sequence: Synthetic coding sequence"
  source 1..900: mol_type = other DNA
atggccccctggagccaccccagcgcccagctgcagcccgtgggcggagatgcagtctcgccagcgctgatggtgctcctttgtctgggcttgtccctggggccccgcacccacgtgcaggcgggtaatttgtctaaggcaacactctgggcagagcctggaagcgttatttcccgagggaactcggttaccatcaggtgccagggaaccctggaagcccaggagtataggctggttaaggaggggagcccggagccatgggatacccagaaccctctggagccaaagaataaagccagattcagcattccttcaatgacggaacatcatgccggtcgctataggtgctactactactcgcccgcaggatggtcagaacccagcgatccactagaactggtagtgaccgggttttataacaagcctaccttgtcagccctgccaagcccagtggtcaccagcggtgaaaatgttacgttgcaatgtggatcacgtcttagatttgatcgtttcattcttacggaggaaggagatcacaagttatcgtggacactggattctcagctgactcccagcggtcagttccaagcgttgtttcctgtgggacccgttaccccaagtcacaggtggatgctgagatgttacggttctcggcgtcatattctgcaggtgtggtcggagccaagcgatctcctagaaattcccgtgagtggagccgccgataatttatcaccttctcaaaacaagagcgatagcggcacagctagccatctccaggactacgccgtggaaaatctaattcgcatgggaatggctggcctaatcttggtcgtgttggggatcctgattttccaagactggcatagccagagatcacctcaggccgccgccggcagatag

SEQ ID NO: 8726 - DNA, 618 bp, synthetic construct
  misc_feature 1..618: note = source = /note="Description of Artificial Sequence: Synthetic coding sequence"
  source 1..618: mol_type = other DNA
atgaaggtgctgctgctgaccggcctgggcgccctgttcttcgcctattactgggatgacaacttcgatcccggtgggctagactatctggtgctgaaccacatcggcggggcaccagcaggcacacgcgctcgctccccccaggccacccgatggctcatgcaggtgaatttcgttagttatgttcaactgaccagcagggccctaccctctctgacagatagtaagggctcgcttgttgtggtgtcgtcacttctgggcagggtgccgactagtttttccactccctattccgctgccaaattcgctttggatgggttcttcgggtccctgagaagggagctcgatgtccaggacgtaaacgtggcgataactatgtgtgttcttggtctccgggaccgcgctagtgctgccgaggccgtgcggggggtgacacgggtgaaggccgctcctggccccaaggctgctctggccgtcatcaggggtggagcaacccgggcagcaggtgtgttttacccatggcggtttcgcctgctgtgcctcttacggagatggctgccacgcccacgcgcatggtttattcggcaggagctcaatgttaccgccgcagctgcgtag

SEQ ID NO: 8727 - DNA, 795 bp, synthetic construct
  misc_feature 1..795: note = source = /note="Description of Artificial Sequence: Synthetic coding sequence"
  source 1..795: mol_type = other DNA
atgctgcggtgcggcggccggggcctgctgctgggcctggccgtggccgcagccgcagtgatggctgctcggttaatggggtggtgggggcctagagcaggctttaggctgtttatcccggaagaactgagcagatatcgtggtggccccggggatccaggcttatatctggcgctgctgggacgggtttacgacgtgtcctccggacgcaggcattatgaacctggttcacattacagcggctttgccgggcgggacgcctccagagcctttgtaaccggcgactgttccgaagccggcctagtggatgatgtgtctgatctttccgccgcggagatgctgactctgcacaattggttaagtttttacgagaagaattacgtttgtgtcgggagggtgactgggcgcttctatggcgaagatggactgcctactcctgctctcacacaggtcgaggctgctatcaccagagggctcgaggccaataagcttcagctgcaggaaaagcagacattccccccatgcaacgcggagtggtcctctgctcgagggtcccgcctgtggtgtagtcagaagtccggcggtgttagtcgcgactggatcggtgtaccgcgaaagttgtataagccaggcgcaaaagagccccgctgtgtttgtgtgcggaccacgggccccccatccggacagatgcccgataatcctccccatcgcaacaggggtgatctggatcaccccaacctggctgaatataccggatgccctcctctggccataacttgctcattcccgctttag

SEQ ID NO: 8728 - DNA, 468 bp, synthetic construct
  misc_feature 1..468: note = source = /note="Description of Artificial Sequence: Synthetic coding sequence"
  source 1..468: mol_type = other DNA
atgagcaagcggctgctgctgctgctgctgctgagcatgggcggcacttgggcctccaaggagcccctgcgaccccgctgccgaccgattaacgccaccttggccgtggaaaaagagggctgtcccgtgtgcattaccgtgaataccactatttgcgccggctattgtcctacaatgaccagagtactccagggtgtactaccggccctgcctcaggttgtctgcaattatcgagatgtgcggttcgagagtattcgacttcccgggtgtccacggggcgtcaaccccgttgtgagttacgcggtggccctctcttgccagtgcgccctctgcaggcggagcacaacagactgcgggggccctaaggaccacccattaacatgcgatgacccccggttccaggatagcagctcctccaaggccccgccacccagcctgccgagcccttcgagactcccaggcccatag

SEQ ID NO: 8729 - DNA, 498 bp, synthetic construct
  misc_feature 1..498: note = source = /note="Description of Artificial Sequence: Synthetic coding sequence"
  source 1..498: mol_type = other DNA
atggagatgttccagggcctgctgctgctgctgctgctgagcatgggaggcacatgggcatccaaggagcccctcaggcctcggtgccggcctatcaacgccaccctagccgtcgaaaaggaagggtgtccagtatgcattaccgtgaatactactatctgcgccggatactgccctaccatgactagggtgctgcaaggagtcctcccagccctgcctcaagtggtctgcaactacagggacgtcagattcgaaagtatcaggctacctggctgcccccggggcgtcaatccagtggtgtcatatgctgtagctctgagttgtcagtgcgcgttgtgtagacgctccaccacggactgcgggggcccaaaagatcatccactgacttgtgacgacccccgattccaagacagctcaagctcaaaggctccccctcctagtctcccttctccgtcccggctgccaggtccttcagatactcctatattaccccaatag

SEQ ID NO: 8730 - DNA, 990 bp, synthetic construct
  misc_feature 1..990: note = source = /note="Description of Artificial Sequence: Synthetic coding sequence"
  source 1..990: mol_type = other DNA
atgctgcccctgctgctgggcctgctgggccccgccgcctgctgggccttaggccctacacccggacctggctctagcgaactccgatctgctttctctgctgccagaacaaccccgttagaagggacctctgagatggctgtgaccttcgataaggtgtacgtcaacatagggggcgactttgatgtggccactgggcagttccgatgcagggtgccaggcgcctactttttttcatttaccgctggtaaggctccccacaaaagtctgagtgtcatgcttgtgagaaacagagacgaggtgcaggcactagcattcgacgagcaaaggcgtcctggggccagaagggccgcttcccagtccgccatgctgcagctggactacggtgacacagtttggttacggttacacggcgccccgcagtacgccctcggggcccctggagccaccttctcaggctacctagtctatgccgatgctgatgcagatgctccagcccggggacctcctgctcctcccgaacctaggtccgcatttagcgcggctcgaacgcggtctctggtggggtccgacgccggtcctggccctcgtcatcagcccctggcttttgacaccgaattcgtgaatattggaggcgactttgacgccgctgctggagtgtttcgttgtcggctgcctggtgcgtacttctttagctttacactgggcaagttgccaaggaagactctgtctgtaaagctgatgaaaaaccgggacgaagtccaggcaatgatttatgacgatggcgctagccgccggcgcgaaatgcagtctcagagtgtcatgttggcactgcgtaggggcgatgccgtgtggcttctgagtcatgaccacgacggatatggggcctacagtaatcacgggaaatacatcaccttttccgggttcttggtgtaccccgatcttgcaccagccgcgccccctggccttggcgcctccgagctcctctag

SEQ ID NO: 8731 - DNA, 873 bp, synthetic construct
  misc_feature 1..873: note = source = /note="Description of Artificial Sequence: Synthetic coding sequence"
  source 1..873: mol_type = other DNA
atgcggcggcccgccgccgtgcccctgctgctgctgctgtgcttcggcagccagcgggccaaggctgctaccgcctgtggaagaccccgcatgctgaacaggatggttgggggccaggatactcaggagggtgagtggccttggcaagtctccatccaaagaaacggctctcacttctgcggaggcagccttatcgctgagcagtgggtcctgaccgcagcacactgttttaggaatacctctgagacttccctataccaggttttgctcggagcccggcagctggtgcagcctggaccccacgcaatgtatgccagggttcggcaggtggaaagtaacccactgtatcagggaaccgcctcatccgccgacgtggccctggttgagctggaagcaccagtcccattcactaactacatcctacccgtgtgcctgcccgatccctctgttattttcgagaccggcatgaactgttgggtgactggctggggcagtccgagcgaggaggatttgctgccggaacccaggattctgcagaagctggcagtccctattattgatactccaaagtgtaacttgctgtatagtaaggacaccgagttcggttaccagcctaaaacaattaaaaacgatatgttgtgtgccggctttgaagagggcaaaaaagacgcttgtaaaggcgactcgggggggccactcgtttgcctcgtgggccagtcatggctgcaggcgggcgttatatcctggggggagggctgcgcgagacagaacagaccgggggtctacattcgggtgacggcgcaccataactggattcaccggatcatcccgaagcttcagtttcagccagctagattgggcgggcagaagtag

SEQ ID NO: 8732 - DNA, 792 bp, synthetic construct
  misc_feature 1..792: note = source = /note="Description of Artificial Sequence: Synthetic coding sequence"
  source 1..792: mol_type = other DNA
atggccttcctgtggctgctgagctgctgggccctgctgggcaccacttttggctgcggagtcccagccatccaccccgtcctgtcgggacttagtcggattgtcaatggcgaagacgcagtgccggggtcctggccctggcaagtgtccctgcaggataaaaccggattccatttctgcggggggtccctgatttctgaagattgggtggttacagcggctcattgcggcgtccggacttccgacgtggtggtggcaggggagttcgaccagggcagcgacgaagaaaacatccaagtgctcaagatcgcaaaggtgtttaagaatcctaaattttctattttgacagtgaacaatgacattacactgctaaaacttgctacacctgcacgcttttcccaaacggtcagcgcagtgtgcctgcccagtgcagatgacgattttccagccggcaccctgtgtgccacaactggctggggcaaaacaaagtacaacgcaaataagactcctgacaagttgcagcaggccgctctgcccctactgagtaatgccgagtgcaagaagagttggggaagaagaattaccgacgtcatgatttgtgcgggcgcgagtggagtgtcctcttgcatgggagactctggagggcctctggtgtgtcaaaaagacggggcctggaccctcgtgggaatcgtaagttgggggagccggacctgctcaactacgactccggccgtgtatgcccgcgtggccaagcttattccgtgggttcagaaaatcctggccgccaactag

SEQ ID NO: 8733 - DNA, 228 bp, synthetic construct
  misc_feature 1..228: note = source = /note="Description of Artificial Sequence: Synthetic coding sequence"
  source 1..228: mol_type = other DNA
atgggcgccgccatcagccagggcgccctgatcgccatcgtgtgcaatggccttgtgggttttctattgctgctcctgtgggtgatcctgtgttgggcttgccacagtaggtcagctgatgtcgacagtttgtccgaaagccggacacaggagagtgcttgcctagagttagatcccgccgctcagtcgttggcttccctcgcccctataggagcgcagtggccctag

SEQ ID NO: 8734 - DNA, 762 bp, synthetic construct
  misc_feature 1..762: note = source = /note="Description of Artificial Sequence: Synthetic coding sequence"
  source 1..762: mol_type = other DNA
atggcccggagcctgctgctgcccctgcagatcctgctgctgagcctcgccttagaaacagcaggggaggaggctcaaggtgacaaaataattgacggcgcaccatgcgccagaggctcacacccgtggcaggtggccctgctgagcgggaaccagctgcattgcggtggtgtgctcgttaacgagaggtgggtcctgacagccgcccactgtaagatgaacgaatacacagtgcacttaggctctgacaccctgggcgaccgccgggcgcagcgaatcaaagcatccaaatccttccgacacccagggtactctacccagactcatgtgaatgatttgatgctggtcaagctgaattcccaagccagactgtctagtatggtgaaaaaggtgaggctgccaagcagatgtgagccccctggcacaacatgcacagtgtcaggatggggaactactacatcccccgacgtgacttttccatctgatctgatgtgtgttgacgtcaaactcattagtccgcaggattgtaccaaagtgtataaggacctgctcgaaaactcaatgctgtgcgccggtattccagatagtaagaaaaatgcctgtaatggggactctggcggtccactcgtgtgtcggggtacacttcagggactggttagctggggtaccttcccatgcggtcagccaaatgatcctggcgtgtacacacaggtgtgtaagttcacgaaatggattaacgatacgatgaagaaacacaggtag

SEQ ID NO: 8735 - DNA, 480 bp, synthetic construct
  misc_feature 1..480: note = source = /note="Description of Artificial Sequence: Synthetic coding sequence"
  source 1..480: mol_type = other DNA
atgaaggcctggggcaccgtggtggtgaccctggccaccctgatggtcgttacagtggacgcaaaaatctatgaacgatgcgagctcgccgcgcgcttagagagggccgggctgaatggatacaaaggatacggggtcggggattggctgtgcatggctcattacgagtccggtttcgataccgccttcgtggaccacaaccctgatgggagcagcgagtatggaatcttccaattaaattctgcctggtggtgtgacaatggaattacccccacaaagaacctgtgccacatggactgccacgacctgctcaaccgacacatactggatgatattcgctgcgccaaacagattgtatcttcgcagaatggtctgtctgcatggaccagctggcggctgcactgctctggccatgatctttcagagtggctgaagggttgcgatatgcatgtcaaaatcgatcctaaaatccacccctag

SEQ ID NO: 8736 - DNA, 501 bp, synthetic construct
  misc_feature 1..501: note = source = /note="Description of Artificial Sequence: Synthetic coding sequence"
  source 1..501: mol_type = other DNA
atggcccagaccaacagcttcttcatgctgatcagcagcctgatgtttctttctctcagtcagggccaggagtcacagaccgagttgcccaaccctcggatctcatgtccagagggaaccaacgcctatcgctcctactgctattatttcaacgaagacccagagacatgggtcgatgccgatctctactgccagaatatgaattctgggaatcttgtgtcagtccttacccaggctgaaggagcattcgtcgcctccctgatcaaggagagctcaaccgacgactctaacgtttggatcggactacacgatcccaagaagaataggagatggcactggtcttccgggagtctcgtaagctacaaatcttgggacaccggcagtcccagctctgccaacgcaggttactgtgcatccctgacctcctgttccggctttaagaagtggaaagacgagtcatgtgaaaagaaattcagtttcgtgtgtaaattcaagaactag

SEQ ID NO: 8737 - DNA, 528 bp, synthetic construct
  misc_feature 1..528: note = source = /note="Description of Artificial Sequence: Synthetic coding sequence"
  source 1..528: mol_type = other DNA
atgctgccccccatggccctgcccagcgtgagctggatgctgctgagctgccttatgctcctgtctcaggtgcaaggcgaagagccacagagggagctgccttcagctaggattaggtgcccaaaggggtcgaaagcctacggcagccattgttatgcattgttcctgtcccccaagtcctggactgatgccgacctggcatgtcagaaacggccctcaggcaacctggtttccgtactgagcggagccgaaggctcctttgtgagctccctggttaagagcatcgggaactcttacagttatgtgtggattggactgcacgatcctacgcaaggaactgaacctaatggcgagggttgggaatggagctccagtgatgtcatgaactacttcgcttgggaacggaatcctagcaccattagttctcccgggcactgtgcctccttatcaaggtcaaccgcttttcttcgctggaaggactacaactgcaacgtgcgactgccctatgtgtgcaaatttaccgattag

SEQ ID NO: 8738 - DNA, 1686 bp, synthetic construct
  misc_feature 1..1686: note = source = /note="Description of Artificial Sequence: Synthetic coding sequence"
  source 1..1686: mol_type = other DNA
atgggcgcccggacccccctgcccagcttctgggtgagcttcttcgcagaaaccgggatactgtttcctggagggacaccttggccaatggggtctcagcactcgaaacagcacaggaagccggggccactgaagcggggccaccgacgcgatagaaggaccacccgaagaaagtactggaaggaggggcgcgaaatcgcccgcgtgctggacgacgaggggcgcaatctcagacagcagaagctggacaggcaaagagcactgctagagcagaagcagaagaagaaacgacaggagcctctcatggtccaggccaacgccgacggacgcccacgctcacggagagcgaggcagtccgaagagcaggcacctctcgtcgaatcttatcttagtagttctggtagtactagctaccaggtgcaggaggccgacagccttgcctcagtgcagctgggggcaactcgccctacagcgccagcttccgccaagcgcaccaaagccgccgctaccgctggggggcaaggtggagcagctcgcaaagagaagaaaggaaagcacaagggcaccagcgggcccgccgcccttgccgaagacaagtccgaggcccaaggacctgtccaaattcttactgtgggacagtcagatcacgcacaagacgccggcgagaccgccgctgggggcggtgagaggcccagcgggcaggatcttagagccaccatgcaacgaaaggggatcagcagttctatgtcttttgacgaagatgaggaggacgaggaggaaaatagctcttctagcagtcagttaaatagtaatactaggcccagtagcgcaaccagcagaaagtcagtacgggaggccgcaagcgccccctccccaaccgctcccgaacagcccgttgatgtggaggtgcaggatctcgaagagttcgcccttcgtccagcccctcaaggaattacaataaagtgtaggataacgagagacaaaaaaggcatggaccgtggcatgtacccaacatactttctgcatctcgatcgggaagacggaaagaaggtttttctgttggcaggaaggaaaaggaagaagagcaaaaccagtaattatctcatatccgttgaccccaccgatctgtcaaggggaggtgactcctatatagggaagttgagatccaatttaatgggaaccaagtttaccgtgtatgataacggtgttaatccccagaaggccagttctagtactcttgagtcggggactctccgacaggaactggctgcagtgtgctatgagaccaatgtcctcgggttcaaggggcccaggaaaatgagtgtcatcgtgcctggaatgaatatggtgcacgagagggttagcatccgaccgcgtaacgaacacgaaactctccttgcccgttggcagaataagaacactgagtctattattgagttgcagaataagacgccagtgtggaatgacgatacacaatcctatgtgctcaattttcacggccgcgttacccaggcttctgtcaagaatttccaaattatacatgggaacgatccagactatatcgttatgcagtttggtcgagtggcagaagacgtcttcaccatggattataactatccactttgtgcgttgcaggcttttgcgatagcactatcctcattcgatagtaaattagcatgcgagtag

SEQ ID NO: 8739 - DNA, 1272 bp, synthetic construct
  misc_feature 1..1272: note = source = /note="Description of Artificial Sequence: Synthetic coding sequence"
  source 1..1272: mol_type = other DNA
atgatgtaccggcccgacgtggtgcgggcccggaagcgggtgtgctgggagccctgggtcatcgggctggtgatcttcatctcgttgattgttctagccgtctgtatcggactgacagtgcactatgtgaggtacaaccagaaaaaaacatataactactatagtacattgtctttcactacagacaagttatatgcggaattcggacgggaagccagcaacaacttcaccgaaatgtcacagcgtttggagtctatggttaaaaatgctttctataaatctccactgcgcgaggagttcgtgaagtcgcaggtcatcaagttttcccagcagaagcatggcgtgctggcccatatgctcctgatctgtagattccacagcactgaggatcctgagacggtggacaaaatcgttcagttggttctgcacgagaagttacaggacgccgtcgggcctccaaaggttgatccccacagcgtcaagatcaagaaaattaataaaaccgagaccgactcttacctgaaccattgctgtggtaccaggaggtctaagacacttggacagagcctgagaatagtggggggtaccgaggttgaagagggtgaatggccatggcaggcaagtcttcagtgggacgggtcgcatagatgcggcgcaactctcatcaacgccacatggctggtgtccgcagcacattgctttactacctataaaaatcctgcccgctggacagcctccttcggagttaccatcaagccatcaaagatgaagcgcgggcttcggaggatcatcgtccacgagaaatataaacatcccagtcacgactatgacatttccctggccgaacttagttcccccgtaccgtacacaaacgctgtccacagggtctgccttccagacgcatcgtatgagttccagcccggcgatgtgatgtttgtcaccggctttggggctttaaagaatgacggttactcccagaatcatctaaggcaggcccaggtgacgctcatcgacgctacgacttgcaacgagccacaggcttacaatgacgcgatcaccccccgaatgctatgtgcgggcagtctggaaggtaagacagacgcctgccagggtgactcagggggccctcttgtaagcagcgatgcacgggatatctggtaccttgcaggcatcgtgagctggggagacgaatgcgcgaagcctaataaaccaggagtgtataccagagtgaccgcactcagagattggatcaccagtaaaacaggtatttag

SEQ ID NO: 8740 - DNA, 282 bp, synthetic construct
  misc_feature 1..282: note = source = /note="Description of Artificial Sequence: Synthetic coding sequence"
  source 1..282: mol_type = other DNA
atgaagcccgtgctgcccctgcagttcctggtggtgttctgcctggctttgcaacttgtgccaggtagccccaagcagagagtgttaaaatatattctggagccaccaccatgtatatccgcccccgaaaattgtacccacctctgtaccatgcaggaagactgcgagaagggattccagtgctgcagctccttttgtgggatagtgtgctcctcagaaactttccagaaacgcaacaggatcaaacacaagggatcagaagtcattatgcccgcaaattag

SEQ ID NO: 8741 - DNA, 1530 bp, synthetic construct
  misc_feature 1..1530: note = source = /note="Description of Artificial Sequence: Synthetic coding sequence"
  source 1..1530: mol_type = other DNA
atggacttcctgctggccctggtgctggtgagcagcctgtacctgcaggcagcagccgagtttgacgggaggtggccgcgacagattgtctcttccatcggtttatgccgctacggtggtagaatcgattgctgttggggctgggcccgccagtcttggggccagtgtcagcctgtgtgccagccccggtgcaaacacggagagtgcattggcccaaacaagtgcaagtgccacccaggctatgcaggtaaaacatgtaaccaggacctgaatgaatgcggactcaagccccggccgtgtaagcatcgctgcatgaatacttacggttcttataaatgttactgcctgaacggctacatgctgatgccagacggcagttgcagttccgctctcacctgctccatggcaaattgtcaatacggatgtgatgtagttaaaggacaaatccggtgtcagtgtccgtcccctggactgcagttggctcccgatggcagaacctgtgtggacgtggatgagtgtgccacaggccgggccagctgcccacgttttcggcaatgcgtgaatacctttggctcttatatctgtaagtgtcacaaagggttcgatcttatgtatatcgggggaaagtatcagtgccacgacatagatgagtgctcccttggccagtatcaatgttcaagcttcgctcggtgctacaacatcaggggttcctataaatgtaagtgtaaagaaggataccagggcgatggtttaacatgtgtttatatccccaaggttatgattgagccaagtgggcccatccacgtacctaaaggcaacggaaccattctgaagggcgacacgggtaataacaactggatacctgatgtcggctcgacctggtggccaccgaagacgccttacattccgcctattattaccaatcgccctacctccaagcccaccacgaggccaacgcccaaacctacacctattcccacccccccacctccgccacccctacccacagagctgagaacgcctctcccccctaccacacctgaacgcccaaccacgggactgacaactattgctccagccgcctctactcctcctggaggtattacagtggacaaccgcgttcagaccgatccacagaaacctcgaggtgacgtctttagtgtgctggtccattcgtgcaactttgaccatggcctttgtggctggattcgcgagaaagacaatgatttgcactgggaacccattcgagatcctgccggtggccaatatttgacagtgtcagcggccaaagcacccggcgggaaggccgcccggttagtgttacccttgggccggttaatgcatagtggcgatctgtgtctcagcttccgccacaaggtgactgggctacacagcggtacactccaggtgtttgtgcgcaaacatggtgcccacggagctgctctctggggcagaaatgggggccacggatggagacagacgcagatcacactgcgaggggcagacattaaatccgaaagtcagaggtag

SEQ ID NO: 8742 - DNA, 381 bp, synthetic construct
  misc_feature 1..381: note = source = /note="Description of Artificial Sequence: Synthetic coding sequence"
  source 1..381: mol_type = other DNA
atggacaagagcctgctgctggagctgcccatcctgctgtgctgcttccgggcattgtctggatccctctccatgaggaatgacgccgtaaatgaaattgtggctgttaagaacaactttccggtgattgagatagtgcaatgccgtatgtgtcacctgcagtttccaggcgagaaatgctcacggggtagaggcatttgcactgccacaacagaagaggcctgtatggtgggtagaatgtttaaacgcgacgggaacccttggttaacattcatgggatgcctgaagaactgtgccgatgtcaagggtatccgatggtcagtctacctggtgaacttccggtgttgccggtcccacgatctatgcaacgaagacctgtag

SEQ ID NO: 8743 - DNA, 537 bp, synthetic construct
  misc_feature 1..537: note = source = /note="Description of Artificial Sequence: Synthetic coding sequence"
  source 1..537: mol_type = other DNA
atggagctgctgcaggtgaccatcctgttcctgctgcccagcatctgctccagtaacagcactggcgtgttggaggctgccaataatagcctcgtggttactaccacaaaaccgtccattactacgccgaataccgaaagtcttcaaaaaaatgtagtcactccaaccaccgggaccactccaaaaggcaccataaccaatgagctgctcaagatgtcattaatgtcaaccgcaacgttcctgacatccaaggacgagggtctgaaggccacgacaactgatgtacggaaaaatgatagtatcatctctaatgtcaccgtgactagcgtgacattacccaatgctgttagcaccttacaaagttccaagcctaaaactgaaacccagtcgtcaatcaagactacagagatcccgggaacccctgagaacggaaatgatcagccgcagagcgataaggagtctgtgaagctgctcaccgtgaaaaccatctcccatgagtctggagaacatagcgctcagggaaaaaccaagaactag

SEQ ID NO: 8744 - DNA, 2544 bp, synthetic construct
  misc_feature 1..2544: note = source = /note="Description of Artificial Sequence: Synthetic coding sequence"
  source 1..2544: mol_type = other DNA
atgttcaagtgctggagcgtggtgctggtgctgggcttcatcttcttggaatccgagggccgcccgacaaaagaaggagggtacggcctcaagtcctatcagccccttatgcgcctaagacacaaacaggagaaaaaccaggagagcagcagggtgaaaggcttcatgatccaggacgggccctttgggagctgtgagaataagtactgtggcctgggccggcactgcgtcacgagcagagagactgggcaggcagaatgcgcatgtatggatctctgcaaacgacattacaaacccgtctgtgggagcgacggggaattctacgagaaccactgtgaggtccatagggcagcctgtctcaaaaagcagaaaatcactatcgtacacaatgaagactgtttttttaagggggataaatgcaagaccaccgaatatagcaaaatgaagaacatgctgttggatctgcagaaccaaaaatacattatgcaagagaatgaaaaccccaacggagatgatattagccggaaaaagttgcttgttgatcagatgttcaagtacttcgacgccgacagcaacggcctcgtggacatcaatgaactcacacaggtgatcaagcaagaggagctgggcaaggacctgtttgattgcactctttacgtgctgctgaaatacgacgactttaatgcagacaaacatctagcgctcgaggagttttacagggcctttcaagtaatccagctgtctcttccggaggatcagaaactctcaattactgcagccactgttgggcaaagcgctgttctctcctgtgctatacaggggacactgagaccacccattatttggaaacgaaataatattattcttaacaatcttgatctagaagacattaacgactttggtgacgacggcagtctgtacataaccaaggtcacaacgactcacgtaggaaactacacatgttatgctgacggatacgagcaggtttatcagactcacatctttcaggtcaatgttcccccagtcatccgggtgtaccctgaaagtcaggctcgggaaccgggggtaaccgcgtcactgagatgccacgcagaggggatcccaaaaccccagctgggatggctcaaaaatgggattgatatcacccctaaattgtccaagcagttgacattacaggccaatggttccgaggtccacatctccaacgtaagatacgaagacaccggcgcctacacttgcatagccaaaaatgaggcgggggttgatgaagatataagcagtctgttcgtcgaggattcggcccgcaagacattggctaacattctgtggagggaagagggactcggcattggtaatatgttctatgtcttctacgaggacggcattaaggtcatccagccaattgagtgtgaatttcagagacatatcaagcccagcgaaaagttattgggtttccaagacgaagtttgcccgaaggctgagggagatgaagtgcaacgctgtgtatgggcttccgccgtgaatgtaaaagacaaatttatttacgtggcacagccaacgcttgatcgggtgttaattgttgatgttcagagccaaaaagtggtccaggctgtgagcaccgaccctgtgcctgtgaagctccattatgacaagagtcacgatcaggtgtgggtcctgtcttggggaactctggagaagaccagccccacactccaagtgataaccttggcctcaggtaacgtgcctcaccatactattcatacccagcccgttggcaagcagttcgatcgagtcgatgatttttttatccctacaacaaccctgatcattacacacatgagattcggcttcattcttcataaagatgaagcggccctgcagaagattgacctggagaccatgagctatattaagaccataaatctgaaggattacaagtgtgtccctcaaagtcttgcctacacacatctgggtgggtactattttatcggatgcaagccagattccacaggtgcggtgtccccacaggtgatggttgacggggtgaccgactccgtgattggctttaactcagacgttaccggaaccccctatgttagccccgacgggcactacctggtctccatcaatgatgttaaaggtctcgtaagggtccagtatatcactatcagaggcgagatccaggaagcattcgatatttatacaaacctacacatttccgatcttgcctttcaaccttccttcaccgaggcccaccagtacaacatctacggatcatctagtacgcagactgacgtcctcttcgtggaactgagctccggcaaggtaaagatgataaagtctttaaaggagcctctaaaagcagaggagtggccctggaatcgcaaaaatagacaaattcaggatagcggactctttggccagtatttgatgacgcctagcaaggactcactttttattcttgatggccgactcaataaactgaattgcgaaattacagaagtcgagaagggaaacacggtaatctgggttggtgatgcctag

SEQ ID NO: 8745 - DNA, 273 bp, synthetic construct
  misc_feature 1..273: note = source = /note="Description of Artificial Sequence: Synthetic coding sequence"
  source 1..273: mol_type = other DNA
atgcggctgagcgtgtgcctgctgctgctgaccctggccctgtgctgttacagagcaaatgctgttgtgtgtcaggccctgggatccgagatcactggctttctgttagccggaaagcctgtttttaaattccagttggcgaaattcaaggccccacttgaggctgtcgcggctaagatggaagtaaagaaatgtgtggacacaatggcatacgaaaaacgcgttcttataaccaaaacattgggcaaaatcgctgagaaatgcgaccggtag

SEQ ID NO: 8746 - DNA, 1044 bp, synthetic construct
  misc_feature 1..1044: note = source = /note="Description of Artificial Sequence: Synthetic coding sequence"
  source 1..1044: mol_type = other DNA
atgagcagctggagccggcagcggcccaagagccccggcggcatccagccacatgtttctagaaccttgttccttctgctgctgctggccgccagtgcatggggggtgactctgtcaccgaaggattgccaggttttccgatccgatcacgggagctcaatctcttgccagcctcctgcggaaattccaggctatcttcccgcagatactgtacacctcgctgtcgaatttttcaatctgactcacctgccagcaaacctgctgcagggggccagcaagcttcaggagcttcacctctcctctaacggcctggagtccttgagccctgagttcctacgaccagtcccacagctccgggtcctcgatctgaccaggaatgctttgaccggactaccaccaggcctcttccaggcttctgccaccttggatacacttgtgcttaaggagaatcaacttgaggtgttggaggtgtcttggctgcacggtcttaaggctttggggcacttggatcttagtggcaatcgccttaggaaactgccacctgggttactggcgaacttcaccctgctcaggactcttgacctcggcgaaaatcagctggagaccctgcctcctgatcttctcagagggcccttgcagttagagaggctgcacctggaaggaaataagttacaggtgcttggaaaggatctcctgctgcctcaaccagaccttagatacttgttcctgaacggaaataagcttgcgcgagttgctgccggcgcctttcaagggttgcgccaacttgatatgctggacctttctaataatagtctggcaagtgtgcccgaaggcctgtgggcgagcctgggccagccaaactgggatatgcgagacggatttgatatctccggcaacccatggatctgcgaccaaaatctttctgatctctaccgttggctccaggcccagaaggataagatgtttagccagaacgacacaaggtgcgcaggacccgaggccgtgaagggtcagaccctgctggctgtcgctaagtcccagtag

SEQ ID NO: 8747 - DNA, 1407 bp, synthetic construct
  misc_feature 1..1407: note = source = /note="Description of Artificial Sequence: Synthetic coding sequence"
  source 1..1407: mol_type = other DNA
atgcccccctggggcgccgccctggccctgatcctggccgtgctggctctgctcgggctgcttgggccacggctgcgaggaccatgggggagggcagtgggggagcgtaccctacccggtgcccaggatagagacgacggggaggaggctgacggtggaggaccagccgatcaattttccgatggacgtgaacccttgccgggaggatgttccctcgtttgtaagccaagtgctctggctcaatgcctgttgcgagcactcagacggtccgaggcactagaggctggtcccaggtcctggtttagtggtccgcacttgcagactctctgtcattttgtgctacccgtggccccgggcccggagttggcccgggagtatttgcagctcgccgacgacggcctcgtagcgttggactgggtggtgggtccctgtgtacgcgggagacggataactagcgccggtgggttaccggccgtgcttcttgtaatcccaaatgcatggggacggcttacgaggaatgtgcttgggctgtgtctgctcgcactggagcggggatactatccagtcatatttcaccgccgaggccatcatggatgtcctctggtcagtccaagacttcaaccattcggcgacccgtcagatttaaaggaagcagtgacatacatcagatttaggcatccggcggcacccctctttgctgtgtccgaaggctccggcagcgccctgctactgagctacctgggcgagtgcggttccagcagctacgtgacaggagcagcttgcatcagtccagtactgcgttgccgtgagtggttcgaggccggcctgccatggccatacgaaagagggtttttgctccaccagaagattgcactctcacgctacgcaaccgccctggaggacacagtagacaccagcaggctgttccgttctcgttccctgcgggaatttgaagaggcactgttctgccataccaaatcattccctatttcatgggatacgtattgggaccggaacgacccactccgcgatgtcgatgaagctgcagtccctgtgctgtgcatatgcagtgcagatgatcccgtgtgcggccctccagaccacacactgaccacagaactgttccattcaaacccctacttcttcctcttacttagtagacacgggggtcactgcggatttctgcggcaggaaccgctgcctgcttggtcacatgaggtcattctggagtcattccgtgctctgaccgaatttttccgcacggaggaaaggatcaaagggctctcacgacatagggcttcgttcctgggtggcaggaggagaggtggcgctctgcagagacgggaggtatcctcctccagtaacctcgaagagatcttcaactggaagagatcatacacaaggtag

SEQ ID NO: 8748 - DNA, 423 bp, synthetic construct
  misc_feature 1..423: note = source = /note="Description of Artificial Sequence: Synthetic coding sequence"
  source 1..423: mol_type = other DNA
atgttcttcaccatcagccggaagaacatgagccagaagctgagcctgctcctcttagtgttcggcttgatctggggtcttatgttgctccactatacgttccagcagccacggcatcaatccagcgtgaaactgcgggagcagatcctggatctttccaaaaggtacgtcaaagcactggctgaagagaataagaatacggtggacgttgagaatggggcatcgatggcaggctatgccgatttgaaaagaactattgcggtcctgctcgacgacatcctccaaaggctggtcaaacttgaaaataaagtagactacatcgtggtcaacggttctgctgctaataccaccaatggcacctccgggaatctggtccccgtcactaccaacaagcgaactaacgtctctgggagcattcgctag

SEQ ID NO: 8749 - DNA, 993 bp, synthetic construct
  misc_feature 1..993: note = source = /note="Description of Artificial Sequence: Synthetic coding sequence"
  source 1..993: mol_type = other DNA
cggggcgccctggtgggcgccccccggagcgcccgggccagctgcttgagagggcgccggcctgggcggcggcagccatgtggaagatgcccagaccctcctagaagtggccccgggcaggctgggagagcaaggtgcgccagggacgtggctgcgcagaccgcgctggctcctcgcgccctggctctaggggcaggggccgctggccccggctggaggggtgcagtgcctcgcaggcccgctgcgagagtgtcacgggcggctcagaggcaggaacaggaattggtcagactccaccgcgaacaggagtgcgaattgcaacccgagccggcgcctccccggccatcaggccccgctactgcagaggatcccggtcggcgtccagtcctcccccagcgaccccctgaggaacgaccccctcagccacccggtagcacgggcgtgatcgctgagaccgggcaggccgggccccctgcaggcgcaggtgtctcagggtatccgaagtctccgcccgttgcatcacctggcgcccctgtcccttctctcgtgtccttcagcgccggactgactcagaagccttttcccagcgatggaggtgttgtcctttttaacaaagtactcgtgaacgatggggacgtgtacaatccatcaacaggggtgtttaccgcaccttacgacggtcggtacctgatcactgctaccctcacccccgagagggacgcgtatgtggaggccgtcctctcagtgtccaatgcctcagttgcccagctgcatacagcgggctatcggcgcgagttcctggaataccacagacctcctggggcactgcacacatgtggcgggcctggagcctttcatctgatcgtccacctgaaagccggagatgccgttaacgttgtcgtgaccgggggcaaattagcccacactgatttcgacgagatgtactcaacctttagtggcgtgtttctgtatccgttcttatcacatctgtag

SEQ ID NO: 8750 - DNA, 585 bp, synthetic construct
  misc_feature 1..585: note = source = /note="Description of Artificial Sequence: Synthetic coding sequence"
  source 1..585: mol_type = other DNA
atgagcgccctgtggctgctgctgggcctgctggccctgatggacctgtctgagtcatcaaactggggctgttatggcaatattcagtcgcttgacacgccgggagcttcttgcgggatcggaaggaggcacggtctgaactattgcggagtgcgcgcatcagaaagactagctgaaattgacatgccttatctgctgaaatatcagcccatgatgcagaccataggacagaaatattgtatggaccccgcagtgatcgctggggtcctgtcccggaaatcgcctggcgacaaaatcctggttaatatgggggacagaacaagcatggtccaagatcctggatctcaggcccccacatcatggatctcagagtctcaggtcagccagaccactgaggtcttaactacccgcatcaaagagatccagcgacgtttccctacatggacacccgatcagtacctacgtggtggcctgtgtgcttacagcggtggggctggatacgtgaggtctagtcaagacttgagttgcgacttctgtaatgatgttctggccagagccaaatatctgaaaaggcacgggttctag

SEQ ID NO: 8751 - DNA, 273 bp, synthetic construct
  misc_feature 1..273: note = source = /note="Description of Artificial Sequence: Synthetic coding sequence"
  source 1..273: mol_type = other DNA
atgaagttcctggccgtgctggtgctgctgggcgtgagcatcttccttgtatctgctcagaacccaacaacagctgcccccgccgacacctatcctgctaccggacccgctgacgacgaggctcccgatgccgaaaccactgcagccgcaaccacagcaactactgccgctcccacaacagctaccacagctgcgtctacgaccgcccgtaaggacataccggtcttacccaaatgggtaggtgatctgcctaatgggagggtctgtccctag

SEQ ID NO: 8752 - DNA, 1914 bp, synthetic construct
  misc_feature 1..1914: note = source = /note="Description of Artificial Sequence: Synthetic coding sequence"
  source 1..1914: mol_type = other DNA
atgagccggatgctgcccttcctgctgctgctgtggttcctgcccattacggaggggtctcaacgcgctgagcctatgtttaccgccgtgaccaactccgtgctgcctcccgactacgattctaacccaacccagctcaactatggcgtcgctgtcaccgatgttgatcacgacggtgatttcgagatcgttgttgccgggtacaatggccccaatttggtgttaaaatatgatcgtgcccagaagagactcgttaatatcgctgtggacgaaaggtcctccccctattatgcactgagggaccgtcaggggaacgctattggagttacggcatgcgacattgacggagatgggcgcgaggagatctactttctcaatacaaataatgcgttctctggcgtggccacctatactgacaaactatttaaattccgtaacaatcggtgggaggacatcctgtccgatgaagtgaacgtggcgaggggcgtcgcgagcctcttcgccggtcgatcggttgcatgcgttgaccggaagggtagcggaaggtattccatctacatagcaaattacgcctatggcaatgtcggtccagacgccttgatcgagatggaccctgaagcctctgacctgtctcgtgggatcctggctctgcgggatgtggccgcggaggcaggcgtgtctaagtatacaggagggcgcggggtgtccgttggacctatcctttcctccagcgcctctgacatattctgcgacaatgagaatgggccaaatttcctcttccacaaccggggggacgggacctttgtcgatgccgccgccagcgctggcgtcgatgatcctcaccagcatggacggggtgtcgcactagcggattttaaccgggatggtaaggtggacattgtgtacggaaattggaacgggccacacagactgtacctccaaatgtccacccacggtaaagtcagattccgcgacatcgcttcaccgaaattttccatgcccagccccgttcgtacagttataaccgcagatttcgataacgatcaggaacttgagatttttttcaacaacattgcctaccgctcatcttctgccaataggctgtttagagtgatcagacgggaacacggcgatccactcattgaggagcttaaccccggagacgcactggagcccgaaggccgcggtactgggggcgtggtgacggactttgacggggacgggatgctggatctgatcctttctcatggagaatcgatggcacaaccacttagcgtctttaggggcaaccagggctttaacaacaactggttgcgggtggtcccccgcacacgcttcggagcgttcgctagaggcgcgaaggttgtcctgtacacaaaaaaaagcggagcccacctgcggatcattgatggtggttctggctatctatgcgagatggagccagtggcccacttcggcctggggaaagatgaggcttcctctgtagaggttacctggcccgatggcaagatggtgtctagaaatgtggcaagtggcgagatgaattccgtattggaaattttatatcctcgggatgaggacactctgcaggatcctgcaccattagagtgcggccaggggttttcccagcaggaaaacggtcattgcatggatactaatgagtgcattcagtttccatttgtgtgtccgcgcgataagcccgtgtgcgtaaacacctacggatcttaccggtgcaggactaacaagaagtgcagccgggggtatgaacccaacgaagacggcaccgcctgtgttgcccaagtcgcctttcttgggggatactcttcagccgcctcacgcatctccgaaccgctgtcgagggcttcctacctttccctaggactcggcctgtgcttgcagttgtatgccctttag

SEQ ID NO: 8753 - DNA, 600 bp, synthetic construct
  misc_feature 1..600: note = source = /note="Description of Artificial Sequence: Synthetic coding sequence"
  source 1..600: mol_type = other DNA
atggccctgaacggcgccgaggtggacgacttcagctgggagccccccaccgaagctgagactaaggtcctgcaggccagaagggagagacaggacaggatcagcagattaatgggggattacttactgcggggctatagaatgctcggcgaaacatgcgccgactgcggcactattctcttgcaagataagcagagaaaaatctattgcgtcgcctgtcaggaacttgattcggacgtggataaggataatcctgcccttaatgctcaggcggcacttagccaagcccgggagcaccagttggccagtgccagtgaactccctttgggatcaaggccagcaccgcagccacccgttcctagacccgaacattgcgaaggcgctgcagcgggacttaaggcagcccaggggccacccgcccctgctgttccaccaaatacagacgtgatggcatgtacccagaccgctctgctccagaagttgacatgggcttccgcagaattaggctcttccactagcctggaaaccagtattcagctgtgcggattgatccgggcttgcgccgaagctttgcggtcactacagcaactgcaacactag

SEQ ID NO: 8754 - DNA, 813 bp, synthetic construct
  misc_feature 1..813: note = source = /note="Description of Artificial Sequence: Synthetic coding sequence"
  source 1..813: mol_type = other DNA
atgaagctgggctgcgtgctgatggcctgggccctgtacctgagcctgggggtcctctgggtggctcagatgctcctcgccgctagctttgagaccctgcagtgcgaaggccctgtgtgtacagaggagagcagttgtcacactgaggatgatctaaccgacgccagagaggccgggtttcaggtcaaggcgtacactttcagcgagccatttcatctgatcgtgtcttacgagctgtttcctgcgcctatccttagggccgtcccctccgcagaaccccaagccggctctcccatgaccctgtcttgtcaaacaaaattaccactccagcgctctgccgcccgcctcctgttcagtttctataaggacggcaggattgtccagtctcgaggtcttagtagtgagttccaaatcccaactgcctctgaggatcacagcggaagctattggtgtgaagcagccactgaggacaatcaggtatggaagcagagcccacagttagagatcagagttcaaggtgcgtcatctagcgctgcgccccccaccctgaatcccgctcctcagaaaagcgctgcccccgggacggcccccgaggaggcgccgggacctctgcctccaccacctacaccatcctcagaggatccaggattttccagccccctgggcatgccagacccccacttgtaccatcaaatgggtctgctcttgaaacatatgcaagacgtgcgggtattgctgggccatctattgatggagttacgcgagctgagtggacacagaaaacctggcactaccaaagcaaccgccgaatag

SEQ ID NO: 8755 - DNA, 2421 bp, synthetic construct
  misc_feature 1..2421: note = source = /note="Description of Artificial Sequence: Synthetic coding sequence"
  source 1..2421: mol_type = other DNA
atgcggctgagccccgcccccctgaagctgagccggacccccgccctactggcactggcactgccgctggccgccgctcttgcattcagcgacgagaccttggacaaggtaccaaaatcagaaggctattgttcacggatacttcgggcccaggggacgaggagagagggatatacagagttcagcctcagggttgaaggcgatccagatttttacaagcccggtacctcctaccgcgtgactctaagcgcagcgcccccttcttatttccgagggtttacacttattgccttgcgggagaatagggaaggagacaaggaggaagaccatgcaggcacatttcagatcattgacgaggaggagacccagttcatgagcaattgtcctgtcgctgtcacagagagtacaccccggcggaggactcgcatccaggtgttttggatcgcacccccagcaggcactggatgtgtcatacttaaagcctcaattgtccaaaaacgaataatctattttcaggacgagggatccctaacaaagaagctttgcgaacaggattctacgtttgatggcgttacagataagcccattctggactgctgttgtggcacagctaaatacaggttaacattctacggcaattggtctgagaaaacacaccccaaggactacccacggcgggccaaccattggagcgcgattatcggaggcagtcatagcaagaactatgtgctctgggagtatggaggatatgctagcgagggcgtcaagcaggtagcagagttggggtccccagtgaaaatggaagaagagattagacagcagtctgatgaagtgctgaccgtgatcaaggccaaggctcagtggcctgcttggcagccgttaaacgtgagggctgcgccaagcgcagagttctccgtcgatcgtacccggcacctgatgagcttcctgacgatgatgggcccttccccagattggaacgtgggcctttcagccgaggacctgtgcaccaaggaatgcggctgggttcagaaggtggtgcaggatctgatcccatgggacgccggaaccgactctggagtcacctatgagtcgccgaataaacctactatcccgcaggaaaagattcgtccccttaccagcctcgatcacccccaatccccattttatgaccctgaaggagggtctattactcaggttgcccgggttgtcatcgaacgcattgcacggaagggcgaacagtgtaacatcgtgccagacaatgtggatgatattgtggccgatttagcaccagaggaaaaggatgaggacgacactcctgagacctgcatttacagcaactggtctccatggtctgcatgctctagctcgacttgtgacaaaggtaagcggatgagacagcggatgttgaaggcccagcttgatctgtcagtgccttgcccagatacacaggatttccagccatgcatgggacctggatgctccgatgaagatggatccacttgcacaatgtcggaatggattacgtggagtccgtgttctatatcatgcggcatgggtatgcgcagccgggagagatatgtgaagcagtttccagaggacggttcagtgtgtacattgcccactgaggagacagagaagtgtacggtgaatgaagagtgctctccctccagttgcttaatgacagagtggggcgagtgggatgagtgctcggccacttgcggaatgggaatgaagaaacgccataggatgatcaaaatgaatcccgcagatggctccatgtgcaaagccgagacctcgcaggcggaaaagtgcatgatgcccgagtgccacacaattccttgccttctgagcccttggtccgagtggtcagactgttccgtgacttgtggaaagggcatgcggacacgccagcgcatgctgaagtccctagctgagctgggagactgcaatgaggacctcgaacaggtagagaaatgtatgttaccagagtgcccaatcgactgtgagctgaccgaatggtctcagtggtctgagtgcaataaaagttgtggaaagggacatgtaatcagaactcggatgattcagatggaaccccagtttggcggagccccatgccccgaaaccgtacagaggaagaagtgccgaatcagaaaatgtctaaggaatccttctattcagaaacttaggtggcgagaggcacgtgagtccaggaggagtgagcagctgaaggaggagagcgaaggtgaacagttcccaggatgtcgcatgagaccttggacagcttggtctgagtgtacgaagctttgtgggggaggaatccaggaacggtacatgactgtcaagaagaggttcaagagctctcagttcactagctgtaaggacaaaaaagaaataagagcctgcaatgtgcacccctgttag

SEQ ID NO: 8756 - DNA, 4242 bp, synthetic construct
  misc_feature 1..4242: note = source = /note="Description of Artificial Sequence: Synthetic coding sequence"
  source 1..4242: mol_type = other DNA
atgcggcacggcgtggcctgggccctgctggtggccgccgccctgggactgggtgccagaggcgtgaggggggccgttgccctcgcggatttttacccatttggagctgagcgcggggatgctgttactcccaagcaagacgacggaggcagcggtttaagacctctcagcgtgccatttcccttcttcggagccgaacactcaggtttatatgtcaacaacaatgggatcattagtttccttaaagaggtgtcccagtttaccccggttgccttccctatcgcaaaagaccgctgtgtggtggcggcattctgggcggacgtcgacaaccggcgtgcaggagacgtatactatcgcgaggcaactgatcctgctatgcttaggcgtgcgaccgaagacgtgagacactatttcccagagctcctggacttcaatgcaacatgggtcttcgtggccacatggtaccgggttactttcttcggcggtagctcctcgtccccggttaacacctttcagactgtcttgataaccgatggcaagctgagctttaccatcttcaattatgagagtatcgtctggaccaccgggacacacgcgagctcgggaggaaacgccacaggtttgggcggcattgctgcccaggccggttttaatgcaggagacggacagagatacttcagtataccgggttcaaggacagctgacatggctgaagtggagactaccactaacgttggggtccctggcagatgggcttttcgaatagatgacgcccaggtccgagtaggcggctgtggccacacgactagcgtttgtcttgctctgcgaccttgcttgaacggaggcaagtgtatcgatgattgcgtgacaggcaacccaagttatacatgctcctgtctgtctggttttacaggacgcaggtgtcacctggacgtgaacgaatgcgcctcccaaccttgccaaaatggcggcacttgcacccatggtattaattctttcaggtgccagtgtcccgccggctttggcggtccaacgtgcgaaacagcccagagcccctgcgatactaaggagtgtcagcacgggggacagtgtcaagtggagaacggaagcgcagtgtgtgtttgccaggccggatacacaggggcagcctgcgagatggacgttgatgattgctccccagacccatgccttaatggcggatcctgcgtggatttggtgggcaattatacatgcctctgtgcggaaccatttaagggcctgagatgcgaaactggcgatcaccccgtgcctgacgcctgcctatcggccccctgccacaatggcggcacatgcgtcgacgctgatcaaggatacgtctgcgaatgccccgagggtttcatggggctggattgtagggagcgggtgcccgatgactgcgaatgtagaaacggcggcagatgcctgggggcaaatacaaccttatgtcagtgcccgctgggcttttttggcctgttgtgcgagtttgaaattactgccatgccttgtaatatgaatactcagtgtccggacgggggctactgtatggagcacggaggatcatacttatgcgtttgtcacactgatcataacgccagccatagcttgcctagtccgtgtgactctgacccgtgcttcaacggcggttcttgcgatgcacatgatgatagctatacatgcgagtgcccccgagggttccatggaaagcactgtgaaaaggcacgcccgcacctctgttcttccggtccttgcagaaacggcggcacttgtaaggaggccgggggcgaataccactgtagctgtccttatcgttttacaggccggcactgcgaaattggaaaaccagattcatgcgcatcagggccatgtcacaacggcggaacctgtttccattatatcggtaaatataaatgcgattgccccccaggtttcagtggccgccattgtgaaatagcgccttcaccatgcttccggtccccatgcgtgaacggtgggacatgcgaggatagggatacagactttttctgccattgccaggccggctacatgggacgcagatgtcaagctgaagtcgactgtggcccccctgaggaagtgaaacacgctactctgcgtttcaatggcacccgtttgggggctgtcgccctgtatgcttgtgacagggggtactccctcagcgccccctctagaattagggtctgccaaccacatggagtgtggtccgaaccgccccagtgcctggagatcgatgagtgccgatcccagccctgtcttcacggcggatcttgtcaggacagggtagctgggtacctatgtttgtgtagtactggttacgagggcgcacattgcgaactcgagcgagacgaatgcagagcccatccgtgtcgaaatggcggaagctgccgcaatctgccaggggcctatgtgtgtaggtgtcccgctggcttcgtgggtgtccattgcgagaccgaggtagacgcgtgtgacagttctccatgccagcatggcgggcggtgcgagtcaggcggaggcgcctatctatgtgtgtgcccagagagtttctttggctatcactgcgaaaccgtgtccgatccgtgtttttcaagcccttgtgggggtaggggctattgcctcgcctccaatggatcccatagttgcacatgtaaagtcgggtatacaggcgaggactgcgctaaggagctctttcctccaaccgcactgaaaatggaaagagttgaagagtccggggtaagcatctcttggaacccccctaatggcccagccgcgaggcagatgctcgacggatacgctgttacctatgtttccagcgacggaagctaccgccggacagattttgttgacaggactcggtctagtcaccaattacaggccctggctgcaggacgagcctataatatcagtgtattttcagtgaaaaggaatagcaacaataagaatgacataagccggccggcagtgctgcttgcacggacgaggccaagacctgtggaaggctttgaagtaacaaacgtgacagcaagcaccatttctgtgcagtgggctctgcaccgcatcaggcacgcgactgtgtccggcgttcgcgtatctattcggcacccagaagctctgagagaccaggcaacggatgtggaccgatccgtggaccgatttacattccgggccttgcttccagggaaaaggtatacgatccaattgaccaccttaagcggattacggggcgaggagcaccccaccgaaagtctggcaaccgcaccaacccacgtttggacccgccccctgcctccagccaacctgaccgccgcccgggtgacggccaccagtgcacacgtcgtgtgggacgcacccacccccgggtcattactcgaagcgtatgtaatcaacgttactacaagccagagcacaaaaagcagatacgttccaaatgggaagctcgcctcctacacggtccgggacctgctcccaggtcgcaggtaccagctttccgtcattgctgtacagtccacagagctgggaccgcaacactccgagccggcccacctatacataatcacgtctccccgggacggagctgatcggcgatggcatcagggtggtcaccacccgcgggttctaaaaaatcggccaccccccgctcgcctacccgagctgcgactgctgaacgaccatagcgccccggagaccccaacccaaccaccacggttttctgagcttgtggacggccgcgggcgtgtgtccgctagattcggaggctctccaagtaaggccgccactgtgcgttcacagcccacagccagcgctcagctggaaaatatggaggaagcccccaaaagagtcagcctcgctttgcagttgcccgaacatggctcaaaagacattggcaatgtgcctgggaattgctctgaaaatccctgccagaacgggggcacttgtgtgcctggcgcagatgcacactcatgcgattgcgggccaggattcaagggtagacgctgcgagctggcttgcatcaaagtttcgcgtccatgtactcggctgttttccgaaactaaagccttccccgtgtgggaaggcggtgtatgtcatcacgtctataagcgtgtttaccgtgttcatcaggatatctgttttaaggagtcctgcgagtctacaagcctgaagaaaacccccaaccgcaaacagagcaagtcgcagaccctggagaaaagctag

SEQ ID NO: 8757 - DNA, 1008 bp, synthetic construct
  misc_feature 1..1008: note = source = /note="Description of Artificial Sequence: Synthetic coding sequence"
  source 1..1008: mol_type = other DNA
atgttcctggccaccctgagcttcctgctgcccttcgcccacccctttggcactgtgagttgcgagtacatgcttggaagccccctctcatctctcgcacaagtgaatctctctccattctcccaccctaaagtgcatatggacccgaattattgccacccaagtacgtccctgcatttatgttctctcgcttggtcctttacacggctgctgcatcccccccttagccctgggatctcccaggtggttaaggaccacgtgaccaaaccaacagccatggcacaaggccgagtcgcacatctgatagaatggaagggatggtcaaagccatcggacagtccagcagcactggaatcagccttcagcagttacagcgacttaagtgagggagaacaagaagccaggttcgcagccggtgtggccgagcagttcgctatagctgaggctaagctgcgggcctggagttccgtggatggtgaagacagtacggacgacagctacgacgaagattttgcagggggcatggatacagacatggctggacagctgcctctggggccacacctgcaggatctttttaccgggcacaggttctctcgacctgtcagacagggctccgtggaacctgaatcggattgctcccagactgtgagcccagacactttgtgttcctctctttgcagcctggaagacggactccttggcagccccgcccgactggcctctcagctcctgggcgatgaacttctgttggccaaactgcccccctcccgtgagtccgcttttcgctccttgggaccactagaggcccaggattctttgtataatagcccgttgaccgaatcatgcctcagccccgctgaagaggagcctgccccgtgcaaagattgccagccattgtgcccccctctgactgggtcctgggagcgtcagcgtcaagcaagcgacctcgcttccagcggagtggttagccttgacgaagatgaagcagagcctgaggaacagtag

SEQ ID NO: 8758 - DNA, 828 bp, synthetic construct
  misc_feature 1..828: note = source = /note="Description of Artificial Sequence: Synthetic coding sequence"
  source 1..828: mol_type = other DNA
atgcagccccccggcccccgggaccccctgatccggctgtgcttcttcagggaggagggcacaaatgtggtacagaaaatctgcttctcaactcagattattagacacttcgaatctaaactgtccgacaccatcgaggtttaccaagaacgaatccagtggttaaccgagaacagcaaaaaagcctttgggctgataaaaggcgcaagagtgtcaatccttatcgacgttagcgccatcagtagtgggccccagaaagaggaattccagaaagaccttatgagcttaatcgatgagcagctgagccacaaagagaagttgttcgtactgtctttcggcacaaacgctgggtccctctggccagaccccatggaggtctccgccagtaccctgcaggagctaaaattgtgggtcaaaaccctccagcccgatggtggtagcaacctcctccaggccttgaagaaaatctttaccctaaaaggacttgacagcttggtggccatcatgcgatcatgtcctgatcagccaagcgaaatcttatccgattacatccagcaatctactatggggcgtgatctgatcatccatttcattacgtaccgttgtgatgaccagatgcctccggctgtcctgaaaaatctggccgaagccgtcaggggctattatcactgctattcccctaaaatggaacactacacctctagggatatggacgagttactggccgagattcagaaggctcagtcactgctatctcatgtccaggccctgcagcatagctccccatgcgaggctctcacatgcacaatggaggaacctcgcaactag

SEQ ID NO: 8759 - DNA, 438 bp, synthetic construct
  misc_feature 1..438: note = source = /note="Description of Artificial Sequence: Synthetic coding sequence"
  source 1..438: mol_type = other DNA
atgctgacccggctggtgctgagcgcccacctgagcagcaccacctcaccaccatggacccacgccgccatcagttgggaactggacaatgtgcttatgccctcgcccaggatttggccgcaggtcaccccaaccggaagaagtgcttccgtgagatccgagggcaacacctcgtccctgtggaacttctctgccggacaggacgtgcacgcaattgtcacacgaacatgcgagtcagtcttgtcctctgcggtctacacccatggttgtggctgcgtccgctccgccacaaacatcacctgtcaatccagcggccagcagaggcaagcagcccgccaggaggaggagaacagtatatgtaaggctcacgattcgcgggaggggcggttaggttaccccctctccgcccatcagccggggagcggcggacccaactag

SEQ ID NO: 8760 - DNA, 777 bp, synthetic construct
  misc_feature 1..777: note = source = /note="Description of Artificial Sequence: Synthetic coding sequence"
  source 1..777: mol_type = other DNA
atgaccccccccaagctgcgggccagcctgagccccagcctgctgttgctgttaagcggatgtctactagctgcggctagacgcgagaaaggcgcagcctcgaatgttgctgagccggttcccggacccactggcggcagctctgggcgcttcctgtctcctgagcagcatgcttgttcatggcaactcctactgccagcgccagaggccgccgctggatcagagttggccctcagatgccagagcccagacggcgctagacatcagtgcgcatacaggggccacccggagcgatgcgccgcgtatgctgcacggagagcacacttctggaagcaggtgcttggcggcctgaggaaaaaaagaaggccttgtcacgaccccgcacctctgcaagccaggctatgtgccggtaaaaagggccacggggcagagctcagactggtgcctcgggctagtccacctgctcgaccgacggtcgccggattcgcaggcgaaagcaaaccaagagcgaggaaccgcgggaggaccagggaacgcgcatctggcccggcagctggtacccccccaccccaatccgcccctccaaaagaaaatcccagcgagcggaaaactaacgagggtaaacggaaggcggccctggtgcctaacgaagagagaccaatgggaaccggccctgatcctgatgggcttgacgggaatgcagaactgaccgagacttattgtgcggaaaagtggcactccctctgcaacttcttcgtcaacttctggaacggatag

SEQ ID NO: 8761 - DNA, 393 bp, synthetic construct
  misc_feature 1..393: note = source = /note="Description of Artificial Sequence: Synthetic coding sequence"
  source 1..393: mol_type = other DNA
atggcccggcggcactgcttcagctactggctgctggtgtgctggcttgttgtcacagtggcagaaggccaggaggaagtgtttacgcctccaggggattcccaaaacaacgccgatgcgactgattgtcagatttttactttaactcctccccccgcccctcgcagtccggtgacccgcgcacagccaatcactaagactccgagatgtcccttccacttttttccgcggagacccaggatccattttcgctttcccaaccgcccttttgtgcccagtcggtgcaatcaccggtttccttttcagccattctattggcctcaccggtacctcacctatcggtacttcccccgaaggcgcttacagcgcgggtccagcagtgaggagtcctag

SEQ ID NO: 8762 - DNA, 600 bp, synthetic construct
  misc_feature 1..600: note = source = /note="Description of Artificial Sequence: Synthetic coding sequence"
  source 1..600: mol_type = other DNA
atgtaccccgccaccgccgtgccccagatcaacatcaccatcctgaagggcgagaaaggggaccgaggggatcgagggttacaaggcaagtacggcaagacaggctccgcgggcgcgcgtgggcacacgggcccaaaaggccagaagggcagcatgggcgcaccgggtgaacgctgtaaatcccactatgcagcattttctgttggtcgcaaaaaaccaatgcacagtaatcactactaccagaccgttattttcgataccgaattcgtcaatctatatgatcattttaacatgtttaccggcaagttctattgttacgtacccggactttacttcttttctctgaacgtgcatacttggaaccagaaggaaacctatttgcatatcatgaaaaacgaagaggaagtggtgattctgttcgctcaggtcggggaccggtctataatgcaatctcagtccttgatgttggagttgcgagaacaagatcaggtatgggtacgactctacaagggcgagagagaaaacgcgattttcagcgaagagctagatacctacattaccttctccgggtatctggtgaagcatgccacagagccttag

SEQ ID NO: 8763 - DNA, 702 bp, synthetic construct
  misc_feature 1..702: note = source = /note="Description of Artificial Sequence: Synthetic coding sequence"
  source 1..702: mol_type = other DNA
atggccctgaagaacaagttcagctgcctgtggatcctgggcctgtgcctcgtggccacgacaagctccaagatcccatcgatcactgacccacatttcattgataactgtattgaagcccacaatgaatggagagggaaagttaatccgccggccgcagacatgaaatacatgatttgggacaaaggactggcaaaaatggcaaaggcctgggcaaatcagtgtaaattcgagcacaatgactgcctggacaagagttataagtgttatgcggcgtttgagtatgtgggagagaacatctggttaggcggcatcaaaagttttactccgaggcatgccattactgcctggtataacgaaacacagttttatgacttcgactccttgagttgctctcgggtgtgtggccactacacacagttagtgtgggccaatagtttctatgtgggctgtgcagtcgctatgtgtcccaacctgggaggggcgtccacagctatttttgtgtgtaactatggtcctgccggcaattttgcaaatatgcccccctatgtccgcggggaaagttgcagcctatgttccaaagaggaaaaatgtgtcaaaaatctatgtaaaaatcccttcctcaagcccacaggccgcgcaccccaacagaccgctttcaatccatttagccttggtttcctgctcttgaggattttctag

SEQ ID NO: 8764 - DNA, 669 bp, synthetic construct
  misc_feature 1..669: note = source = /note="Description of Artificial Sequence: Synthetic coding sequence"
  source 1..669: mol_type = other DNA
atggccctgcacatccacgaggcctgcatcctgctgctggtgatcccggggctcgtcaccagcgcagccatatcgcacgaggattaccccgcagatgaaggcgaccagatttcttctaatgacaacctgatcttcgatgactaccggggtaagggatgtgtggacgatagcgggtttgtctacaagctgggagaaagatttttccctggccactctaactgcccttgtgtgtgcgctctagatggacccgtgtgcgatcagcccgaatgccctaagatccatccgaagtgcactaaagtcgagcataacggatgttgccctgagtgtaaagaagtcaaaaacttctgcgaatatcatggcaaaaactacaagatactcgaagagtttaaaccctcaccatgcgagtggtgtagatgcgagccatcaaatgaggtgcattgcgtggtcgccgactgcgccgtaccggagtgcgttaacccagtgtacgaacctgagcagtgctgtcccgtgtgcaagaacggccctaactgtttcgccggcacaaccattatccctgccggaattgaggtgaaagtcgatgagtgtaacatctgccactgccataacggcgattggtggaaacccgctcagtgctctaaaagggagtgtcagggcaaacaaacggtctag

SEQ ID NO: 8765 - DNA, 957 bp, synthetic construct
  misc_feature 1..957: note = source = /note="Description of Artificial Sequence: Synthetic coding sequence"
  source 1..957: mol_type = other DNA
atgctgcccctgaccatgaccgtgctgatcctgctgctgctgcccaccgggcaggcagcaccaaaagatggcgtgactaggcccgacagtgaggtgcaacaccagttgctccccaacccattccagcccgggcaggagcagctgggcttacttcagtcttatttgaagggccttggacgaacggaggtgcagcttgagcacctgagcagggaacaggtcctattgtacctgtttgcccttcatgactacgaccagagcggtcagctagacggcttagagctgctgtctatgttgactgctgcactcgcccccggcgccgccaattcacctacgactaatccggtcatcctgatcgttgacaaggtactcgagacccaggacctcaacggggacggactgatgaccccagctgagcttatcaattttcctggagttgcgctccgccatgtggagcccggggagcccctggcccccagcccacaagagcctcaggcagtgggcagacagagcttgctagctaaatcaccactgaggcaggagacccaagaagcaccaggacctagagaggaggccaagggacaagtagaggcacggcgggaatccctggatccggtgcaggagccaggtggccaggctgaggccgatggtgatgtgccaggccctcggggggaggcggagggccaagccgaggccaagggggatgcacctggcccccgcggggaggccggcggccaagcagaggccgagggagatgctcctggccctcgaggagaagccggcgggcaggcagaggccgagggcgacgccccaggcccccgaggagaggctggaggtcaggcagaggcccgagagaatggcgaagaagcaaaggagctgccaggggaaacactcgagtccaagaacacacagaacgactttgaagtccatattgtgcaagtcgagaacgatgagatctag

SEQ ID NO: 8766 - DNA, 393 bp, synthetic construct
  misc_feature 1..393: note = source = /note="Description of Artificial Sequence: Synthetic coding sequence"
  source 1..393: mol_type = other DNA
atgctggcccccctgttcctgtgctgcctgcggaacctgttccggaaattgatcagcttccagccaccccagctgggcaggaccaatatgcattacagcaaacttccccggaccgccattgaaacggagttcaagcaaaacgtaggacccccgcctaaggacctgacggcagaagtgtactttccttctataaagagtaggtcacacctccccgccgttttttataaccagtactttaaacacccaaaatgcgtaggggaatatggaccaaaaaacggggctgagcgtcagatcgaggagagaaaagtgctgccgactacgatgatgttttcaatgttagccgattgcgtgctgaagtcgaccccaatccccatcttgggcgtcgcaatgtag

SEQ ID NO: 8767 - DNA, 4362 bp, synthetic construct
  misc_feature 1..4362: note = source = /note="Description of Artificial Sequence: Synthetic coding sequence"
  source 1..4362: mol_type = other DNA
atgatgctgccccagaacagctggcacatcgacttcggccggtgctgttgtcaccagaacctcttctctgctgtggtgacatgtatactactacttaatagctgctttctcatctccagcttcaacggcacggatttggaacttagactggttaatggcgacggcccatgctcagggacggtggaagtgaaatttcaggggcaatggggcacagtgtgcgacgatggatggaataccaccgcttcaaccgtggtgtgcaaacagctcggttgtccatttagcttcgcaatgttccggttcggccaggctgtcacgcggcacggcaagatctggctcgatgatgtgagctgttatggcaatgaaagtgctctgtgggaatgtcaacaccgtgagtggggctctcataactgttaccatggtgaggacgtcggggtgaactgttacggcgaagccaatctcggcctccgtctcgtggacgggaataacagctgcagcggaagagtcgaggttaagtttcaggagcgttgggggaccatctgcgatgacggatggaacctgaatacagcagctgtggtctgtcgacaactgggctgcccctcttcctttatttctagtggagtggttaattcccctgctgtgttgcgtccgatatggttggatgacatcttatgtcagggtaatgaacttgccctgtggaactgcagacacaggggctggggtaaccacgactgcagccacaatgaggacgtaactctgacctgttacgatagctcagacctggaactgcgcctcgtgggcgggactaaccgatgcatggggcgagtcgagctgaaaattcaaggccggtgggggacagtctgccatcataaatggaacaatgctgcagcagatgttgtgtgtaagcaactgggctgtggtactgccctgcatttcgccggactgccccacctgcagtcaggatcggatgttgtgtggctggatggggtcagctgttccggtaatgaatcatttctctgggactgtcggcatagtggcacagtgaatttcgattgtctccatcaaaacgatgtgtctgtgatatgcagcgacggggccgacctagagttaaggttagccgatggatcaaataactgcagtggcagggttgaagtacggattcacgagcagtggtggacaatctgcgaccagaattggaaaaacgaacaggccctggtggtgtgtaagcagctgggatgtccatttagcgtgttcgggtctcgcagagccaagccatctaacgaggccagagatatatggatcaactccatttcttgcactgggaatgagagcgccctctgggattgtacctacgacggaaaagctaagagaacctgtttccggagatcagatgcaggagtcatttgctctgacaaagccgatctcgacctgagactggttggggcccactctccttgctatggtcgtctagaggtgaagtaccaaggcgaatggggaactgtctgtcacgataggtggtccactaggaatgccgccgtggtgtgcaagcagctggggtgtggaaaacccctgcatgtgttcggtatgacgtatttcaaggaggcctcaggccctatctggctggatgacgttagctgcatagggaacgagtccaatatttgggactgtgaacattccggctggggcaagcataattgcgttcaccgagaggatgtgatagtgacatgtagcggggacgcgacctggggccttagactggttggaggctcgaatcgctgtagcggacggctggaagtgtactttcaggggcggtggggaaccgtgtgcgatgacggctggaattccaaggctgccgccgtcgtgtgcagccagttggattgtcccagctccattattggaatgggtctgggcaacgcttcaaccggttatggaaagatttggctggatgatgtgagctgtgatggagacgaaagcgatctatggtcctgtcgcaattcggggtgggggaataatgattgttcccacagtgaagacgtgggcgtgatctgttccgacgctagcgatatggaactgcgactggtcggggggagctcacgttgtgctggtaaagtggaagtgaatgtgcaaggtgctgtgggaattctctgcgcaaacggatggggcatgaatatcgcagaagttgtatgcagacagttggagtgcgggagtgccataagggtgtcaagagaacctcactttaccgagcgcacactgcacatcctcatgtctaattctgggtgtactggcggcgaagcctcactatgggactgcatccggtgggagtggaagcagacagcatgtcacctcaacatggaagcatccctcatttgttccgcacaccgtcaaccaaggctggtgggtgcagatatgccatgttcaggacgggtcgaggttaaacacgctgacacatggcggtctgtgtgtgactcggatttctccctgcacgctgctaacgtgctttgcagggagctgaactgcggggacgctatatcactgagtgttggagaccatttcggtaaaggaaacggtttaacctgggccgagaaatttcagtgtgaaggttccgaaacccaccttgctctgtgcccaatcgtccagcaccctgaggatacttgtattcatagccgggaagtcggggtagtttgttcacgctacacagacgtccgcctggtaaatggcaagagtcagtgtgacggtcaggtggaaatcaacgttctaggccattggggttcactgtgtgacacccactgggatccagaggatgcccgcgtcctgtgtaggcaactttcctgtggtaccgccctgtcgacgacaggcgggaaatacattggagaaaggagcgtacgtgtgtggggtcacagatttcattgtctgggcaatgagtccctgctcgacaactgccaaatgaccgtactgggtgctcccccatgcatccacgggaacactgtcagcgtcatctgtacaggtagtctgacccaacccctgttcccctgcctggccaatgtaagcgatccttacctgtcagccgttccagaaggtagcgcactcatatgcctggaggacaaacgtctgcgactggtggacggagactcaagatgtgccggacgagtggagatctaccacgacggtttttggggcactatttgtgatgacggatgggacttatcagatgcacacgtggtgtgtcagaaactcgggtgtggggtcgctttcaatgctaccgtgtcagctcacttcggggagggcagtggaccaatctggctagatgacctcaactgcactgggatggagtcacacctctggcaatgtccgagtcgaggctggggccagcacgattgccgacacaaagaagatgcaggcgttatttgctcggaatttaccgctctcagactttatagtgagaccgagaccgagtcctgcgccggaaggctggaggtgttttataacggtacctggggctcagtcggcagacgtaacattacaaccgccatcgctggcatcgtgtgtcggcagctaggctgtggtgaaaacggcgtagtctccctggcccccctcagcaagacagggtctgggtttatgtgggtggatgatatccagtgtcccaaaacccacatcagtatttggcagtgcctgagtgcaccctgggaaaggagaatttcttctcctgcggaggaaacatggatcacgtgcgaagaccgaatacgggtccggggaggcgacaccgagtgtagcggccgcgtggaaatctggcacgcaggcagttgggggacagtttgcgatgattcctgggacttggccgaggcagaagtggtgtgtcagcagttggggtgtggctcagctctggcagctctcagggatgccagttttggccaggggactggcactatctggctggacgatatgagatgcaagggaaatgagtcattcctttgggactgtcacgccaaaccatggggccagtctgactgtggtcataaagaggacgccggagtcagatgttcgggacagagcctgaagagcctgaacgcaagctccggccacttagcactgattctgagtagcattttcgggctgctgctgcttgtgctttttattctctttctgacatggtgtagggtgcagaaacaaaaacatctgccattacgcgtgagcacaaggcggcgcgggagcctcgaggagaatcttttccacgaaatggaaacttgcctgaaaagagaagacccacatggcacacgcacttccgacgatacccccaatcatggatgcgaggacgcatctgacacctcccttttgggggtactgcccgccagtgaagcaaccaaatag

SEQ ID NO: 8768 - DNA, 759 bp, synthetic construct
  misc_feature 1..759: note = source = /note="Description of Artificial Sequence: Synthetic coding sequence"
  source 1..759: mol_type = other DNA
atgctgccccccccccggcccgccgccgccctggccctgcccgtgctcctgctcctgctggtggtgctcacaccgccccccacaggcgccagaccatcaccggggcctgactaccttcgtagaggatggatgagactgctagctgaaggagaaggatgtgcaccctgtaggccggaagaatgcgccgctccgagaggctgcctagcgggtagagttagagatgcttgtgggtgttgttgggagtgcgctaacttagagggccaactgtgtgacctcgacccgagtgcccacttctacggccactgcggggaacagctggagtgcaggcttgacacaggcggggatctgtctcgtggtgaggttccagagcctctctgcgcttgccggagtcagtccccgctatgtggtagcgacggtcatacttactctcagatttgtaggctgcaggaagctgctcgggccagaccagacgccaacctgactgtggcacatccaggcccctgcgagtccggacctcaaatcgtcagtcacccttatgatacttggagaggcccccgattacaaacactgggcaccgaagacaccctgaccacactggtgggggcgggtgggatggcacgcgccgtggcttgtggggaagcccccggcgaacatctggcactgcaggtcctgtgcctgtcaggcaagcgaaggcacctgtggcaagtaggcagcaccggctcaagcgaaggagtgcctagtgggggctcgttttggtag

SEQ ID NO: 8769 - DNA, 1323 bp, synthetic construct
  misc_feature 1..1323: note = source = /note="Description of Artificial Sequence: Synthetic coding sequence"
  source 1..1323: mol_type = other DNA
atgaagctggccctgctgctgccctgggcctgctgctgcctgtgcggttctgcattggccaccggcttcctttacccgtttagtgcagcggcactccaacaacacgggtaccctgaaccgggcgctggctcacctggatcaggatacgcatccagaaggcattggtgccaccataccgtcacgagaacagtgtcctgtcaggttcaaaatggttcagagaccgttgtgcagcgggtatatcagtcatgtcgttggccaggcccttgcgccaacctggtatcttatcgtactctcatacggcccacgtaccgtgtgtcatatcggacagttacagttctggagtggaggtgttgtcccgggttcacaggctcgaactgtgacgaggaatgcatgaattgtacccgccttagtgacatgagtgaacggctcaccactttggaagcgaaggtgctgcttctcgaggctgccgaacggccatcctctcccgataatgatcttccggctccagagtcaacaccaccaacgtggaatgaggacttcctccctgacgcgatccccctcgcccatcccgtacctaggcaacggaggccaactggccccgcaggaccacctgggcagaccggcccccctggtcccgctggcccccctggaagtaaaggcgatcgtggccagaccggcgaaaaaggccctgctggtccacctggcctgcttggccccccaggaccacgtggtttgcccggggagatgggtcgtcctggcccgcccggacctcccggcccagccggcaatcctggcccttcccctaatagccctcagggcgctctgtacagcctgcagcccccaaccgacaaagataacggggattcccggttagcctccgctattgtagacacagtgttggccggagttccaggccccaggggtcctcctgggccacccggccctccaggtccacgcgggcctcctggccctcccggcacaccaggatcccaggggctggccggtgaacgcggtaccgtggggccatcaggggagcctggcgtgaaaggggaggaaggggaaaaagcagccactgctgagggagaaggggtgcaacaactccgcgaagccctcaaaatcctagccgagagagtcctgatcttggaacacatgataggcattcatgatcccctagccagtcccgagggctcaggccaggatgccgctctgcgcgcaaacctgaaaatgaagcgcggcggcgcccagcctgatggcgtactcgccgcgctgttggggcccgaccctggccagaaatcagtggatcaagctagctcccgcaaatag

SEQ ID NO: 8770 - DNA, 1341 bp, synthetic construct
  misc_feature 1..1341: note = source = /note="Description of Artificial Sequence: Synthetic coding sequence"
  source 1..1341: mol_type = other DNA
atgctgcaccccgagaccagccccggccggggccacctgctggccgtcttgctcgcccttttgggaactgcctgggcagaggtgtggccaccgcagcttcaagagcaagccccaatggcaggtgccttgaataggaaagagtcattcttactcctgtccctccataacaggctcaggtcgtgggtgcaaccaccagccgccgatatgaggcggcttgactggtcagactcactcgcgcagcttgcacaggcgcgggctgcactctgtgggatccccactccaagcctggcatccggactatggcgaacactccaggttggctggaacatgcaactattgcccgctggtttggccagtttcgttgaagtagtgagcctgtggtttgctgaaggacagaggtactcccatgcagccggtgagtgcgcgagaaatgcaacttgtacacactatacccagcttgtctgggcaacatcatctcagttgggctgtgggaggcacctctgctctgctggccaggccgccatcgaagcattcgtgtgcgcctatagccccagagggaactgggaggtcaatggaaagacgattgtgccttataagaaaggcgcgtggtgctctttgtgtacggcctcagtgagtgggtgtttcaaggcctgggaccacgctggcgggttgtgtgaggtgccacgtaacccgtgtcgcatgtcatgtcagaatcacgggcgcctgaatatcagcacctgtcattgtcactgtccccccggctatacgggcagatattgtcaagtgaggtgctccctgcagtgtgtgcacggccggtttcgagaagaggagtgctcttgtgtctgcgacataggttacggcggggctcaatgcgccacgaaagtgcattttcccttccatacttgtgatctgcgtattgatggtgactgctttatggtctctagcgaggctgatacctactatcgtgcccggatgaaatgtcagcgcaagggcggggttctggcccaaatcaagagtcagaaggtccaggacattctagctttctacttgggaaggctggagacgaccaacgaggtaatcgacagcgattttgagaccaggaacttttggatcggtctgacctacaagactgctaaggattcctttcgctgggccacaggagaacaccaagccttcaccagctttgctttcggacagccggataaccacggcttcggaaactgtgtagaactccaggcctccgctgctttcaactggaacaatcagcggtgcaaaacacgcaatcgatacatatgtcaatttgctcaagaacatatttctaggtggggtcctgggtcctag

SEQ ID NO: 8771 - DNA, 219 bp, synthetic construct
  misc_feature 1..219: note = source = /note="Description of Artificial Sequence: Synthetic coding sequence"
  source 1..219: mol_type = other DNA
atgcagcggctggtgctgctgctggccatcagcctgctgctgtaccaggaccttccagtgaggtccgagtttgaactagatcgcatttgcgggtacggcaccgcacgatgcagaaagaagtgtcgaagtcaggaataccggatcggaagatgccctaacacatacgcctgttgcctaaggaaatgggatgagtccctgctgaaccggaccaaaccttag

SEQ ID NO: 8772 - DNA, 2349 bp, synthetic construct
  misc_feature 1..2349: note = source = /note="Description of Artificial Sequence: Synthetic coding sequence"
  source 1..2349: mol_type = other DNA
ctgtggctgctgctgtgggccgccgcctggcggctgggcgccagcgcttgcccagccctctgcacctgcacgggcaccactgtggactgtcacggcaccggcctgcaggctatccctaagaacattccgcggaatacagagcgcctcgagctgaatggcaacaatataaccaggattcacaaaaatgattttgctggccttaagcaactccgggtgcttcagctcatggagaaccagatcggagcagtggaaagaggagcctttgatgatatgaaagagctggagcgtcttcgcctaaatagaaatcaattacatatgctgcccgagctcctgtttcagaacaatcaggcactaagccgcctcgatctatccgagaatgccatacaggctatcccacggaaagcctttaggggcgccaccgatctcaaaaatctccagctcgacaaaaaccaaatcagttgtatcgaggaaggtgcattcagagccctgagaggcctggaggtgttaacactcaacaataacaatatcaccacaattccagtgagctccttcaatcacatgccgaaactgcggacgttccgacttcactccaaccacctgttttgcgattgtcatctcgcctggctgagccagtggctcagacaaagacctactatcgggcttttcactcagtgcagtggcccagcttcgctccgaggtctgaacgtggccgaggttcagaaatcggaattttcttgctcaggccaaggcgaagccggcagagtgccaacgtgcactttgagtagtggatcttgtcctgccatgtgcacctgctcaaatggtattgtggactgtaggggtaagggtctcacagcaattccggcaaacctgcctgaaactatgaccgagatcaggcttgagctgaatgggatcaaatccattccacccggtgccttctctccatataggaaactgcgccgcatttgccccctgagcttctgctcaccctgtcgtgatctgtccaataatcaaatcgccgagattgcaccagacgcctttcaggggctcagaagcttaaactccctggtgttgtacgggaataaaataacagatctacccagaggtgtctttggtgggctttacaccttacaattgttgctactcaacgctaataaaattaattgtatccgtccagacgcctttcaggacctgcaaaacctgtcgctgctctctctctacgacaacaaaatacagagtttggcaaagggcactttcacgtctcttagggcgattcagacgttacatctcgcccagaaccctttcatttgcgactgtaatctgaagtggttggccgacttcctccgaactaaccccattgagacatctggcgctagatgcgcttcccctcggcggcttgccaataagcggatcggtcagatcaaatccaagaaattcaggtgcagcgccaaagaacagtatttcataccagggacagaagattatcaattgaactctgagtgtaatagtgatgtggtgtgcccccataagtgtagatgtgaagccaacgtggtggaatgctcctctctgaaactgaccaaaatcccagaacgaatcccacagagtacagccgagctgcggctcaataacaacgaaatcagcatccttgaagcaaccgggatgtttaaaaagctgacccatttaaaaaagattaatctcagtaacaataaggtcagtgaaatagaggacggagcctttgagggcgccgcgtcagtgagcgagctgcaccttacggccaatcaacttgagtccatccgctctggcatgttcagggggctggacggactgagaaccctcatgttgcgcaataacagaatcagctgcatacacaacgattcttttacgggtttgcggaacgtacgcttgctgtccctttacgacaaccagattacgaccgtgtcccctggtgcctttgacacactacaatccctgagcacacttaatctgcttgccaacccttttaactgcaattgccagctggcctggcttggtggctggctccgtaaaaggaagattgtgacaggcaacccgcggtgccagaaccctgacttcctgcgccaaatacccctgcaggatgtcgcttttcctgatttccggtgtgaggaaggccaggaagaggggggatgtctaccccgccctcagtgccctcaggagtgcgcttgtctagacacagtggtacgctgtagtaataaacacttgcgcgcattgccgaagggtattcccaagaatgttactgaactctacctagacggcaatcagttcaccctggtcccaggccagttgagtactttcaaatacttgcaactagtgtag

SEQ ID NO: 8773 - DNA, 411 bp, synthetic construct
  misc_feature 1..411: note = source = /note="Description of Artificial Sequence: Synthetic coding sequence"
  source 1..411: mol_type = other DNA
atgagcaacgtgccccacaagagcagcctgcccgagggcatccggcccgggacagttctgcgtatccgtggcctggtgccacccaatgcatctagatttcacgtgaatctcctttgcggcgaggaacagggcagtgacgccgcccttcacttcaatccgcgccttgacacgagcgaagtcgtgtttaatagtaaggaacaagggtcatggggccgcgaagaacgcggacctggagtaccttttcaacggggccaaccattcgaagtgctaattattgcaagcgatgacggctttaaagccgtagttggcgacgcacagtaccaccattttagacaccggctacctttggcccgcgttagattggtcgaagtcggaggtgatgtccagttggacagtgtgcgcattttctag

SEQ ID NO: 8774 - DNA, 1926 bp, synthetic construct
  misc_feature 1..1926: note = source = /note="Description of Artificial Sequence: Synthetic coding sequence"
  source 1..1926: mol_type = other DNA
atgcccccccccctgcccctgctgctgctgaccgtgctggtggtggctgccgccagacccgggtgcgagtttgaacggaacccagccgcaacttgtgtcgatctgcagctcaggacttgttccgatgcagcctataatcatacaacctttccaaatcttctgcaacacaggagctgggaggtggttgaggcctcctctgaatacatacttctgtctgttctgcaccagctgctggagggccagtgcaaccccgacctccggttgctaggatgcgctgtgctggctccccggtgcgagggcggttgggtcaggcgcccatgtcggcacatctgcgaggggctcagagaggtgtgccagcctgcgtttgacgcaatcgatatggcctggccttactttctagattgccaccggtacttcacacgggaagacgaagggtgttatgatccactcgaaaaacttaggggtgggctggaagccgatgaggcactcccatccgggctacctcctacgttcattcggttttctcaccacagctatgcccagatggtacgcgttctccgacgcacagcctctagatgcgcccatgtcgcccgaacgtactctattggacggagtttcgatgggagagaactcctcgtgattgaattcagtagtcgcccggggcagcatgaactgatggagccagaggtgaagctgattgggaatattcatgggaacgaagttgcgggtcgtgaaatgcttatatacttagcacagtacttgtgctctgagtatttactcggaaatcccaggatccagcggctcttgaacaccaccagaatccacctgctgcccagcatgaaccctgatggatacgaagtcgcagccgcggagggggctggctataacgggtggacgtctggacgtcagaatgcccaaaaccttgacttaaaccggaatttccctgacctcacttccgaatactacagactcgcggagacgagaggtgcacgcagtgatcatatacccattccccagcactactggtggggcaaagtggctcctgagactaaggcaatcatgaaatggatgcagaccattccattcgtgctctctgctagcctgcacggtggagatctggttgtctcttacccgttcgacttctcaaagcatccgcaggaagagaagatgttctcacctacccctgacgagaagatgtttaagctgctctcccgggcttatgctgatgtgcacccgatgatgatggatagatccgagaatagatgtggtggcaactttctgaagaggggatccatcatcaacggcgcggactggtattccttcaccggggggatgtcagatttcaactacttgcatactaactgcttcgagataactgtggaattgggctgcgtgaaattccctccagaagaagccttatacatcctgtggcagcataataaagagtctctgctgaacttcgtggaaactgtccatcggggcattaagggggtggttactgataaatttggcaaaccggtgaagaatgcgagaatctctgttaaagggattcgtcacgacatcacgactgctcccgacggggattattggagactgctaccccctgggatccacattgtgatagcccaagcacccggctacgccaaagtgatcaaaaaggtgatcatcccagctcggatgaagagggctggacgggtagatttcatcttgcagcctctgggtatgggaccgaagaattttatccatggattgagaagaacagggcctcatgatcccctgggcggtgcttctagcctaggggaagcaacagagcccgaccccttacgggcaaggcggcagccctctgcagatgggtctaaaccatggtggtggtcctattttacgtccctgagcacccatcggcccaggtggctcctgaagtactag

SEQ ID NO: 8775 - DNA, 1305 bp, synthetic construct
  misc_feature 1..1305: note = source = /note="Description of Artificial Sequence: Synthetic coding sequence"
  source 1..1305: mol_type = other DNA
atggccagcctgggcctgctgctgctgctgctgctgaccgccctgcccccattgtggtcttcatctcttcctggcctggacactgcagaaagtaaagcaaccattgcagaccttatcttaagtgccctcgaaagggccacagtgtttttagagcagaggcttcccgagatcaatcttgatgggatggtaggtgtccgggtcctggaagagcagctgaagtctgtgcgcgaaaaatgggcacaggagccgctactgcagcccctctctctgagggttggaatgctgggtgagaaattggaggcagcaatccagcgcagcctgcattacctcaagctatccgaccccaaatatctacgcgaatttcagctgacactccagcccggtttttggaaactgccccacgcttggatccacactgacgcaagtctagtttatcccacgttcggcccccaggatagcttctccgaggaacgttccgacgtgtgccttgtccagttgctaggcacggggacggatagctccgaaccctgtgggttatcggacctgtgccgatccttaatgactaaacctggctgttctggttactgcctgtctcatcaactgctctttttcctgtgggccaggatgcgcggctgtacccaaggaccactccagcagtctcaggattacatcaacctcttctgtgccaatatgatggatctcaacaggcgagccgaggccattggctatgcttaccctaccagagacatttttatggagaataatgtaaccggtcaccccgtattctacctccccctgtgcgattcatttctgcccccaaaggctgctccagtcacggagctgtacacggacgggcccgtaatgttctgtggcatgggtggatttagtgacttctataagttgaggtggctagaggctatcttatcctggcaaaagcagcaagaaggctgcttcggagagcctgatgccgaggacgaagaattgagtaaggccatccaataccagcagcatttcagccgccgggtaaaacggcgtgaaaaacagttcccagattcacgcagcgttgcccaggcaggtgtgcagtggcgcaatcttggatcccttcaacccctcccacccgggttcaaacagttctcatgtctgatcctcccttcatcgtgggactacaggtccgttccgccatatcttgcaaacttctacatctttctggttgaaactggcttccaccacgtggctcatgcaggcttggaattacttatttctcgcgacccaccaacaagtggatctcagagcgtgggactctag

SEQ ID NO: 8776 - DNA, 555 bp, synthetic construct
  misc_feature 1..555: note = source = /note="Description of Artificial Sequence: Synthetic coding sequence"
  source 1..555: mol_type = other DNA
atgatgagcttcctgctgggcgccatcctgaccctgctgtgggccccgaccgcccaggctgaggtgttgctccagcccgattttaatgcggagaaatttagcgggttatggtatgttgtgtccatggccagcgactgccgcgtgttcctgggtaaaaaagatcatctgagcatgtcaactcgggctataaggcctacagaggagggggggttacatgttcatatggagtttccaggagctgacggctgtaaccaagtcgatgccgagtacctgaaggtggggagtgaaggccacttcagggtacctgccctgggatacttggacgtccgaatcgttgatacggactactcatcttttgctgtgttgtatatctataaggagctcgaaggtgctctatccaccatggtgcagctatactctcgcactcaggacgtgagccctcaggccctgaagtccttccaagacttctatccgactctgggcttgccaaaggatatgatggtgatgttgcctcagtcggatgcctgcaacccagaaagcaaggaggccccttag

SEQ ID NO: 8777 - DNA, 219 bp, synthetic construct
  misc_feature 1..219: note = source = /note="Description of Artificial Sequence: Synthetic coding sequence"
  source 1..219: mol_type = other DNA
atgcagcggctggtgctgctgctggccatcagcctgctgctgtaccaagacttgccggtccggtcagagttcgagcttgacagaatctgcggttatgggactgcacgttgcagaaaaaagtgccgctctcaagaatataggatcgggcgctgcccaaatacttatgcttgctgcttaaggaagtgggacgaatccttgctgaatcgtacaaagccgtag

SEQ ID NO: 8778 - DNA, 2247 bp, synthetic construct
  misc_feature 1..2247: note = source = /note="Description of Artificial Sequence: Synthetic coding sequence"
  source 1..2247: mol_type = other DNA
atgggccgggccggcgccgccgccgtgatccccggcctggccctgctctgggctgttgggttgggcagcgcggctccacctccccgcctccggctctctttccaagaactgcaggcgtggcacggtctgcagaccttttccctggagcgcacctgttgctatcaggctctgttggtagacgaggaaagaggcaggctttttgtcggagctgaaaatcacgtggcatctctcaatttggacaatatttctaagcgcgcaaagaagctcgcttggcccgcccccgtggagtggcgcgaggagtgtaattgggccggaaaggatattggcaccgaatgcatgaacttcgttaaactactccatgcctataatcgaacccatttgctcgcctgtggcacaggagctttccacccaacctgtgccttcgtggaggttggtcaccgggccgaggagcccgtgctccgcctagatccaggtagaattgaggacggaaaaggcaagtccccctatgaccctcgccaccgcgcagcgagcgtcctggtcggggaggaactttactccggcgttgccgcagatctaatggggagggactttacaatcttccggtcgttgggacagagaccctctctccggaccgagccccacgactctcgctggctgaatgagcccaagtttgtaaaggtcttttggattccagaatccgagaatcctgatgatgataagatatacttcttctttcgggagacagctgtggaggcagcacctgccttgggccgactgagtgtcagccgcgttgggcaaatttgtcgcaatgatgtgggagggcagcgaagcctggtgaacaaatggacaaccttcctgaaagcaaggctggtctgcagcgtccccggggtggaaggcgatactcacttcgaccagcttcaggatgtgttcctgctttcctctcgagaccatcgcactcccctgctgtatgcggtgttctctacctctagttcaatttttcaaggatcggccgtctgtgtttactcaatgaatgacgtccgccgtgctttccttggcccatttgcacacaaagagggccctatgcaccagtgggtctcctatcagggccgtgtcccctaccctcggcccggcatgtgccccagtaagactttcggtacattcagttctaccaaggattttcctgacgacgtcattcagtttgctcggaatcacccactgatgtacaattcagtgcttcccaccggcggtcggcccctgttccttcaggtgggcgcgaattacacctttactcagatcgcagcagaccgggtcgccgccgcggatggccattatgatgtgctctttatcggaaccgacgtaggcactgtgctcaaagtaattagtgtgcctaaagggtccagacctagtgcagagggcctcctgcttgaggaactgcacgtattcgaggacagtgccgccgttacatcaatgcagatcagtagtaaacgccatcaactgtatgtcgctagtagatcggctgtagcccagattgctttgcaccggtgtgccgctcatgggcgggtctgtacagaatgttgtctggcccgagacccttactgtgcctgggacggtgtggcctgtactcggtttcagcctagtgctaaacgacgattcaggaggcaggatgttcggaatggagacccctccacgctgtgctcaggggatagctccagacccgccctgctggagcataaggtttttggggtcgagggaagctccgctttcctcgagtgcgagcccagatcgctgcaagccagggtagaatggactttccagcgggcaggggtcacagcccacacacaagtgctcgctgaggagcggacagagcgaacagccaggggcctccttctacgtcggctgcgcaggcgggatagcggtgtgtacctttgtgctgcggtggagcaaggtttcacccagccccttagaagactgtccctccacgtgctgagtgctacgcaggctgaaaggttggctcgcgcggaagaagccgctccagccgctcccccgggccccaaactctggtatcgagattttttacaactggtggagcccggagggggcgggtccgctaactcactccgcatgtgccgcccacagccagcattacaaagtctccctctggagtccaggaggaaaggccgcaatcggcggacccacgcccctgaacctagggctgagagggggccaaggagtgcaactcattggtag

SEQ ID NO: 8779 - DNA, 369 bp, synthetic construct
  misc_feature 1..369: note = source = /note="Description of Artificial Sequence: Synthetic coding sequence"
  source 1..369: mol_type = other DNA
atggtgctgctgtgcctgttcctggccagcctggccgccaccccccgggctggcgtgaccggagcctggccgacatccggcctctctattctggcacagctgcagccatcttgcgaactaagatggactcaattaagccggagtagctggcgcgaccttgtcatgacaacttccctgtggagcttggcctatttccaacacttttcgcaggagactacaacccaagaacagctggacgagatggaagagattcctagggagagccagtgcggacggcaggatttccacgccctttcgtgccctaccgccagcccccgggaccgggtgcttctgtgttgccccggttggcgtgccatggtgccctcctag

SEQ ID NO: 8780 - DNA, 570 bp, synthetic construct
  misc_feature 1..570: note = source = /note="Description of Artificial Sequence: Synthetic coding sequence"
  source 1..570: mol_type = other DNA
atgctgctgggccagctgagcaccctgctgtgcctgctgagcggcgcactgcctactgggagcgggcgaccagagcctcagagcccgcggcctcagtcgtgggctgctgctaatcagacatgggcccttggacctggcgctctgccaccactggtgcccgcttcagcgctagggtcttggaaggccttcttggggctccaaaaagcaaggcagctgggcatgggcaggctgcaacgaggacaagacgaagtggccgcagttaccttaccgttgaatccacaggaggtgatacagggcatgtgcaaggctgttccgttcgtgcaggtcttttctcgacccggctgttcggccatcagattacgtaatcatctttgtttcggccattgctcatctttgtatatacccgggtcagaccctacgcccttggttttgtgtaactcatgcatgccagcccgtaagcggtgggcccccgttgtgctgtggtgcctgacgggcagtagtgctagtaggagacgggttaaaatctcaacaatgctgattgaaggatgccattgctcccctaaagcgtag

SEQ ID NO: 8781 - DNA, 2505 bp, synthetic construct
  misc_feature 1..2505: note = source = /note="Description of Artificial Sequence: Synthetic coding sequence"
  source 1..2505: mol_type = other DNA
atgaagcacaccctggccctgctggcccccctgctgggcctgggccttggcctggcactgtctcagttggctgcgggggcaacagactgcaagttcctagggcccgcggagcacttaacattcaccccagccgctagggctaggtggcttgcccctcgggtaagagcacccggtcttcttgactcattgtatggaacagtaagaaggtttctgagcgtcgttcagctgaatcctttcccttcagagcttgtgaaggctcttctgaatgagctggcatccgtaaaagtaaatgaggtggtccgatacgaggctggatacgtggtctgcgctgtgatcgccggcctctacctgctccttgttcctaccgccggcttgtgcttttgctgctgcaggtgtcacagaaggtgtggcggcagagtcaagacggaacacaaagccctggcatgcgagcgtgctgccttgatggtgttcctcctgctgaccaccctcctgcttttgatcggggttgtctgcgccttcgtgaccaaccagaggacccacgaacaaatggggccctcaattgaggccatgccagagaccctcctgagcctttgggggttggtttccgacgttcctcaggaattgcaggctgtcgcccagcagttctctctcccacaggagcaagtatcagaggaacttgatggagtgggagtcagtattgggagcgctatccacacccaactgagatctagcgtctatcccctgttggcagcagttggcagtctaggccaggtgctccaggtgagtgtgcatcacctgcagacactaaatgccactgttgtggagctccaggcagggcagcaggacctggaaccagcgattcgggagcaccgtgaccgccttttagaactgctgcaggaagcaagatgtcagggagactgtgctggtgccctgagctgggcccggacgctggaactcggagcagacttctctcaggtcccaagtgtggatcacgtgctacaccagctgaaaggcgttcctgaagcaaacttcagttctatggtacaagaggagaactctaccttcaacgctctgccagctctcgccgcaatgcagaccagcagtgtagtgcaggagctgaagaaggccgttgcacagcagcctgagggtgtacggacgcttgctgaaggctttcctggattggaggctgccagcagatgggcccaggcactgcaggaagtcgaagagtcctcccgaccatatttgcaggaagtgcagcgctacgaaacctatcggtggatcgtcggatgtgtcctgtgctccgtggtactatttgtggtactgtgtaatctgctggggctcaatctgggaatatggggcttgagcgcccgcgatgatcctagtcacccagaggccaaaggggaggccggggcgagatttcttatggctggagtcggtttatcattcctttttgcagcccccctgatcctgcttgtgtttgctactttcctcgtggggggtaacgtgcagacccttgtatgtcaatcctgggaaaacggtgaactttttgaatttgctgatactcctgggaacctgcctccctcaatgaacctgagtcagttgctgggactgcggaaaaacataagtattcatcaggcatatcagcagtgcaaagagggggcggctctgtggactgttctccaactgaatgacagctacgacttggaagaacaccttgatataaaccagtacacaaacaaactgaggcaggaactgcagtcactgaaagtcgatacccaatccctggaccttctttcctctgcagcacggagggacctggaggctctgcaaagcagtggtttgcaaaggatccactacccggatttcctggtccaaatccaaagacctgttgtgaagacgagcatggagcaactggctcaggagctgcaaggcctcgcacaggcccaggacaacagcgtgctgggacagaggttgcaagaagaggcacagggactgaggaatctgcatcaggagaaggtggtcccccagcagtctctggtggccaagctgaatttatccgtcagggctctagagtcatccgctcccaacttacaattggaaacctccgacgtgctggccaacgtaacctacctaaagggcgaactgcccgcctgggcggcacggatactgcgcaacgtttcagagtgctttctggcccgcgagatggggtacttcagccagtatgtggcatgggtccgagaggaagtgacccagcgtatagctacctgtcagcctctctctggcgccctagacaattctagagtgatcctgtgcgatatgatggctgacccatggaacgctttctggttttgtctggcttggtgtacgttcttcctgatccccagcataattttcgccgtgaaaacctccaaatatttcagaccaatcaggaagcgtttatcttctacctccagcgaggaaacccagctgttccatatcccccgcgtgacatcattgaagctatag

SEQ ID NO: 8782 - DNA, 2505 bp, synthetic construct
  misc_feature 1..2505: note = source = /note="Description of Artificial Sequence: Synthetic coding sequence"
  source 1..2505: mol_type = other DNA
atgaagcacaccctggccctgctggcccccctgctgggcctgggcttgggcctagcgttatctcagctagcggcgggggctacagattgcaaatttttgggccccgccgagcacctgacattcacacccgccgccagggcgaggtggcttgccccccgcgtgagggcgcccgggctgctcgacagtctctatggtactgtgcggcgcttcctgtccgtcgtccagctaaacccatttccatctgaactcgttaaagctcttcttaacgaattggcctccgtgaaagtgaacgaagtggttcggtatgaggccgggtatgtcgtgtgtgcggttatagccggtctctatcttctgctcgtccctactgccggactgtgtttttgctgttgtagatgtcaccgaagatgtggcggtagagtaaagactgagcacaaagcactggcctgcgaacgggctgctttgatggtgttcttgctcttgaccaccctcctcctgctgattggagtggtgtgtgccttcgtgaccaaccagcgaacccacgagcaaatgggaccatccattgaggccatgcccgaaacccttctgtccctgtggggcttagtcagcgacgtgccccaggaactccaagccgtcgctcagcagttcagcttaccgcaggaacaggtctctgaagagctggacggtgttggagtgagcatcgggagtgccatccatacgcagctgcgcagttccgtgtaccctctgctcgccgcagtaggctctctgggccaggtcttgcaagtgtcagtgcaccacctgcagacattaaatgccacagtggtagagctgcaggcgggccagcaggatttagaacctgcaatccgcgaacaccgcgacagactgctggaactgcttcaggaggcacggtgccagggcgattgcgccggggcactgagctgggcacgaacgctggagctaggcgccgatttctcccaggtccctagcgtggatcacgtgttacatcagctcaagggagtgcccgaagcaaacttctcgtctatggtccaggaggagaacagcactttcaacgcactgcctgccttggcagccatgcagacatcctcggtggttcaggagttgaaaaaagctgtggctcagcagcctgaaggggttagaacgcttgccgaggggtttcccggtctagaggcagcatccagatgggcccaagcactgcaggaggtggaggaaagctcacgcccttacttgcaggaagtgcaacgatacgaaacttaccggtggattgtgggctgtgtcctctgctcggtggtacttttcgtggtgctctgtaacctgctgggcctcaacctcggaatttggggtctatccgcacgagatgatccctcccacccggaggccaaaggcgaggccggagctagattcctgatggctggcgttgggttgagcttcctatttgctgcccctcttattctcttggtctttgctacatttttggtaggtggaaacgtgcaaacgctggtgtgtcagagctgggagaatggcgagctgttcgagtttgcagacacacccggcaatctgcccccaagtatgaacttgtcgcagctcctgggcctgcggaagaacatctcaatccatcaggcttatcagcaatgtaaagaaggcgcagccttatggaccgtgcttcagctcaacgactcctatgatctggaagagcacctcgacatcaatcagtacacaaacaaactgagacaggaactgcagtccttaaaggtggacacacagtcccttgatctcctctcttctgccgcaaggcgggatctggaggcccttcagtcatccggattgcagcgaatacattatcctgatttcctggttcagatccaaaggccagtggtgaaaacctccatggagcagttggcgcaagagcttcagggcctcgcccaggcacaggacaattccgttctcgggcagaggctgcaggaggaggctcagggtttgcggaacttgcatcaggagaaagttgtgcctcagcagagcttagtggctaagctcaacttgagcgtcagggcactcgagtcatcagcacctaatctgcagctggagacatctgacgtgctcgctaatgtcacctacctgaaaggagagctgccagcttgggctgcacgcattctgcgcaacgtatcggagtgtttcttggctagagagatgggctacttctctcaatacgttgcatgggtgagggaggaggtgacgcagcgcatcgccacttgtcagcccctgagtggtgcgctggataactctagggtcatcctctgtgatatgatggccgatccatggaacgcattttggttctgcctggcatggtgtactttttttctgatcccgtccatcattttcgctgtgaagaccagcaagtatttccgacctatcagaaagagactgagcagcacgtcgtccgaagaaacccaactgttccacattccgcgtgtgactagcctgaagctttag

SEQ ID NO: 8783 - DNA, 216 bp, synthetic construct
  misc_feature 1..216: note = source = /note="Description of Artificial Sequence: Synthetic coding sequence"
  source 1..216: mol_type = other DNA
atgacccagctgctgctgttcctggtggccctgctggtgctgggccacgttccttcaggccgttcagagttcaaacgctgttggaaaggccagggagcctgtcagacctattgtactcgccaggagacttacatgcacctgtgcccagacgcatcactgtgctgtctctcctatgctctcaagcctcccccggtgccgaagcacgagtacgagtag

SEQ ID NO: 8784 - DNA, 1377 bp, synthetic construct
  misc_feature 1..1377: note = source = /note="Description of Artificial Sequence: Synthetic coding sequence"
  source 1..1377: mol_type = other DNA
atggaggccaccggcaccgacgaggtggacaagctgaagaccaagttcattagtgcttggaataatatgaagtactcatgggttcttaagaccaaaacatacttttctaggaatagcccggtcctgctactgggaaagtgttatcacttcaagtatgaagatgaggacaagacgctaccggctgagagtggctgtactatagaggatcacgtgattgctgggaatgtcgaggagtttaggaaagatttcatctcccgaatttggttgacttacagggaagagttccctcaaatagagggtagcgctttgacaaccgattgcggctggggttgtacacttagaactggtcaaatgctgctggctcagggcctgatccttcactttctcggcagggcctggacatggcccgacgccctcaacatcgaaaatagcgacagtgagagttggacctctcacacagtcaaaaagtttaccgcctcattcgaggcctcactgagcggagagagggagtttaaaacaccaacgatatctctgaaggagaccattggcaaatactcggacgaccacgaaatgaggaacgaagtctatcatcgaaaaattatctcgtggtttggcgatagccctctcgccctttttggtcttcatcaactcattgaatacgggaagaagagtgggaagaaagccggggactggtacgggcctgccgtcgtagcgcacattctgagaaaagccgtcgaggaagctagacatcctgacctacaaggaatcactatttacgtcgcccaagattgcaccgtctataatagcgacgtcattgacaagcagtctgcctcgatgacaagcgacaatgctgatgacaaagctgtaatcatcttagtgccggtgcggctcggcggcgagcgaacaaatactgattatctggagtttgttaaaggtattctctctctggaatactgcgtcggaataatcgggggcaagccaaagcaaagctactacttcgctggctttcaggacgacagccttatttacatggacccccattactgtcagagttttgtcgacgtgtctattaaagattttcctctcgagacgttccattgcccctctcccaaaaagatgtcattcaggaaaatggacccaagttgtactattggcttctactgtaggaacgttcaggattttaaaagggcatctgaagagattaccaagatgctgaagttctcatctaaggaaaaataccccctcttcaccttcgtcaacggacatagtagggattacgattttaccagcacaaccactaacgaggaagacttgttctcggaagacgagaagaagcagctgaagagattcagtactgaggaatttgtgcttttatag

SEQ ID NO: 8785 - DNA, 342 bp, synthetic construct
  misc_feature 1..342: note = source = /note="Description of Artificial Sequence: Synthetic coding sequence"
  source 1..342: mol_type = other DNA
atgcggcagcggctgctgcccagcgtgaccagcctgctgctggtggccctgctgttccctggaagcagtcaggcacgacatgtgaaccacagcgcaaccgaggccttgggtgagctgagggagagagctcccggacagggcactaatggatttcagcttctgcgccacgccgtgaaaagggatttgctccccccgcgcactccaccttatcaggaacccgccagcgatctaaaagttgtggactgtaggaggtcagagggcttttgccaggaatattgtaactacatggagacacaagtggggtactgctccaaaaagaaggatgcttgttgtctacattag

SEQ ID NO: 8786 - DNA, 258 bp, synthetic construct
  misc_feature 1..258: note = source = /note="Description of Artificial Sequence: Synthetic coding sequence"
  source 1..258: mol_type = other DNA
atgaagaaggtgctgctgctgatcaccgccatcctggccgtggccgtcggattcccagtgagccaagatcaagagcgagagaaaagatctatctccgatagtgatgaactcgcctctggcttcttcgtctttccctacccgtaccccttccggcccctcccccccatcccatttccgcgatttccctggtttcggagaaatttcccgatccctattccagaatccgcccccaccactcccctgccttccgaaaaatag

SEQ ID NO: 8787 - DNA, 264 bp, synthetic construct
  misc_feature 1..264: note = source = /note="Description of Artificial Sequence: Synthetic coding sequence"
  source 1..264: mol_type = other DNA
atggccgtgagcgtgctgcggctgaccgtggtgctgggcctgctggttctgtttctgacttgctatgcagacgataagcctgataaacccgatgataagcccgacgattccggaaaagatcctaagccagattttcctaagttcctttccctgctagggaccgagattatagaaaacgcagttgagtttatcctccggagtatgtctaggtctacaggtttcatggaatttgatgacaacgagggaaagcactcatcgaagtag

SEQ ID NO: 8788 - DNA, 945 bp, synthetic construct
  misc_feature 1..945: note = source = /note="Description of Artificial Sequence: Synthetic coding sequence"
  source 1..945: mol_type = other DNA
atgagcagcgaggccgagacccagcagccccccgccgccccccccgcagcacctgcgctgagtgctgcagacacaaaaccaggaactacaggtgctcaaggggcagtcgcccgcgcacatattggcggcgccggtggggacaaaaaggtgatcgccaccaaggttctggggaccgtgaaatggttcaacgttaggaatggatacggatttataaacagaaatgacaccaaggaggacgtgtttgtccaccagaccgccatcaagaaaaacaatcctaggaagtatctgagatccgttggcgacggagagaccgttgagtttgatgtggtcgaaggcgagaagggagccgaggcagccaatgtaaccggccctgggggcgtccccgtccaaggctctaagtacgccgcagacaggaaccactatcggcgttacccgagaaggcgaggaccacctcgcaattatcaacagaactaccaaaatagcgagtctggagagaagaatgaggggagtgaaagcgcgcccgagcgacccaataatgccggacctcaggctaaagtgccaacattactgcacgccgagtatggacgaaggccacagtatagcaatccccccgtgcagggagaggtgatggaaggagctgacaatcagggtgccggcgaacaaggcaggccagtccggcagtgcataggggacatcgatcacgactccgccggcgcactcttggctaggcagccaagagaagacggcaatgaagaggataaggagaaccagggggatgaaacccagggacagcagccccctcagagacgatacaggcggaactttaattacagaagacgaaggcccgagaatccaaagccacaggacggcaaggagacaaaggcggctgatccaccagccgaaaattctagcgcccctgaagcggaacaaggcggcgcagaatag

SEQ ID NO: 8789 - DNA, 636 bp, synthetic construct
  misc_feature 1..636: note = source = /note="Description of Artificial Sequence: Synthetic coding sequence"
  source 1..636: mol_type = other DNA
atggtgttcctgaagttcttctgcatgagcttcttctgccacctgtgtcagggatatttcgatggaccgttgtatcccgagatgtccaatggtaccctgcatcactattttgtacctgacggcgactacgaggagaatgacgatcctgagaagtgccagctgctatttcgtgtcagtgatcaccgcaggtgttcccagggcgaggggtcgcaagttgggagcttactttccctcactctgcgagaagagtttacggtgctgggccgacaagttgaagacgcaggacgagtgcttgaaggaatttcgaagtcgatttcctacgatttagacggggaggagtcttacggtaagtatctccgacgggagagtcatcagataggagacgcctacagtaacagcgacaagtcactgactgagctggagtcaaaattcaaacagggccaggagcaggactcaagacaggaatccaggctgaatgaggattttcttgggatgcttgtgcatactagatctctccttaaagagactctggatatatcagtgggactgagagacaaatatgaactcctcgccctgacaattcggagccatggcaccaggctcgggagactcaagaacgactatctcaaggtttag

SEQ ID NO: 8790 - DNA, 1566 bp, synthetic construct
  misc_feature 1..1566: note = source = /note="Description of Artificial Sequence: Synthetic coding sequence"
  source 1..1566: mol_type = other DNA
atgctgtgcgccctgctgctgctgcccagcctgctgggcgccacccgtgcaagcccaacttctggccctcaggaatgcgccaaaggctcaacagtttggtgccaggatcttcagaccgcagcccggtgcggggccgtaggctactgccaaggcgccgtgtggaataagccgaccgccaaatctctaccgtgtgacgtctgccaagacattgcagcagcagcaggtaacgggttgaaccctgatgctactgaatctgatatcctggcactggtaatgaagacctgcgaatggctaccgtcccaagaatcctcagctgggtgcaagtggatggtggatgcacattcatctgcaatcctctcaatgctgcggggcgctccggactccgcccctgctcaggtctgcactgcactgtccctctgtgaaccgctgcagcggcacctggcaaccctccgcccgctgtctaaggaggatactttcgaggccgtggctccctttatggcgaatgggccgctcacattccacccccgccaggcccccgaaggagctctctgtcaggactgcgtcaggcaggtgtctcgactccaagaggccgtgaggagcaaccttacgcttgccgacctgaacattcaggagcaatgcgagtcattaggaccaggcctcgctgtcctatgtaaaaactatctttttcagttcttcgtgcccgccgaccaggctttgcggctcctcccccctcaggagctatgtcgaaagggaggattctgtgaggagctcggggcccccgctagattaacccaggtggtcgcaatggacggcgttccctcattagagctgggccttccccggaagcagagcgaaatgcagatgaaagctggggtcacgtgcgaggtgtgtatgaacgtcgtccagaagctcgaccactggctgatgtccaattcctcagaactcatgatcacccatgccctagaacgggtgtgttcggttatgcccgctagtataactaaagagtgtataattctggtggatacttactccccgagcctcgttcagctggtagccaagataactcccgagaaggtgtgtaaatttatcagactttgcgggaatcgaaggagagccagagctgtccacgatgcttatgccatcgttccaagtcctgaatgggacgctgaaaatcaggggtcattttgcaacggctgtaagagacttctgactgtctcctctcacaatcttgaaagtaaatcaactaagagagacatactggtggcctttaagggcgggtgttctattctgcccctgccctacatgatccaatgcaaacacttcgttacacagtacgaacctgtgctgatcgagtctttaaaagatatgatggatccagtcgccgtttgcaaaaaggtgggggcctgtcatggtccccggactccacttctggggactgaccagtgcgccctgggccctagtttttggtgtcgttctcaagaagccgccaagttgtgcaatgctgtacagcactgtcagaagcatgtctggaaggagatgcatctgcacgcaggagagcatgcatag

SEQ ID NO: 8791 - DNA, 2127 bp, synthetic construct
  misc_feature 1..2127: note = source = /note="Description of Artificial Sequence: Synthetic coding sequence"
  source 1..2127: mol_type = other DNA
atggccgccgccgccgtggccgccgccgccgccgccgccgccgccgcatccctgcaggttttggaaatggagtccatggagaccgcagcagctggaagcgcgggtctggctgctgaggtaaggggtagcggcacagttgatttcggaccgggtccaggaattagcgcaatggaggcttccggcggagatcctgggcccgaggctgaagactttgagtgctcaagtcactgttctgagctgagctggcgccaaaacgaacagagacgccaaggattgttctgtgacatcacactatgtttcgggggtgccgggggcagggagttcagggcccaccgcagtgttctcgccgccgcgactgaatattttacacctctgttgagcggacagttcagcgaaagccggagcggcagagttgagatgagaaagtggtctagtgaacctggaccagagcctgatacagtggaggcggtgatagaatatatgtatactgggaggattagggtgagtactggaagcgtccatgaggtgcttgagcttgccgaccgatttctccttatccggctgaaagagttctgtggggagttccttaaaaaaaagctgcacctgtcaaattgtgttgcaatccacagtctcgctcatatgtacaccttaagtcagctggccctcaaagccgctgacatgataaggcggaattttcacaaagtgattcaggatgaagaattctatacgctgccattccatctcatccgcgactggttgtccgaccttgagataacggtggacagcgaggaagttctgtttgagacagtcttaaagtgggtgcagcgtaatgccgaagagcgcgagcgatacttcgaagagctcttcaagttgctgaggctgagtcaaatgaaaccaacatatctcacacggcatgtaaaacctgagcgccttgtcgccaataacgaagtgtgcgttaaactggtcgcagacgccgtggagaggcacgccctgagggccgaaaacattcagagtggaacctgccagcatccaacttcacacgtgtccctcctcccccgttacggacaaaatatggatgtaataatggtcatcggaggagtctcagaaggaggggattacctgagcgaatgcgtcggttactttgtggatgaagaccgctgggttaatcttccccatatccataaccacttagacggccatgcagtcgcggtgaccgagtcatatgtctacgtggctgggtccatggaacccggcttcgccaagaccgttgaaaggtacaatcctaatttgaacacctgggaacatgtgtgctcattaatgaccagaaaacattcttttggactcacagaggtgaagggaaagctctactcaataggaggccacggaaatttctcccccgggttcaaagatgtcactgtctataaccccgagctcgataagtggcacaacctcgaatccgcacccaagattctgcgggatgtgaaggcccttgccatcgaggacaggttcgtctatattgccgccagaaccccagtggatagggatactgaagacggactgaaggcagtgatcacgtgttatgatacagagactaggcaatggcaggatgtcgaatctctgcccctcattgataattactgcttctttcaaatgagcgtggtgaattctaatttttatcaaaccgcgagctgctgtcccaaatcctactgtctcgaaaatgaggaggccgtgagaaaaattgcatcccaggtaagtgatgaaatcttggagtccctgcctccagaggttctgtccatagagggcgccgccatttgctattacaaggacgacgtgtttatcattgggggttggaaaaactccgatgacatcgacaaacaataccggaaagaagcttacaggtactgcgctgagcgcaaacgatggatgttgctccctcccatgccccagcccaggtgcagggctacagcctgtcacgttaggattccttacaggtacctgcacgggactcagcgctatccaatgccacagaatctgatgtggcagaaggaccgaatccgccagatgcaggagatccacagacatgccctgaatatgagacgcgtgccctccagtcaaattgagtgttag

SEQ ID NO: 8792 - DNA, 1578 bp, synthetic construct
  misc_feature 1..1578: note = source = /note="Description of Artificial Sequence: Synthetic coding sequence"
  source 1..1578: mol_type = other DNA
atgagcggcaactgggtgcaccccggccagatcctgatctgggccatctgggtgctcgctgcacctacaaaggggccttccgcggaaggccctcagaggaatacaaggctggggtggatccagggaaagcaggttactgtgcttgggtcgcccgtgcctgtgaacgtcttcttaggggtgccgttcgcggctcctccactcggcagccttaggtttactaatccccagcctgcctctccttgggacaacttgagggaagcgacatcatatcctaacctgtgcttgcagaactcagaatggctgctgctggaccagcatatgctaaaagtgcattatcccaagtttggtgtttccgaggattgtctctatctgaatatatacgcccctgcccacgcggatacaggtagtaagttgccagtgctggtttggttcccagggggcgcattcaagacaggatctgcctccatttttgacgggagtgctctggccgcctacgaggatgttctggtcgtcgtcgtgcagtatcggctggggatctttggattctttaccacatgggatcagcatgcaccgggtaactgggcgtttaaggatcaggtggctgctctcagctgggtgcaaaagaatatagagttctttggtggcgacccctcttctgtgaccatctttggggagtcagcaggagccatttcagtatcttcactgatcctgagccctatggcaaagggactctttcataaggcaattatggaatccggcgttgcaatcataccctatttagaagcccacgactatgaaaagagtgaggatctgcaagttgttgctcatttctgtggcaacaacgcctccgactctgaggccctgctgaggtgcctgcggaccaagcctagtaaggagctgttaactctcagtcaaaagacgaagagctttacacgggtggtggatggcgcattttttcccaacgagccactagatttgctctcccaaaaggcttttaaagcaattccttccatcattggggtcaacaatcatgaatgcggctttctgctccctatgaaggaagccccagaaattctgtcaggttcaaacaagagtctggcgctgcatctcattcaaaatatcttgcacattcccccacaatacctgcacttagtagcaaatgagtactttcatgacaaacacagtctgacagagatccgcgattcactgctagatctcctgggagacgtattcttcgtggtgcccgccctgatcactgctcgataccatcgagagggtgctaccgaagaggagaagctcttaagtcgaaagatgatgaagtattgggcaacgttcgctaggactggaaaccccaatgggaatgatttgtccctgtggcccgcatacaatcttactgaacagtatctacagctggacctgaacatgagcctcggtcaacggctgaaagaaccgagggttgatttctggaccagtacgatacctttgattctgagtgcctcagacatgctgcattctcctctgtcaagtctgaccttcttgtccctgcttcagccatttttcttcttctgtgccccctag

SEQ ID NO: 8793 - DNA, 900 bp, synthetic construct
  misc_feature 1..900: note = source = /note="Description of Artificial Sequence: Synthetic coding sequence"
  source 1..900: mol_type = other DNA
atggtgcggtgcctgggccccgccctgctgctgctgctgctgctgggctccgcttcaagcgtgggagggaatagatgtgtcgatgccgccgaagcctgtactgccgatgcacgatgtcagagactcaggtcggagtacgtggctcagtgtctagggcgcgctgctcaaggcggatgcccaagggctcgctgcaggagggctcttcgtcgcttctttgccaggggacctcctgctttgacccacgccttactgttctgtccatgcgccggccctgcttgcgctgagcgtcgtaggcagaccttcgtccccagttgcgcattttcgggtcccggacctgcgccaccatcctgcttagagcccctgaacttctgcgagcggtccagagtctgtcgatgtgcgcgcgcagccgccggtccctggagaggatggggccgaggtctgtcccctgcgcataggccaccagccgcacaggcatccccaccagggctttctggcctagtccacccatccgcacaacgacctagaagattgcccgccggacccggccgccccctccctgcaagactacggggaccccgaggagttcccgccggcactgcggtcacgcctaactacgtggataacgtctccgcccgggtggccccttggtgcgactgcggtgcttccggcaataggagggaggattgcgaagcattcaggggacttttcacaagaaacaggtgtctggatggggccatccaggcttttgcttcaggatggccccccgttttgctggatcagctgaacccgcaaggtgacccggagcacagcctgttacaggtgtccagcaccggccgtgcccttgagaggcgttcgttactgagcattctgccagtgctcgcgctccctgccttgctgtag

SEQ ID NO: 8794 - DNA, 270 bp, synthetic construct
  misc_feature 1..270: note = source = /note="Description of Artificial Sequence: Synthetic coding sequence"
  source 1..270: mol_type = other DNA
atgcaggcctgcatggtgcccggcctggccctgtgcctgctgctggggcccctggctggggccaagcctgtccaagaagaaggggatccttacgcagaactgcccgcaatgccttattggccattctcaacatccgacttttggaattatgtacagcacttccaggctctgggagcttatcctcaaatagaagacatggcaaggaccttctttgcccatttccctttgggcagcacacttggcttccatgtgccttaccaggaggattag

SEQ ID NO: 8795 - DNA, 663 bp, synthetic construct
  misc_feature 1..663: note = source = /note="Description of Artificial Sequence: Synthetic coding sequence"
  source 1..663: mol_type = other DNA
atggccagcgagcggctgcccaaccggcccgcctgcctgctggtggcatccggagcagctgaaggggtgagcgcccagtcctttctgcattgcttcaccatggccagcactgccttcaacctgcaggtggccactcccggtggcaaagcaatggaattcgtggatgtgaccgagagcaatgcccggtgggtgcaggatttccgcctgaaagcttacgcctctccagcgaagctcgagtccatcgacggcgcccggtaccacgctctccttattccgagctgtccaggcgcgttgactgatctagcctcttctggatcactggcccgcatcctgcagcattttcactctgagtccaaaccgatctgcgcagtgggccacggcgtcgccgctctttgctgtgccaccaacgaagaccgcagttgggtgttcgattcttactccctgaccgggccatctgtttgtgagttagtcagggcaccaggctttgcacgcctacctcttgtggtggaagatttcgttaaagatagtggggcctgtttcagcgcatcggagcccgacgccgtgcatgttgtgttagatagacacctcgtcaccggtcagaacgcttccagcaccgttccagccgtacagaatttgctgtttctgtgcggatcacgtaagtag

SEQ ID NO: 8796 - DNA, 1158 bp, synthetic construct
  misc_feature 1..1158: note = source = /note="Description of Artificial Sequence: Synthetic coding sequence"
  source 1..1158: mol_type = other DNA
atgtggggcttccggctgctgcggagcccccccctgctgctgctgctcccccagctgggcattggcaacgcatcatcgtgcagccaggcacgtacaatgaaccctgggggaagcgggggcgcccggtgcagcttaagcgcagaggtgcgcaggcgacaatgtttacagttgtccactgtaccgggtgcagacccacagaggtctaacgaattgctattactagccgcagccggagaaggcctggaaaggcaggatctccccggtgaccccgctaaagaggaaccacagcctcccccccagcaccatgtgctgtactttccaggcgacgtgcagaattaccacgagataatgacaagacatcctgagaattatcagtgggagaattggagcctggaaaatgtggctacaatcctggcgcaccggttccctaattcctatatctgggtcattaaatgtagtcgcatgcacctgcataaattttcttgctacgataattttgtcaaatctaacatgtttggcgccccagaacataatactgactttggggcctttaaacacttgtatatgctgcttgtgaacgccttcaacctatcccagaacagtctgagcaaaaagagcctgaatgtgtggaataaggattcaatcgcaagcaactgccgctcttctccctcccatactaccaacggctgccaaggcgagaaggtaaggacatgcgagaagagcgacgagagcgcgatgtccttctaccctccaagcctgaatgacgcaagttttacccttataggattttctaagggctgtgtggtccttaaccagcttttgtttgagctgaaggaggccaaaaaagacaagaatattgacgctttcatcaagtctattaggaccatgtattggttggacggcggccactcaggaggttccaacacctgggtgacttacccagaagtgctgaaggagtttgcccagacgggaataattgtgcacactcatgtcaccccgtatcaggtgcgggatccaatgcggtcatggattggtaaagagcacaagaagttcgtccagattctgggagaccttgggatgcaggtcaccagccaaattcattttactaaggaagcgccaagtatcgagaaccactttagggtgcacgaagttttttag

SEQ ID NO: 8797 - DNA, 936 bp, synthetic construct
  misc_feature 1..936: note = source = /note="Description of Artificial Sequence: Synthetic coding sequence"
  source 1..936: mol_type = other DNA
atgcggggcgccgcccgggccgcctggggccgggccggccagccctggccccggccaccagcacctggacccccaccaccaccgttacctctgctcttgttgctactcgccggtctgcttggcggcgcgggagcccagtactcatcggatcggtgctcttggaaaggatccggattgacccacgaggcccatcgcaaagaagtggagcaggtctacctgcgttgtgcggccggggccgtggaatggatgtaccctactggcgctttgatagttaacctgagacccaacaccttcagtcctgcccgtcacctcaccgtgtgcattcggagttttacagattcatctggagccaatatttatttagaaaagaccggcgaactgaggctacttgtccccgacggcgatgggcggccaggccgagtccagtgtttcgggctggagcagggcgggttgtttgtcgaagccactccccaacaggatatcggcagacggacaacgggatttcagtacgaactagtgaggcggcaccgggccagcgacctccacgaactcagtgccccctgtagaccctgtagcgacactgaggtgctgctggcagtgtgcaccagtgacttcgccgtaaggggctcaattcagcaggtgacccacgaacctgagagacaggattctgctattcaccttcgcgtctctcgcctctatcgccaaaaaagcagagtgttcgagccagttcccgaaggtgacggccactggcagggaagggtgaggacccttttagaatgtggagtgcggcctggccatggggacttcctgttcacgggccacatgcacttcggagaagcacgcctgggctgtgcacctagatttaaggattttcaacgcatgtacagggacgcccaggagcgtggccttaacccctgtgaggtggggaccgactag

SEQ ID NO: 8798 - DNA, 1221 bp, synthetic construct
  misc_feature 1..1221: note = source = /note="Description of Artificial Sequence: Synthetic coding sequence"
  source 1..1221: mol_type = other DNA
atgggccccagcacccccctgctgatcctgttcctgctgagctggagtggtcctctgcaggggcagcaacaccatttggtcgaatacatggagcggagacttgctgccctggaggagcggctcgcacaatgtcaggaccagtctagtcgccatgctgctgagttaagagacttcaaaaataagatgctgcccctattagaagtagcagaaaaggaaagagaggcgctgcggactgaggccgacaccatatctggccgcgttgatagactggagagggaagtggattacttggagacacagaatccagctctgccttgcgtggagtttgacgagaaggttacaggcggtcccgggaccaaaggtaaaggccgtcgcaatgagaagtacgacatggtgactgattgcggctatacaatctcccaggtgcggagcatgaaaatactgaaaaggttcggaggtcctgccggcctatggacaaaggatccactggggcaaacggaaaagatttacgtcctggatggcactcagaacgacacagctttcgtcttccctcggctgagagattttacactggccatggccgcaaggaaagcatcccgcgtgagggtccccttcccctgggtgggcacgggacaacttgtttatgggggatttttatacttcgcccgtcggccaccggggcgccctggggggggaggggaaatggaaaatacacttcagctcattaagtttcacctggccaaccgcaccgttgtcgacagttctgtgtttcccgctgagggcctgatcccaccctatgggctgactgccgatacatacatcgacctcgccgccgatgaggagggcctgtgggcagtgtacgccacacgcgaggacgaccgacacctgtgcttagcaaagctagatccgcaaactcttgataccgagcagcagtgggatacaccctgcccccgcgagaatgcggaagccgcttttgtgatatgtggtactctgtacgtagtatataatactcgacctgcttcccgcgcacgaattcagtgttctttcgacgcttctggtacactaacacccgagcgcgccgcactgccctactttccacgaaggtacggcgcccacgcttccctcaggtacaacccccgtgaaaggcagttgtacgcatgggatgacggataccaaattgtctacaaacttgagatgcggaaaaaggaggaggaggtgtag

SEQ ID NO: 8799 - DNA, 900 bp, synthetic construct
  misc_feature 1..900: note = source = /note="Description of Artificial Sequence: Synthetic coding sequence"
  source 1..900: mol_type = other DNA
atgggcggcccccgggccctgctggccgccctgtgggccctggaggcggctgggacagctgcactgaggataggggccttcaacatccagagtttcggggattcaaaggtcagcgatcctgcctgcgggtccatcatcgcgaaaatccttgccggctatgacctcgcactcgtgcaggaggtccgcgatccagatctttctgctgtatctgcccttatggagcagatcaattctgtgtctgaacacgagtactcattcgttagtagccagcctttgggacgggaccagtataaggagatgtacctgttcgtctaccggaaggatgcggtgtcagtggtcgacacatatctctatccagacccggaagacgtgttctcccgggaaccatttgttgtgaaattttcggctcccggaaccggggagcgcgcccccccacttccctcccgacgggctctcactccacctcccctccctgcagctgcccagaacctcgtgcttattccactgcacgcagcaccacatcaggcggtcgcggaaattgacgcactgtacgacgtgtatctggacgttatcgataagtgggggaccgacgatatgctgtttttgggcgatttcaacgctgattgctcctatgtgcgcgcacaggactgggctgccatccggctgcgatcctcagaggtgtttaagtggcttatccctgatagcgctgatacgactgttggaaacagcgactgtgcctacgaccgtatcgtggcatgcggagcccgtcttagacgcagcctcaaaccccagtctgcgaccgttcacgattttcaggaggagtttggactggaccagacacaggcattggcaatctcagaccacttcccagtcgaggttactctgaaatttcaccgctag

SEQ ID NO: 8800 - DNA, 1617 bp, synthetic construct
  misc_feature 1..1617: note = source = /note="Description of Artificial Sequence: Synthetic coding sequence"
  source 1..1617: mol_type = other DNA
atgggctgcctgtggggcctggccctgcccctgttcttcttctgctgggaagttggcgtgtcaggttctagcgccggacccagcaccaggcgggccgacaccgccatgaccacggacgacactgaagtcccggctatgacgctggcacctggccacgccgcccttgagacccagactctgagtgccgagacatcatcacgggccagcacacccgccggccccattcctgaggcagaaaccaggggggcaaaacgcatttcacctgctagggaaactagaagttttacaaaaacttcgcctaactttatggtccttattgcaacatccgtggaaacctccgccgcctcaggttccccagagggcgcagggatgacgactgttcaaacgatcactgggtctgatccccgtgaggccatctttgacactctgtgtacagacgattctagcgaagaggccaaaactctgaccatggacatcctgacactagcgcacaccagtacagaggcgaaggggctgagcagcgaatcttcagctagttcagattccccgcacccggtcatcacacccagccgtgcctcagagagcagtgcttcttcagacggccctcatcctgtgatcacgccgagcagagcctctgaatcttcggcctcgagcgacggcccgcaccctgtgataacaccttcctggtcaccgggtagcgatgtcacacttttagccgaggcactagtgacagtaactaacattgaagtgatcaactgttccattacagaaatcgaaaccacaacgagttccattccaggtgccagcgacacagacctgattcccacagaaggcgtcaaagcgtcctccacgtcggaccccccggccctgccagattcgacggaagcaaagccacatattactgaggtgaccgccagcgcggagactctttccacggcgggaacaaccgagagtgccgctcccgacgccacggttggtacgcctctgcccaccaattccgcaacggaacgcgaagttaccgctcctggtgccacaacattatcaggcgctcttgtgaccgttagtcgcaaccccttagaagagaccagtgctctttcagtggagactcccagttatgtgaaggtatctggcgcagctcctgtgtccatcgaggctggatccgcagttggcaagacaaccagcttcgcgggtagtagcgcctcgtcctactctccaagcgaagccgccctgaagaatttcacacctagcgagactccaactatggatattgcaacaaaaggcccattccctacttcacgggatccgctgcctagcgtccctccgaccacaactaacagcagccgtggaactaatagtacccttgccaagatcacgactagcgccaaaaccaccatgaagccccctaccgccacccccactaccgcccggaccagaccaaccacagacgtgagtgcaggtgaaaatgggggcttcctattgttgagactgtcagtcgccagccccgaggatctgacagacccgagagtagcagagaggctcatgcaacagctccatcgcgaattgcatgcacatgccccacattttcaggtgagtcttctccgggtaaggcgtggatag

SEQ ID NO: 8801 - DNA, 975 bp, synthetic construct
  misc_feature 1..975: note = source = /note="Description of Artificial Sequence: Synthetic coding sequence"
  source 1..975: mol_type = other DNA
atgagcagcgaggccgagacccagcagccccccgccgccccccccgctgctccagccctgagcgccgctgacactaaacctggaacaactggtagcggagctgggtctggaggaccaggaggcttaacgagcgccgcaccagctgggggggataagaaggttattgcaaccaaggtgctgggcactgtgaaatggttcaatgttaggaatggttacggcttcatcaataggaacgacactaaagaggatgtgttcgtccatcagacagccattaagaaaaataaccctcggaaatacctacggtcggttggcgatggtgaaactgtggagtttgacgtggtggaaggcgaaaaaggggctgaggccgccaatgtaaccggacctggaggcgtccccgtgcaggggtcaaaatatgccgcagatcggaaccactatagaagatatccccggagacgcggccctcctcgtaattaccaacagaactaccagaattccgaatctggcgagaagaacgaagggtctgaaagcgcacctgaaggtcaggcacaacagagacgcccttaccgccggcggcgcttccccccttattacatgagaaggccgtacggccgcaggccacagtattccaaccctcctgtgcagggcgaggtcatggagggcgccgacaaccagggcgccggcgagcagggaagaccagtccgacaaaatatgtacaggggataccgcccgagattccgccggggacctccccggcagcgacaaccacgcgaggacgggaacgaagaagacaaggaaaaccagggggatgagacacagggccaacagcccccacagcgcaggtacaggagaaatttcaattacagacggaggcgccctgaaaatccgaaaccacaggacggcaaggaaactaaggcagcagatcccccagcagaaaatagctcagcccccgaggccgagcagggaggcgcagagtag

SEQ ID NO: 8802 - DNA, 210 bp, synthetic construct
  misc_feature 1..210: note = source = /note="Description of Artificial Sequence: Synthetic coding sequence"
  source 1..210: mol_type = other DNA
atgcggatcttctactacctgcacttcctgtgctacgtgaccttcatactaccagcaacttgtacactggtaaatgcggatcggtgtacaaagcgctacggacgctgcaaacgcgactgtctcgaaagcgagaaacagatcgatatttgttctttgccccggaagatttgctgcacagagaagctgtatgaggaggatgacatgttctag

SEQ ID NO: 8803 - DNA, 342 bp, synthetic construct
  misc_feature 1..342: note = source = /note="Description of Artificial Sequence: Synthetic coding sequence"
  source 1..342: mol_type = other DNA
atgaagctgctgaccaccatctgccggctgaagctggagaagatgtattctaagaccaatacatcctccactatatttgagaaagcgagacacggaacagaaaagatcagcactgcccggagtgaagggcatcacattacctttagtcgatggaaatcctgcaccgcaatcggtggcaggtgtaagaatcagtgcgacgactcagaatttcgcattagctactgtgcacgcccaacaactcattgctgcgttaccgaatgtgatccaaccgatcctaacaattggattcccaaggattccgtaggaacccaggagtggtatccaaaggactcgaggcactag

SEQ ID NO: 8804 - DNA, 3030 bp, synthetic construct
  misc_feature 1..3030: note = source = /note="Description of Artificial Sequence: Synthetic coding sequence"
  source 1..3030: mol_type = other DNA
atggacctgatccggggcgtgctgctgcggctgctgctgctggccagtagcttagggcctggggctgtaagcctcagggccgctattaggaaaccaggcaaagtgggcccgccgctggatataaagctcggcgccctgaattgcaccgcgttctctatccaatggaaaatgcctaggcacccaggcagccccatcttgggatatacagtgttttactccgaagtgggagctgacaagtctctgcaggaacagctccattccgttcctctttcccgtgatatcccaaccaccgaagaggtgatcggcgacctgaagcccggcactgagtaccgagtctcaatagccgcctactctcaagctggcaagggaaggctgagttcccctaggcacgtcaccacgttatcccaggatagctgcctccccccagccgcacctcagcagcctcacgttatcgtagtgagtgattcggaagtcgcactttcctggaagccaggggcgtctgaggggagcgcacccatccagtactactcggtcgaattcatccgtcctgattttgataagaaatggacgtcaatccatgagcgcatccagatggacagcatggtgataaagggacttgaccccgacaccaattaccagttcgctgtcagggccatgaatagccacgggccatcgccccgttcctggccatccgatatcatcagaactctctgcccagaggaggctggctccggaaggtacggacctcgttatattaccgatatgggtgccggcgaggatgatgagggcttcgaggatgacctcgatttagatatttctttcgaggaagtgaaaccccttccagccaccaaaggtggtaacaagaagttcctcgtggaatcaaaaaaaatgagtatctctaacccaaaaaccataagtcgtctgatcccccccacaagcgccagccttcccgtgactaccgttgccccccagcccattcctatacagaggaaaggaaagaacggagtggcaattatgtctcggcttttcgacatgccttgcgacgagaccctttgtagcgctgatagcttctgcgtcaatgattacacatggggaggatcccggtgccaatgcacgttgggaaaagggggagaatcctgttctgaggatatcgtaattcagtacccgcagttctttgggcattcttatgtgacctttgaacctttaaaaaatagttatcaggcattccagatcactttggagttccgagctgaagcagaggacggtttactcttatactgtggagagaatgagcacggaaggggcgactttatgagcttggctataattaggagaagcctccagtttcggtttaattgcgggaccggggtggctattattgtttcagaaacaaagattaaattgggcgggtggcacaccgtgatgctgtacagagatggtctgaatgggctgcttcagttgaataacggaaccccggttactggccagtcccagggccagtactctaagattacattcagaacaccgctgtaccttggcggcgccccctccgcatactggctggtgcgtgctaccggcaccaatcggggatttcaagggtgcgtacagtcccttgccgtgaatggccgaagaatagatatgcgtccatggcctttgggaaaagccttatctggggctgatgtgggggagtgctctagcggaatttgtgacgaagcgtcatgcattcacggcggcacttgtaccgccattaaggcagatagctacatatgcctgtgcccccttggattcaaaggacggcactgcgaggatgcctttactctgactataccccagtttcgtgagagcttgagaagttacgctgccactccgtggcccctcgagccacagcattatctaagcttcatggagtttgaaatcacctttaggccagacagcggggatggggtattattatatagctatgacaccggctctaaggactttctatccattaatttagctggcggtcacgtagagtttcgcttcgattgcggtagtgggaccggggtgcttcgctccgaggatcccctgaccctcggaaattggcatgagctgcgggtgtctagaacagctaagaatggtatactacaagttgacaagcagaagattgtcgagggcatggccgaagggggattcacccagatcaagtgtaacacagatatatttattggcggagtgcctaactacgacgacgtaaaaaaaaattctggcgtcctcaaacctttttctgggagcattcagaaaatcattcttaacgataggacgattcatgtcaagcacgatttcactagcggggttaatgtggaaaatgctgcacatccatgcgttcgggctccctgcgcgcatgggggctcgtgcaggcctaggaaggaaggctatgactgcgactgcccactcggcttcgaaggcctccactgccagaaggccatcattgaggccatcgagatcccacagtttattggacgaagttatctgacatatgacaacccggatatactgaaacgtgtgagcgggagtagatctaacgtgttcatgagattcaagaccactgctaaggacgggctgttgctctggcgcggcgactcccctatgaggccaaactctgacttcatctcccttggtctgcgggacggtgctctggtgttcagctacaacctaggctcaggcgtggccagcataatggtaaacggaagcttcaacgatggtagatggcaccgggtgaaagctgttcgagacggccagtcagggaaaatcacagtggacgactatggggctcgaactggaaagtcccctggcatgatgaggcagctgaatatcaacggggcactctatgtcggaggcatgaaggagatcgcgctccacacgaataggcagtatatgcggggcctggtgggctgcatcagtcactttacactcagtaccgactaccatatatccctggtggaggacgctgtggatgggaagaatattaacacctgcggagcaaagtag

SEQ ID NO: 8805 - DNA, 1272 bp, synthetic construct
  misc_feature 1..1272: note = source = /note="Description of Artificial Sequence: Synthetic coding sequence"
  source 1..1272: mol_type = other DNA
atgagcgtgcggggcatcctgcggctgggcacccaggagtaccccagcccgcttgatcccgaggtaggcccgtactgtgacaccccaaccatgaggacactgtttaacctgctgtggctggccctagcgtgctcccccgttcacaccaccctctccaagagcgacgccaagaaagctgcgagcaagactttgctggagaaaagccagttctcggataagccggtacaggaccgtgggctggttgtgacagacctgaaggctgaatcagtggtgctcgagcacaggtcttactgctcagcaaaggctcgtgaccggcactttgccggggacgtgctcgggtacgtgaccccatggaactcgcatggctatgacgtaacaaaggtgttcggctcaaaatttactcagatttcccctgtgtggttgcagctaaagcgcaggggacgtgagatgttcgaagtgaccgggctccacgatgttgaccagggttggatgagagccgtgaggaagcatgcaaaggggttgcatattgtcccgcggttgctctttgaagactggacctatgatgacttccgtaacgtgctggattcagaggacgagatcgaggagctctcgaagactgtagtgcaggtcgctaaaaaccagcatttcgatggtttcgtggtggaagtgtggaaccagttgctctcacagaaaagagtgggcctgatacacatgctcacacatctggctgaagcgctgcaccaggcacgtttgctcgcacttctggtgattccgccagcaataactccgggtaccgaccagctgggcatgttcacgcacaaagagttcgagcagctggcccctgtactggacggtttctcactgatgacgtacgattacagcactgcccatcagccagggcctaatgctccactgagttgggtccgcgcatgtgttcaagtcctggaccccaaaagcaagtggcggagtaaaattctccttgggctgaacttttacggcatggactatgcgacatccaaggacgcccgtgagccggtcgttggtgcaaggtacatccaaacgctgaaagaccaccgccctagaatggtatgggacagtcaggcgtccgagcatttcttcgaatacaaaaaaagccggagcgggcggcatgtggtcttttatccaactcttaagagcctgcaggtgcgcctggagctggcccgcgaactgggcgtgggggtctctatctgggagctgggccagggactggattacttttatgaccttctctag

SEQ ID NO: 8806 - DNA, 1182 bp, synthetic construct
  misc_feature 1..1182: note = source = /note="Description of Artificial Sequence: Synthetic coding sequence"
  source 1..1182: mol_type = other DNA
atgcggaccctgttcaacctgctgtggctggccctggcctgcagcccggtacacaccacccttagtaaaagcgacgctaaaaaggctgcatccaagactctcctcgagaaatctcagtttagcgacaagccagttcaggatagagggcttgttgtgacagacttgaaggccgagtctgtcgtactggagcatcgatcatattgcagcgccaaggcccgcgacaggcatttcgctggagacgtgctaggatatgtcaccccatggaacagccacggatacgacgtgactaaagttttcgggagtaagtttacacaaatatcgcctgtttggttacagctgaagcggcgtgggagagaaatgtttgaagtgactgggctgcacgacgttgatcagggttggatgagagccgtccggaagcacgctaaggggctccacatagtgccacggctcctgtttgaagattggacgtacgacgactttaggaacgttctcgattcggaggacgaaatcgaagaactatccaaaactgttgtgcaggtggctaagaatcagcattttgacggcttcgtggtggaagtgtggaaccagctgctgagccagaagcgagtggggctgattcacatgctgacacacttggcagaggctctccaccaagctaggctgctggcactgctggtaataccgcccgccatcactcccggcactgatcaactaggaatgttcacacacaaagagtttgaacaacttgccccagtgttagacggtttttctctgatgacatacgactacagcaccgcacatcaacctggaccgaacgctccgctgagctgggtgagggcctgcgttcaggtcctggaccctaaatctaagtggcgctccaaaatactgcttggcctgaatttctacggcatggattacgcgacctccaaagacgcacgggaaccggttgtgggcgctcgatatatccagacattgaaagaccaccgaccaagaatggtgtgggatagccaggcttcagagcacttcttcgagtataagaagtccagaagtggccggcacgtggtcttctaccctacgctgaaatccctccaggtgcgcctcgaactcgctcgagagctgggcgtcggtgtctccatttgggagttggggcaggggctggactacttttatgatttgctgtag

SEQ ID NO: 8807 - DNA, 1959 bp, synthetic construct
  misc_feature 1..1959: note = source = /note="Description of Artificial Sequence: Synthetic coding sequence"
  source 1..1959: mol_type = other DNA
atggccagcgtggcctgggccgtgctgaaggtgctgctgctgctgcccactcaaacatggtctccagtcggtgcaggtaatccacctgactgtgacgctccacttgcttccgcgcttcctcgatcctccttttcaagcagctcagagctcagttcttcccatggccccggattctctaggctgaacagacgggacggggccggcgggtggacccctctcgtgagcaacaagtaccagtggctgcagattgatttgggcgaacgtatggaagttactgcggtggcaactcagggcggatacggctcttcagactgggtcaccagttatctgcttatgtttagtgacggtggccgaaactggaaacagtaccgtagagaagagtctatctggggattccccgggaacacgaatgccgattcggtggtccactatcggttacagccaccgttcgaggcacgattcctgcggtttctgcctctggcttggaaccccaggggaagaattggaatgagaatcgaggtttacggttgcgcgtataagtccgaggttgtgtatttcgacggacagtctgccctcctgtatcgtcttgataagaagcctttaaagccaataagagacgtgataagcctcaaatttaaggcaatgcagtccaatggaatcctgctgcacagagaggggcagcacggcaatcatatcacactggagcttattaagggaaagttggtttttttcctgaacagcggcaatgctaagctccctagcactatagccccagtgactctgactctgggttcattgttggacgaccagcattggcactccgtgctgattgaattattagatactcaagttaatttcacggttgataagcatacccaccatttccaggcaaagggagactccagttacctagatttgaatttcgaaattagctttggcgggattccgactccaggaaggtcccgggcttttcgaaggaaatcattccacggctgtctagaaaacttgtattataacggtgtggatgtaaccgagcttgcgaaaaaacacaagcctcagatcttgatgatgggcaacgtcagcttttcttgcccacagccacagaccgtgccggtcactttcctgtcatcccggtcttatctggccttgcccgggaattccggagaagacaaggttagcgtgaccttccagttccggacgtggaatagggcaggacatctactgtttggcgagctgaggcgaggctccggcagctttgtactgtttctcaaagacggcaaactgaagctctctctgtttcaacctgggcagtcccctaggaacgtcacagctggggctggattgaatgatggccagtggcattccgtcagctttagcgcgaaatggagtcacatgaatgtggtcgtcgacgatgatactgctgtgcagcccctggttgctgttctgattgattcgggcgacacatactacttcggcgcactgtacgagcagagctgcgaagcgcacaagcacagaggaaacccttccggcctctactacattgatgccgatggctccggtcccttggggcctttccttgtctactgtaatatgaccgacgccgcctggactgtggtgcagcatggtggtcctgatgctgtgacactccggggagctccaagtgggcaccccaggtccgctgtctcttttgcttacgccgccggggctggccagttgcgctcagcagtgaatttagcagagagatgtgagcagagactggcactgcggtgtgggaccgctcgacggccagattcccgcgacggaaccccgttatcatggtgggtgggtagaaccaacgaaacgcacacgtcttggggcggttccttgcctgatgctcagaaatgtacatgcggccttgagggcaattgcattgacagtcagtattattgcaattgcgacgctggacggaatgagtggtag

SEQ ID NO: 8808 - DNA, 1455 bp, synthetic construct
  misc_feature 1..1455: note = source = /note="Description of Artificial Sequence: Synthetic coding sequence"
  source 1..1455: mol_type = other DNA
atgtggtacgtgagcacccggggcgtggccccccgggtgaacttcgaaggggctctgttcagtggatacgctcccgatgggggcctcttcatgcctgaagaacttccccagctggatcggggaaccctgtgtcaatggtccaccctgtcgtacccaggactggtaaaggagctgtgcgctctgtttatcggctctgaactgctaccgaaggatgagctgaatgacctgatcgacagagcctttagcagattccgacatcgggaggtggtgcatctgagtcgtctgaggaatggtctcaacgtgttggaactttggcacggagttacttacgctttcaaagatcttagtctgtcctgcacaactcaatttctacaatactttttggagaagcgggagaagcatgtaactgtcgtggtcggtacttcgggcgacacaggaagcgcggcaattgaaagcgtccaaggcgcaaagaatatggacatcatcgtgctcctgcccaagggccattgtacaaaaattcaggagctgcagatgaccacagtactcaagcagaatgtccacgtcttcggcgtggaagggaactctgacgaactggatgaaccgattaaaacggtcttcgcagatgtggcctttgtcaagaaacataatctgatgagtttgaatagcattaattggagcagagtgttggttcagatggcacaccatttctttgcatactttcagtgcacaccctcacttgatacacatccactgcctttggttgaagtggtggtaccaaccggggctgcgggcaatctcgccgcaggctacatcgcacaaaagatcggcctccctatcagattggtggtcgcagtgaaccggaacgatattatccataggactgtgcagcagggagactttagcttaagcgaagctgtcaaatccacacttgcttcagctatggacatacaggtgccttataacatggagagggttttttggctgcttagcggtagtgacagccaggtaactcgagctttaatggagcagtttgagcgaactcagtcagtgaatctcccaaaggaactgcattctaaactcagcgaggccgtgacttctgtgtcagtgtcggacgaggctattactcagaccatggggaggtgctgggatgagaatcaatatctcctgtgtccgcactccgccgtagctgtgaattaccactatcagcaaatagatcgtcagcaaccctcaaccccaaggtgttgtctggcacccgcgagcgccgcgaaattccctgaagccgttctggctgctggtctaacaccagaaaccccagcggaaatcgttgcattggagcataaagaaactaggtgcacactcatgaggcggggagacaactggatgctgatgctcagagataccatcgaagacctgtctaggcaatggcgtagccacgccctgaacacgtcgcagtag

SEQ ID NO: 8809 - DNA, 264 bp, synthetic construct
  misc_feature 1..264: note = source = /note="Description of Artificial Sequence: Synthetic coding sequence"
  source 1..264: mol_type = other DNA
atggtgagcctgatgaagctgtggatccccatgctgatgaccttcttctgcacggtgctgttgagcgtgctcggagaaatgaggaagaaacgttacgatcgaaaagagcttctcttggaggagtgctggggaaagcccaatgtgaaggagtgtacaaacaagtgttctaaggcattcagatgcaaggacaagaattacacttgctgctggacttattgcgggaatatttgctggatcaatgtggagaccagtggggactactag

SEQ ID NO: 8810 - DNA, 453 bp, synthetic construct
  misc_feature 1..453: note = source = /note="Description of Artificial Sequence: Synthetic coding sequence"
  source 1..453: mol_type = other DNA
atgcggttcatggccggccccgccggcagccagagcctgggccccctctgtttccacagttcccctcaggccctgtatacagtgctcctaatagtgctggtgatgatgtccttagtgttcggaaagtttgtcccagtaaattgggaaccgccacagccgttgccttttcccaagtaccttagatgctaccgatgcctgctggaaacaaaagaactgggctgccttctcggcagcgacatatgcttgacaccggcgggatctagctgcatcactctgcacaaaaagaactcaagcgggtctgatgtaatggtatctgactgccgaagcaaggagcagatgtcggattgttctaacacaaggacctcccctgtgtctggattctggatcttttctcagtattgcttcttagacttttgtaatgatccacaaaacagagggttgtacacaccctag

SEQ ID NO: 8811 - DNA, 873 bp, synthetic construct
  misc_feature 1..873: note = source = /note="Description of Artificial Sequence: Synthetic coding sequence"
  source 1..873: mol_type = other DNA
atgagcgtgcggcggggccggcggcccgcccggcccggcacccggctgtcctggctgctctgttgttcggccctcctctcacccgccgcagggtatgtgattgtgtctagcgtctcatgggctgttacaaatgaggtggacgaagaactcgatagcgcttcaactgaagaagccatgcccgctctccttgaagacagcggtagcatctggcaacagagctttcctgccagcgctcataaggaggatgctcaccttaggcccagggccggagcggcgagggcacgaccgcctcctgcccccccaggcatgtttagttaccgccgggagggaggccagaccgcatctgcaccacctggaccacgcctcagagcagccacagcacgcagcctcgcccatgcctccgtctggggctgtctagctaccgtgtccacgcacaagaagattcaaggcttgcctttcggcaactgccttccagttagcgacggtccctttaataactccacgggtataccattcttttacatgacagcaaaagatcctgtcgtggccgatcttatgaagaaccccatggccagcctgatgcttcctgaatcagagggcgaattctgcaggaaaaatattgttgaccctgaagaccctcgctgtgtccaattgactttgacaggtcagatgattgccgtttctcctgaagaagtagagtttgccaagcaagctatgtttagtaggcatcccggaatgcgcaagtggccaaggcagtatgagtggtttttcatgaagatgcggatcgaacatatttggctgcagaagtggtacgggggcgcatccagcatctcccgggaagaatactttaaggctgtgccacgtaaagcttag

SEQ ID NO: 8812 - DNA, 2742 bp, synthetic construct
  misc_feature 1..2742: note = source = /note="Description of Artificial Sequence: Synthetic coding sequence"
  source 1..2742: mol_type = other DNA
atgggccccgaggccctgagcagcctgctgctgctgctgctggtggcatctggagacgccgatatgaagggtcactttgatccagccaaatgccggtacgcgctcggcatgcaagataggactatcccggattccgatatcagcgccagcagcagctggagcgatagtacagccgcccggcacagtcgtttggagtccagcgatggagatggagcctggtgccctgcagggagcgtatttcctaaggaagaggagtatctgcaggttgatctgcagcggctccaccttgtagcactggtgggaacccagggtcgacatgccgggggattagggaaagagttcagtagaagttacagattaagatacagtagggatggaaggagatggatgggctggaaggaccgttgggggcaggaggttatttctggtaatgaagatcctgagggagttgtccttaaggatcttggaccacccatggtcgccagactggtgcgtttttaccctagagctgaccgggtcatgagcgtgtgcctgcgcgttgagctatacggctgtctgtggagggatgggctgctgtcatacaccgctcccgtgggacaaactatgtacctctccgaggcagtttatcttaatgacagcacatatgacggacatacagttggaggcttgcaatacggtgggctggggcagctggctgatggagtggtgggattggacgatttcagaaagtctcaagaactgagggtgtggcctggttacgactacgtcggctggtctaaccattcttttagcagcggttatgtggagatggaattcgagtttgacagactcagagctttccaggcaatgcaagtgcattgcaataatatgcatacactaggggcccggctcccaggcggagtcgagtgccgatttagaagaggcccggccatggcctgggaaggtgaaccgatgcgtcacaacctcggcggcaatttaggagacccccgagcccgtgccgttagcgtgcctctcggcgggcgcgtggctcgcttcctacagtgccgattcctattcgccggaccatggctcctgttctcagagatctcttttattagcgatgtggtcaacaacagttctcccgccttgggggggaccttcccaccagcaccgtggtggcctccgggtccaccacccaccaacttttcctctctcgagctcgagccacggggccagcagcctgtcgcaaaggccgagggttcccctaccgccatcctcattggatgcctagtggcaattatactcctgctgctcctgattatagccctcatgttatggaggctccattggaggagactgctgagtaaagctgagcgccgcgtacttgaggaagaattgacagttcatctgtcggtgcctggagacaccatcctgatcaacaacaggccggggcctcgcgagccccccccttatcaggaacccaggcctcgcggaaatcccccacattctgccccctgcgttccgaatgggtccgccctcctgctctcaaacccagcctaccgcctgcttcttgccacctacgcccgacctcccagaggaccagggccccctactcctgcttgggccaagccaaccaatactcaagcttacagcggcgactacatggagcctgagaagccaggtgcgcctcttttgccccctccccctcaaaactccgtgccccattacgccgaggctgacattgtcacactgcagggcgttaccggtgggaatacctatgcagttccggcccttccacccggagctgttggcgatggaccaccacgggtagactttcccagatctagactgagattcaaggaaaaacttggcgaaggccagttcggtgaagtccacctgtgcgaagtggactcaccacaggacttggtgagtctggatttccccctgaatgtcagaaaagggcaccccctccttgtggcagttaagattctaagacccgacgctaccaaaaatgccaggaatgattttctgaaagaagtcaagatcatgagcaggttaaaggaccccaatatcatacggctactgggggtgtgcgttcaagatgatcctctgtgcatgataacggattatatggagaacggtgatctgaatcagttcctgagtgcccaccagttggaggacaaggcagctgagggggcaccaggagatggtcaggccgctcaggggcccactattagctaccctatgctcctacatgtcgcagcacagattgcttctggcatgcgctacttggcaaccttaaattttgtacacagagatctggccacaagaaattgcttggtaggcgaaaattttactattaagattgcggattttggtatgagcaggaacctgtacgctggtgactattatagagttcaaggacgggctgtcctcccgatacgctggatggcctgggaatgcattctcatggggaagtttacgactgctagtgacgtttgggcctttggcgtgactctgtgggaggtgctcatgttgtgccgcgcacaacctttcgggcagttgactgacgagcaggttattgaaaacgccggcgaattcttcagagatcagggtagacaggtgtatttgtcccgtcccccggcatgcccacagggtctatacgaactgatgctgcgctgctggtcaagggaatcagagcagaggccaccttttagccagctgcaccgcttcttagcagaggatgcccttaacaccgtgtag

SEQ ID NO: 8813 - DNA, 243 bp, synthetic construct
  misc_feature 1..243: note = source = /note="Description of Artificial Sequence: Synthetic coding sequence"
  source 1..243: mol_type = other DNA
atgaagctgagcggcatgttcctgctgctgagcctggccctgttctgctttctaactggagtattctctcaaggtggtcaggttgattgcggggagtttcaggaccctaaggtctactgtacgagagaatcaaacccccattgtggcagtgacggacagacttatggcaataaatgcgcgttttgcaaggctattgtgaagtccggtggaaaaattagcctcaaacatcccggtaaatgctag

SEQ ID NO: 8814 - DNA, 270 bp, synthetic construct
  misc_feature 1..270: note = source = /note="Description of Artificial Sequence: Synthetic coding sequence"
  source 1..270: mol_type = other DNA
atgaagccctggatcctgctgctggtgatgttcatcagcggcgtggtgatgttactgccggtgctggggagcttttggaataaagatccatttttggacatgatcagggagacagagcagtgctgggttcagccaccatataagtattgcgagaagaggtgtaccaaaataatgacatgcgtacggcccaaccatacttgctgctggacttattgtgggaacatctgcttagataacgaagaaccccttaagagcatgctgaatccttag

SEQ ID NO: 8815 - DNA, 264 bp, synthetic construct
  misc_feature 1..264: note = source = /note="Description of Artificial Sequence: Synthetic coding sequence"
  source 1..264: mol_type = other DNA
atgctgccctgcctggccctgctgctgctgatggagctgagcgtgtgcacagttgccggcgacggcggagaggagcagacactgagtaccgaggcagagacttgggagggagccggacctagcatacagcttcaactgcaagaagtcaagacaggcaaggcttcacagttctttgggctcatgggtaagcgagtcggaggccgcccacttatacaaccccggaggaagaaaggcagagaagacgaggcccaggggagtgaatag

SEQ ID NO: 8816 - DNA, 285 bp, synthetic construct
  misc_feature 1..285: note = source = /note="Description of Artificial Sequence: Synthetic coding sequence"
  source 1..285: mol_type = other DNA
atgcagcacagcctggtgttcttcttcgccgtgatcctgcacctgagtcaccttctacacctcgacgccagcatccatccctttagattgcccttctcctcaaagccttttctgctcatccctatgtcaaatacaactttgccgcacacagcatggccgctgtcctttctgcaccagacagtgtccactctgaaagcagtagccgtgactcattcgctatggcacttgcaaattcctgtggactgtcaggcttgtaatagaaagtccaagaaaatttattgctag

SEQ ID NO: 8817 - DNA, 327 bp, synthetic construct
  misc_feature 1..327: note = source = /note="Description of Artificial Sequence: Synthetic coding sequence"
  source 1..327: mol_type = other DNA
atgcggcagcggctgctgcccagcgtgaccagcctgctgctggtggctctgttgttccccggcagcagtcaggcccgccatgtcaaccattctgctaccgaagcgctgggggaactgagagagcgcgccccgggtcaaggcaccaacggtttccagctgctacgacacgccgtgaaacgtgacttgttacctccaagaactccaccctatcaaggcgacgtgcccctggggattcgcaacacgatctgcagaatgcagcagggaatctgcagactctttttctgccattcaggaacggggcaacagcaccgccagcgatgtgggtag

SEQ ID NO: 8818 - DNA, 807 bp, synthetic construct
  misc_feature 1..807: note = source = /note="Description of Artificial Sequence: Synthetic coding sequence"
  source 1..807: mol_type = other DNA
atgctgctgctggccgccgccttcctggtggccttcgtgctgctgctgtatatggtgtcccccttgatttcacccaagcccttagccttgcccggagcacacgtagtggtgaccgggggatccagcggaatcggtaagtgtattgcgatcgagtgctacaaacaaggggcgtttatcaccctcgtagcgcgcaacgaggataagctactccaggctaagaaagagatcgaaatgcatagcatcaacgacaaacaggttgtactgtgtatctcagtggatgtgtcacaagattataatcaagtcgaaaatgtgataaaacaggcccaagagaagctaggtccagtcgatatgttggtgaattgcgcagggatggctgtgtctggcaagttcgaggaccttgaggtgagcacttttgaagtaaagccttacaacgtgtatatcaccgtggcttaccctcctgatacagatacacccggcttcgcagaagagaacaggactaagcctctcgaaacccgtcttatttccgagaccacgagcgtctgcaagcccgagcaggtcgctaagcagatcgtgaaagatgccatccaagggaactttaactcatcattaggtagcgacggttacatgctctccgccctcacgtgtgggatggcccctgtgactagtattacagagggcttacagcaggtggtgacaatggggttgttccggacaattgctttgttctacctgggttccttcgattctattgtccgccgctgcatgatgcagcgcgaaaagtctgaaaatgctgataagaccgcgtag

SEQ ID NO: 8819 - DNA, 1686 bp, synthetic construct
  misc_feature 1..1686: note = source = /note="Description of Artificial Sequence: Synthetic coding sequence"
  source 1..1686: mol_type = other DNA
atgcggtggatcctgtgctggagcctgaccctgtgcctgatggcccagacagctctgggtgcactccacacaaaacggccccaggtggtgaccaagtatggcaccctgcagggcaagcagatgcacgtcggaaagacacctattcaggtgtttttaggggtgccctttagtcgtcctcctctgggcattctccgattcgctccccctgagccacccgagccatggaaaggaattcgagatgccacgacctatccaccaggatgtctgcaggagtcttggggacagctcgcaagcatgtacgtatccacacgggaaagatacaaatggttgaggttcagcgaggactgcctctatctaaatgtgtacgccccagccagagcccctggagatccccagctgcccgttatggtctggttcccgggcggagccttcatcgtgggagccgcatcatcttacgaaggaagcgatctggccgcacgggaaaaggttgtgctggtgtttctccagcatagactgggtatattcggctttctgagtaccgacgattcccatgccaggggcaattgggggctgctcgaccagatggctgcacttaggtgggtccaggagaatattgcagcctttggtggggatcccggaaacgtcaccctttttggtcagtccgccggggctatgagtatttccgggctgatgatgtcaccactggccagcggcctcttccacagagccatctcccagtccggcacagccctcttccggctgtttatcacttccaacccgctgaaagtggcaaagaaagtcgcccatctggccggctgcaaccataattccactcagatcctggtaaactgtctccgagctctgtcaggcactaaggtgatgcgcgtttctaacaagatgagatttctccagttgaattttcagcgggatcccgaggagattatttggtccatgtcccccgtggtcgacggcgttgtcatcccagatgatcctctagtgctgctgactcagggtaaggtgtcttctgtcccctacctgctgggtgtgaataacttggaatttaactggctgctcccttacattatgaaatttccactaaacagacaagcgatgagaaaagagacaattacgaagatgctctggtctacaaggacgctgcttaatattacgaaagagcaggtgccactcgtggtggaagaatacctcgataacgtgaatgaacacgattggaaaatgttaaggaaccgaatgatggacatcgtccaggatgccacctttgtgtacgccactctgcagactgctcactatcaccgcgatgcagggctacctgtgtatctgtatgagtttgaacaccatgctagagggatcatagttaagccacggactgatggcgcagatcacggcgatgaaatgtacttcctttttggaggaccatttgctaccgggctctctatgggcaaggaaaaggccctgtcgttacagatgatgaaatattgggccaacttcgcccggacaggtaaccccaacgatggcaacctcccctgttggccacgctacaacaaagatgagaagtacctgcagctcgacttcaccactagagtcggcatgaaactgaaggaaaaaaagatggccttctggatgtctctgtaccagagccagaggccggagaagcagaggcagttttag

SEQ ID NO: 8820 - DNA, 444 bp, synthetic construct
  misc_feature 1..444: note = source = /note="Description of Artificial Sequence: Synthetic coding sequence"
  source 1..444: mol_type = other DNA
atggccagcagcctgaagatctggggcaccctgctggccctgctgtgcattctttgtaccctcctcgtccaatccaaagaggtttcctggagagagttcatgaaacagcactaccttagtccctcacgggagtttcgagagtacaagtgcgatgtgctcatgcgggaaaacgaagcactcaaggacaaatcttcccatatgttcatctacatttcatggtacaagatagagcatatctgcacatccgacaattggatggatagatttcgaaatgcctacgtgtgggtgcagaaccctctgaaagtgttaaagtgtcatcaggagaatagcaaaaattcatacaccgagtctagatcgtttaattacatcgaattccattgtagcatggacgggtacgtggactcaattgaggacttgaaaatggtggagcccatcggcaactag

SEQ ID NO: 8821 - DNA, 444 bp, synthetic construct
  misc_feature 1..444: note = source = /note="Description of Artificial Sequence: Synthetic coding sequence"
  source 1..444: mol_type = other DNA
atgaccagcagcctgaagatctggggcatcctgctggccctgctgtgcatcctatgtaggctttgtgtgtactctaataacatctattggcgcgagtttatcaagcttcactacctgtctcctagtcgcgagttcaaggaatacaagtgcgacgtgctgatgcgagaaaaggaggcccttaaggggaagtctttccacatgtttatctatagtttatggtttaaaattcagcgcgcatgtatcaatgaaaaaggctccgatcgctacagaaatgcttatgtatgggctcccggggcattgaaagtcctggaatgtcactgggagaagtacaataatagatacacagagtctcgatcgttttcttatatagagttccactgtggagtggacggctatgtcgataatatcgaagatctgcggatcattgaaccgatctccaattag

SEQ ID NO: 8822 - DNA, 1248 bp, synthetic construct
  misc_feature 1..1248: note = source = /note="Description of Artificial Sequence: Synthetic coding sequence"
  source 1..1248: mol_type = other DNA
atgagccccttcctgtacctggtgctgctggtgctgggcctgcacgccactatccactgcgccagccccgagggtaaagtcaccgcttgccatagcagccagccgaacgcgactttgtataagatgtcatccattaacgcagattttgccttcaacctgtatcgacgcttcacagtcgagactccagataagaatatcttctttagccctgtgagcatcagtgcggcattggtgatgttgtccttcggggcttgttgctccactcaaactgagatagtcgaaaccctcgggtttaacctgacggatacccccatggtggagatccagcacgggttccagcatctgatctgctcactgaacttccccaagaaggagttggagctgcaaataggaaacgctctctttatcgggaaacatctcaaacctctggccaagttcctgaacgacgtgaagactttatacgagaccgaagtctttagcacagacttcagcaatattagtgccgccaagcaggagatcaattcacacgtcgagatgcagaccaagggcaaggtggtgggactcatccaagaccttaagcccaacaccatcatggtgctggtgaattatatccacttcaaagcgcagtgggcaaatccattcgacccttcgaagaccgaagattcctctagtttcctaatcgacaaaacaacaaccgtgcaggtgcccatgatgcaccagatggaacaatactaccacttggtggacatggagctcaactgcacggtccttcagatggattactcaaaaaatgccctggccctgtttgtgctcccgaaagagggacagatggagagcgtggaggcagcaatgtccagcaaaaccttgaaaaagtggaacagattactgcagaaagggtgggtggacctttttgtgccaaaatttagcatcagcgccacatatgatctaggggccaccctgctcaagatgggtatacagcatgcctactccgaaaatgcagacttctccggcttgactgaggataatggattgaagctgtcaaatgctgcccacaaagccgtgctccacatcggcgaaaagggcaccgaggctgcggctgtgccagaagtggaactctcggaccaaccagagaacacgttcctccaccctataatccagatagatagatcctttatgttgctcattctagaacgatcgacaaggagcattctcttcctgggaaaagtcgtgaatcctaccgaggcatag

SEQ ID NO: 8823 - DNA, 285 bp, synthetic construct
  misc_feature 1..285: note = source = /note="Description of Artificial Sequence: Synthetic coding sequence"
  source 1..285: mol_type = other DNA
atgcggaccctggccatcctggccgccatcctgctggtggccctgcaagcacaggccgagcccctgcaggctagggccgatgaggtagccgccgctcctgaacaaatcgcagcagacataccggaggtggtggtatccttggcttgggatgagagtctggctcctaaacatcctggctcaagaaaaaacatggactgctattgtagaatccccgcatgtatcgccggggagcggaggtacggcacatgtatctaccaggggcgactgtgggcattctgttgttag

SEQ ID NO: 8824 - DNA, 1062 bp, synthetic construct
  misc_feature 1..1062: note = source = /note="Description of Artificial Sequence: Synthetic coding sequence"
  source 1..1062: mol_type = other DNA
atgcggctgccccggcgggccgccctgggcctgctgcccctgctgcttctgttgccccccgcacccgaggcagccaagaagcctaccccctgccacagatgccggggcctggttgataagtttaaccagggtatggtcgatactgcaaaaaaaaactttggcggtggcaacacagcttgggaggagaagaccttatcaaagtatgaaagttccgaaattcgcttgctagaaatcctcgagggcctgtgtgaatctagtgatttcgagtgcaatcagatgttggaggctcaagaggaacatctggaggcctggtggctgcagctgaagtccgagtaccctgacctgttcgagtggttttgtgtgaagaccttgaaagtgtgttgctctccggggacatatgggcccgattgtctcgcatgccagggaggcagccagaggccatgctccggcaacggccattgttcaggcgatggctccaggcagggagacgggagttgccggtgtcatatggggtatcaaggaccactttgcacagattgtatggatgggtacttcagcagcctgcgcaacgaaacacacagcatttgtaccgcatgtgacgaatcatgcaagacctgctccggcctcacgaaccgggactgtggtgagtgtgaggtggggtgggtgctggacgaaggagcctgtgtcgacgtggacgaatgtgccgctgaaccacccccttgcagcgcggctcaattctgcaaaaacgcaaatggtagttacacttgcgaggaatgcgattcgtcctgtgtgggctgcacaggagaagggccagggaactgcaaggaatgtatatcaggatacgcccgagaacacggccagtgtgctgatgtggatgaatgctccctcgctgagaaaacctgtgtgaggaaaaacgaaaattgttacaacacacctggcagctacgtgtgtgtgtgtccagatggattcgaggaaacagaggatgcctgtgttcccccagccgaggcagaggcaaccgaaggtgaaagccccactcaactgccgagcagggaagatctgtag

SEQ ID NO: 8825 - DNA, 651 bp, synthetic construct
  misc_feature 1..651: note = source = /note="Description of Artificial Sequence: Synthetic coding sequence"
  source 1..651: mol_type = other DNA
atgaagctgaacctggtgcagatcttcttcatgctgctgatgctgctgctgggacttggcatggggctggggctcggtttacatatggctaccgccgtgttggaagagtccgaccaaccacttaatgagttctggtcttctgactcacaggataaggctgaggcaacggaagaaggggatgggacacagacaactgagaccctagtgctgagcaataaggaggtggtccagcccggatggcctgaggatccgatcctgggtgaggatgaagtgggaggcaacaagatgctacgtgcatccgcattgtttcagtctaacaaagactacctcagattggatcagacagatcgcgagtgcaatgatatgatggcccacaagatgaaagaaccctcccagagttgcattgctcagtacgcattcatccacgaagaccttaatacagtcaaggccgtgtgtaattctccagtaattgcctgtgagcttaaaggaggtaagtgtcataagtcaagccggccatttgatttaaccttgtgcgagcttagtcagcccgaccaggtgaccccgaactgcaactaccttacaagtgtgattaaaaaacacataattatcacttgtaacgacatgaagcgtcagctgcccactggccagtag

SEQ ID NO: 8826 - DNA, 222 bp, synthetic construct
  misc_feature 1..222: note = source = /note="Description of Artificial Sequence: Synthetic coding sequence"
  source 1..222: mol_type = other DNA
atgcggatcgccgtgctgctgttcgccatcttcttcttcatgagccaggtactgcctgccagaggaaagtttaaagagatctgcgagcggcccaatggctcttgcagagacttctgccttgagactgagatccacgtcgggcgatgcttaaatagtcagccttgctgtctaccactgggccaccaaccacggattgagagcactacacctaaaaaagactag

SEQ ID NO: 8827 - DNA, 609 bp, synthetic construct
  misc_feature 1..609: note = source = /note="Description of Artificial Sequence: Synthetic coding sequence"
  source 1..609: mol_type = other DNA
atggagcggggcgccggcgccaagctgctgcccctgctgctgctgttaagggccacgggctttacctgcgctcaaaccgatgggaggaacggatataccgcggtcattgaagtaaccagtggtgggccctggggggactgggcctggccagagatgtgcccagacggcttttttgcctccggtttttctctgaaagtagagcccccccaaggcatccctggtgacgacacagcactgaacggtatacgcctgcattgtgctaggggcaatgtattaggcaacactcatgtcgttgagagccaaagtggaagctggggggagtggtctgaacccctgtggtgtcggggcggtgcatacctggtggctttctcacttagggtggaggccccaaccacgctgggggacaacactgccgctaataatgtaagatttcggtgctcagatggagaggagctccaaggtcccgggttgtcttggggggactttggagattggagtgatcattgtcccaaaggagcctgcggcctgcagactaaaattcagggtccacgcggacttggggacgacaccgcgcttaatgacgctcggttgttctgttgccgcagctag

SEQ ID NO: 8828 - DNA, 759 bp, synthetic construct
  misc_feature 1..759: note = source = /note="Description of Artificial Sequence: Synthetic coding sequence"
  source 1..759: mol_type = other DNA
atgcagctgacccggtgctgcttcgtgttcctggtgcagggcagcttatatctagttatctgtggacaggatgacgggcctcccggtagcgaggatccagaaagggacgaccacgaggggcagcccaggccacgtgttccccgaaaacgtggccacataagcccgaaatcacgccccatggctaactccaccctactaggtctcctcgcgccacctggtgaggcttggggtatcctgggccagcctccgaacagacctaaccacagcccacccccgagcgcgaaagtgaaaaagatctttggctggggtgacttctacagcaacattaagactgtggccttgaacttactggtgacaggcaagatcgttgatcatgggaacggcacctttagcgtgcactttcaacacaatgcaacggggcaggggaacatttctatctctcttgtccctccaagcaaggcagttgagttccaccaagaacagcagatttttatagaagcaaaggccagcaagatctttaactgtcggatggaatgggaaaaggtggaaagagggcgccgaacctcgctgtgtacacacgacccagccaagatctgcagcagggatcacgctcagtcatcggcaacttggtcctgctcacagccctttaaggtcgtgtgcgtgtacattgctttttacagcacagactacaggctcgtgcagaaggtgtgtcccgactataactaccatagcgacacaccctattatccaagcggatag

SEQ ID NO: 8829 - DNA, 555 bp, synthetic construct
  misc_feature 1..555: note = source = /note="Description of Artificial Sequence: Synthetic coding sequence"
  source 1..555: mol_type = other DNA
atgaagatcctggtggccttcctggtggtgctgaccatcttcggcatccagagccatggatacgaggtttttaatattatctcgccaagtaataacggcggcaacgtgcaggagactgtaaccatcgataatgagaagaacacagcaatcattaacattcacgcaggtagctgcagctccaccacgatctttgattacaaacacggttacattgcatcaagagttctgtcccgtagggcctgtttcattttgaagatggatcatcagaatatacctcctctgaacaaccttcagtggtacatttacgaaaagcaggccttggataatatgttctctagcaagtacacatgggttaaatacaaccccctggagagtctcatcaaagatgtggactggttccttctggggtcccctatcgagaagctttgcaaacacataccactgtacaagggggaggtcgtggaaaatacacacaatgtcggggcaggcgggtgtgcgaaagctggcctgttgggaatcttggggatcagtatttgtgcagatattcacgtgtag

SEQ ID NO: 8830 - DNA, 651 bp, synthetic construct
  misc_feature 1..651: note = source = /note="Description of Artificial Sequence: Synthetic coding sequence"
  source 1..651: mol_type = other DNA
atgggcgccgtgatgggcaccttcagcagcctgcagaccaagcagagacggccatcgaaggacaaaattgaagacgagctggagatgacgatggtttgtcataggcccgagggccttgagcagctggaagcccagaccaatttcaccaagagggaacttcaggtgctctatcgcggctttaagaacgaatgcccatcaggggtggtgaacgaggacacgttcaagcagatctatgcgcaattctttccacacggggacgcctccacctatgcccactatttatttaatgcctttgacaccacccaaacaggttccgtgaagtttgaggacttcgttaccgcacttagcatactgctgcgcggtaccgtgcacgaaaagctgaggtggacattcaacttgtatgatatcaacaaagatgggtacatcaataaagaggagatgatggacatcgtcaaggctatctatgatatgatgggaaagtatacataccctgtactgaaagaggatactccccgacagcatgtggatgtgttctttcagaagatggacaagaacaaagacggcatcgtgaccctggacgagttcctggaatcttgtcaggaagacgataacatcatgaggagccttcagctgtttcaaaacgtcatgtag

SEQ ID NO: 8831 - DNA, 2736 bp, synthetic construct
  misc_feature 1..2736: note = source = /note="Description of Artificial Sequence: Synthetic coding sequence"
  source 1..2736: mol_type = other DNA
atggcccagctgttcctgcccctgctggccgccctggtgctggcccaagccccagctgctctggcagacgtcctggaaggcgactcaagtgaagatcgcgcattccgggtgcgcattgcgggcgacgccccactgcagggagtgctcgggggagctttgacaatcccctgccacgtgcattatctgcgcccaccaccctcccgccgtgccgtccttggtagccctcgagtcaagtggactttcctctctagaggacgcgaggcagaggtcctggttgctcgcggggttagggtgaaggtgaatgaggcgtatcgcttcagagtcgcccttccagcttatcctgctagtttgactgatgtctcattggctctgtccgaattgcggcccaatgattctgggatctataggtgcgaagtgcagcatggcatagacgacagttcagatgcagttgaggtcaaagttaaaggggttgtgttcctttaccgggaggggtccgctagatacgccttctcattctcaggggctcaggaagcctgcgcaaggatcggggcacatatagcaacccctgagcaactctacgctgcctaccttggaggttatgagcaatgtgacgccggctggctgtctgatcagactgtgcgttatcctattcagacaccacgggaagcttgctacggagacatggacggatttccaggcgtaaggaattacggagtcgtggatcctgatgacttgtacgatgtgtattgttacgccgaggacctcaacggcgaattgtttcttggagatccccccgaaaagctgacgctggaagaagccagagcttactgccaggaaaggggggccgaaattgcaacaactggtcagctgtacgcggcgtgggatggaggcctggaccattgttcaccgggctggctcgcagacggaagcgttcgttaccccattgtcacccctagccagcgctgtggaggcggtttgcctggagtcaaaaccctgttccttttcccaaatcagacaggattcccgaacaaacattctagattcaacgtctactgctttcgcgacagtgcccaacctagcgctatcccagaggccagcaatcccgcctctaaccctgcatctgacggactggaagctattgttactgtcactgagacgctggaagaactccagttgccccaggaggctacagaatcagaatcccgaggagccatatactccattcccattatggaggatgggggaggcggtagctccacccccgaagatcctgcggaagctcccaggacactgctagagtttgagacacagtccatggttccacctacaggctttagtgaagaggaggggaaggccctggaagaagaggagaaatacgaagacgaggaggagaaagaagaagaagaagaggaagaagaggtcgaagacgaagcactatgggcatggccaagtgagctctcaagccctggccctgaggcctcacttcccacagagcccgccgcccaggaagagagcctgagtcaagcccccgcaagggccgtgttgcaacccggggcgtcccctctccccgatggagaaagtgaggccagtagacctccccgcgtgcacggaccccccactgagaccctgcccacaccacgcgaacgcaatttggccagccccagccccagcacactcgtcgaagcaagggaagttggggaggcgacaggcggcccggaactgtccggggtcccccgcggggaatcagaagagaccgggtcatcagagggcgctccctcactgctgccggccactcgcgcaccggaaggcactcgtgagctggaagccccctcggaagacaactccggtaggacagcgccagccgggacctctgtccaggcccagcctgtattgcccactgactctgcaagcagaggcggggttgcagtcgtgcctgcatctggtgactgtgtgcctagcccctgccataacggcggcacatgcctcgaggaggaggaaggcgtccggtgcctgtgcctcccaggatacggaggagatctctgcgatgtggggttgaggttctgcaaccctgggtgggatgcttttcagggagcttgctacaagcacttcagtacacgccgatcatgggaagaggccgaaacccagtgcagaatgtacggcgcacacttggcatcgatcagtacgcccgaggagcaggacttcataaacaaccgctaccgcgaataccagtggataggacttaacgaccggaccatagagggtgatttcttgtggagtgatggggtgcccctgttgtatgagaactggaacccgggccaacccgattcatattttttgagtggcgagaactgcgtggtgatggtgtggcatgaccagggacagtggagcgatgttccgtgcaattaccatctttcctatacctgcaaaatgggtctggtgtcttgtggacctcctccagagcttcctttagctcaggtgttcggtagaccaagactgcggtatgaagtcgataccgttctgcggtacaggtgtagagaggggctcgctcaacgaaatctgcctctgatccggtgtcaggagaacggaagatgggaggcccctcaaataagctgcgtacctagaagacctgctcgagcactgcatccggaagaggatccagaaggtagacagggcaggctgctgggacgatggaaagccctgctgattcctcccagtagtcccatgcccggcccctag

SEQ ID NO: 8832 - DNA, 852 bp, synthetic construct
  misc_feature 1..852: note = source = /note="Description of Artificial Sequence: Synthetic coding sequence"
  source 1..852: mol_type = other DNA
atgggcctgggcctgcggggctggggccggcccctgctgaccgtggcgacggcactgatgttgccggtaaagccacccgctgggtcctggggtgcccagatcataggcggacacgaggtcaccccccacagccgcccttacatggcttccgtgaggttcggcggacagcatcactgtggcggcttcctgctccgtgcccggtgggtggtaagcgctgcccactgtttcagccatagggacttgaggaccggcttggtcgtccttggggcccatgtactaagcaccgcagaaccaacacaacaggtgtttggcatcgacgccctgaccacccatcccgattaccatccaatgacacacgccaacgacatctgtctgttacgtctgaacggtagcgccgtattggggcccgctgtcggactgctgcggcccccgggtagaagagcaagacctcccaccgccggcaccagatgccgggtggctgggtggggcttcgtgagcgattttgaggaacttccaccgggactgatggaggccaaagtgcgggttctggatccagatgtttgtaatagttcctggaaaggacatctgactctgaccatgctgtgtacacggagcggggatagccacaggaggggcttctgcagtgccgactctggaggcccgctggtctgtcgcaatcgagcacatggccttgtgtcattttccggcctgtggtgtggcgatcctaaaaccccagacgtgtatacccaggttagcgcgttcgtggcttggatctgggatgtggtgaggcgcagctccccccagcccggacccctacccggcacaacccgaccccccggcgaggcggcctag

SEQ ID NO: 8833 - DNA, 1209 bp, synthetic construct
  misc_feature 1..1209: note = source = /note="Description of Artificial Sequence: Synthetic coding sequence"
  source 1..1209: mol_type = other DNA
atgatggtggccctgcggggcgccagcgccctgctggtgctgttcctcgctgccttcctccctccgcctcagtgcactcaggatcctgccatggtgcattacatttatcaaaggttccgtgtgttggagcagggactggagaaatgcacccaggccacgagggcatatatacaggagtttcaggaattctccaagaatatctcagtgatgctcggcagatgtcagacttacacttctgaatacaaaagcgctgtgggaaacctcgcacttcgtgttgagagggctcagcgggagattgactacattcaatatctgagggaagctgacgaatgcatcgagtctgaggataaaaccctagcagagatgctgctgcaggaagctgaggaagaaaagaaaataagaactctgctaaacgcctcctgcgacaacatgctcatgggaatcaagtcactgaagattgtgaagaagatgatggatactcacgggagttggatgaaggacgccgtctataactcccctaaggtttatctcctgatcgggtcgcgaaacaataccgtgtgggagttcgcaaatatccgggcattcatggaggataataccaagcccgcccctaggaagcagatcctgaccctgagctggcaaggcactgggcaggtcatctacaaaggcttcctattctttcacaatcaagcgacctctaacgagattattaaatacaatctccaaaagagaacagtggaagatcgcatgctcctaccgggtggcgtgggccgcgctctggtctaccaacacagtccatcgacctacattgacctggcagtggatgagcatggactttgggctatccacagtggccctggaactcattcccacctcgtgttgactaagattgaaccagggacgcttggagtggagcactcttgggatactccttgtaggagtcaggatgcagaagcgtcctttctgttatgtggcgtcctttatgtcgtctattctactggcgggcagggaccgcatcgaattacctgcatatacgacccccttggcacaatttctgaagaggacctgccgaatcttttcttccccaaaaggccaagaagtcattcgatgattcactacaatccacgtgataaacagttgtatgcctggaacgagggcaaccaaattatctacaaacttcaaacaaaacggaagttgccacttaagtag

SEQ ID NO: 8834 - DNA, 1221 bp, synthetic construct
  misc_feature 1..1221: note = source = /note="Description of Artificial Sequence: Synthetic coding sequence"
  source 1..1221: mol_type = other DNA
atgcagctgttcctgctgctgtgcctggtgctgctgagcccccagggggcttctctgcatcgccaccacccccgtgagatgaagaagcgcgttgaggatttacatgttggcgctacagtggctccatcctcgaggcgggattttacattcgacctttatcgggctctggcgagcgcagccccttctcagagcatatttttttctcccgtgtctatctctatgagcctggcaatgctgtctttgggcgccggtagctccacaaaaatgcagatccttgagggacttggactcaacctgcagaagagctctgagaaggaactccatcggggattccagcagctgctgcaggagttaaatcagccccgtgatggcttccagttgtcgctaggtaatgcactgttcacagatctggtggtggacctccaagacacatttgtgtcagccatgaaaactctgtacctcgccgacacattccccactaacttcagggacagtgcaggtgcgatgaagcagattaatgattatgtggcaaagcagactaagggcaaaatcgtcgacctcctgaagaacttggacagcaatgccgtcgtaattatggtcaattatatattctttaaggccaagtgggagacatcgtttaatcacaaagggactcaggaacaggatttttacgtgacgagtgaaaccgtggtccgagtgccaatgatgtcgcgagaagatcagtaccactacctgctcgacaggaacctctcttgtagagtggtgggcgtgccatatcagggaaacgcgaccgctctctttatcttgcctagcgagggaaaaatgcagcaggtggaaaatggcctgtccgaaaagacgctgcgcaagtggttgaaaatgtttaaaaagagacagcttgagctgtatctgcctaaattcagcatcgaggggtcttaccagctggaaaaggtgctaccgtcacttgggattagtaatgtgtttaccagtcatgccgacctttcaggaattagcaatcacagcaacatacaggtgtctgagatggttcataaagccgtggttgaggttgatgaatctggcaccagagccgcagccgcgacgggcacaatttttaccttcagaagtgctaggctgaatagtcaacgtttagtgttcaacagaccctttctgatgttcatcgtggataacaacatcctgttccttggcaaagtaaatcgtccctag

SEQ ID NO: 8835 - DNA, 1626 bp, synthetic construct
  misc_feature 1..1626: note = source = /note="Description of Artificial Sequence: Synthetic coding sequence"
  source 1..1626: mol_type = other DNA
atgcggctgagccccttccacctgcagctggagttccacatgaaggagaaacgcgaggatcttcagatctcctggagtttcatttctgttcccgagatggctgtgaacattcagccaaaagcactgggcgaggatcaagtggctgaaacctctgcaatgtctgacgtgcttaaggatatactcaagcatctggccggctccgctagtccaagcgtggtcttgattactaaacctactactgtgaaggaagctcagaaccttcaatgcgctgcctctactgcacaagagtcctgccctcccaagccaccaagagcacacgagctcaagctcttggtgcggaacatacacgtgttattactcagcgaaccgggagccagtggtcacataaacgcagtctgcgttgtgcagctcaacgaccccgtacaacgcttttccagcactctgaccaaaaacacgcctgatttaatgtgggaggaagaattcacatttgaacttaacgccaaaagcaaggagctgcatctacagatttctgaggccgggagatcatcagaaggactgttggcaaccgcaaccgtgccacttgacctcttcaaaaagcagccaagcgggcctcaaagcttcacactaactagcggctctgcctgcggctcaagcgtcttgggcagcgttaccgctgagttttcatacatggagcctggggagttgaaaagctggccaatccctcctcctgtccctgccgccaagatcgaaaaagatcggacagtgatgccttgcggaactgtcgtgaccaccgtaaccgcagtgaagacaaaacctagagtggacgttggccgcgcttcgcccctttccagcgactctccagtaaaaactccgattaaagtgaaggttatcgagaaagacataagcgttcaagccatcgcttgtcgttccgcacctgtgtcaaagacactgtcttcctctgacaccgaattactggtcctgaacggcagcgatccagtcgcggaggtagccattaggcagctgtctgaatcgtctaagctgaagctgaagagcccacgcaagaagagtaccatcattatctctggaatctccaagacatcactgagccaggaccacgatgcagccctgatgcagggctacaccgcatccgtggacagcactcaccaagaggatgcgccgtctcatccagaacgcgcagccgcttccgcgcctcctgaggaagccgaaagtgcgcaggcaagccttgctccaaagccacaagaggacgaactggatagttgggatctagagaaggagccacaggccgccgcatggtcctcccaagtcctgctcgacccagacggggacgagctgtcagagtcttccatgtctgtcctggaaccaggcacggccaagaagcacaagggaggaattctcagaaaaggtgccaaactgtttttccggagacggcatcagcagaaggaccccggcatgtcccaatcgcataatgacttggtgttcttggaacagccagaggggtcacggaggaaaggcattaccctaaccagaatccttaacaaaaaacttctgagtcgccatcgcaataaaaatacaatgaacggagctccagtggagccttgcacttag

SEQ ID NO: 8836 - DNA, 993 bp, synthetic construct
  misc_feature 1..993: note = source = /note="Description of Artificial Sequence: Synthetic coding sequence"
  source 1..993: mol_type = other DNA
atggccttcctgcccagctgggtgtgcgtgctggtgggcagcttctctgcgagtctggccgggacctcaaacctgtccgagactgagcctcccctctggaaagaaagcccgggccaactgtctgattaccgcgttgagaattcaatgtatattataaatccatgggtctatctcgagaggatgggcatgtacaaaattatccttaatcaaacggctcgttactttgcaaagttcgcccctgataacgaacagaacatcctttggggcctgccattacagtatggctggcagtaccgcactggtcggcttgccgacccaactcggcgtacgaattgcggctatgagtccggcgaccacatgtgtatttccgtggactcttggtgggcggatttgaactattttctctcttcacttccatttctggctgcggttgactccggcgtcatgggtatttccagcgatcaggtccggttgctgcccccccccaaaaacgaacggaagttttgctacgatgtcagttcctgccgttcgtcgtttcctgagaccatgaacaaatggaataccttctatcagtatctgcaatccccgttctccaagtttgatgacctccttaagtatctgtgggccgcacacaccagcactttagcagataatattaagtccttcgaggatcgatatgactactactctaaggccgaggcacactttgagcggtcttgggttttagccgttgatcatttggccgccgtgctctttccaacgaccttgatccgttcttataagtttcagaagggaatgcctccaaggatcttgcttaatactgatgttgcgccctttatttccgacttcacggcgttccaaaacgttgtattggtcctgcttaacatgcttgacaacgtggataaaagcattggttacctttgcactgaaaagtctaatgtataccgtgaccactctgagagcagcagcaggtcatacggcaataattcctag

SEQ ID NO: 8837 - DNA, 813 bp, synthetic construct
  misc_feature 1..813: note = source = /note="Description of Artificial Sequence: Synthetic coding sequence"
  source 1..813: mol_type = other DNA
atggacagcctggagtggaactgggccctggtgtacgagctgagcggagaacatcacgacgaggagtggtccgttaagacctatcaggaggtcgcacaaaaatttgtcgaaacccaccccgagtttattggcatcaagatcatttactcggatcacagatccaaggatgtggccgtgatagcggagagtattcgtatggccatgggactacggattaagtttcccacagttgtggcaggtttcgatctggtcgggcacgaggacactggccatagtctgcatgactacaaggaggcccttatgataccagctaaagacggggtgaaacttccctatttctttcacgccggcgagacagactggcaggggacctctattgaccggaacatactcgacgctctcatgctgaacaccacacggatagggcacgggtttgcattgtccaagcatccggccgtccgcacttattcctggaagaaagacatcccaatcgaggtatgccctatctccaatcaggtcctcaaattggtctccgatctgaggaaccaccccgtcgcaaccctcatggccacgggacaccccatggttatcagctccgacgatccagctatgtttggcgctaaagggctgtcttacgacttctatgaggtcttcatggggataggcgggatgaaggcagatctccgcacattaaaacaactcgcgatgaattcgataaaatatagcacattactagagtctgagaaaaacacttttatggagatatggaaaaagcgctgggacaagttcattgcagacgtcgcgacaaaatag

SEQ ID NO: 8838 - DNA, 939 bp, synthetic construct
  misc_feature 1..939: note = source = /note="Description of Artificial Sequence: Synthetic coding sequence"
  source 1..939: mol_type = other DNA
atgggcgtgatggccatgctgatgctgcccctgctgctgctgggcatatccggtctcctgttcatatatcaggaggtgtctcgtctttggagtaagagcgccgtgcagaacaaggtggtggtcattacagacgcgattagcgggttaggcaaagagtgtgccagagtgttccacaccgggggcgccagactggtgctttgcggcaaaaactgggagaggctggagaacctttatgacgcgctgatttctgtagctgatcccagcaagcaaactttcacacctaaactcgtgctgttggacctgtcagatatcagttgcgtgcccgacgtggcgaaggaagtccttgattgttatggctgcgtggacatcctgattaacaatgcctctgttaaagtaaaaggaccagcgcataagatttctcttgaactggataaaaaaataatggacgctaattacttcggacccattactctgacaaaagcgctgcttcctaacatgatttccagaagaacagggcaaattgtcctagttaacaatatacagggtaaattcggaataccgttccgcacgacctacgccgcgagcaaacacgcggctctcggtttcttcgattgtcttcgagcggaggtggaggaatatgatgtggtgatctccacagtgtcgcctaccttcatccgctcttatcacgtttatccagaacaggggaattgggaggcctctatatggaaattcttctttcggaaactgacttacggtgtacatcccgtagaggttgcagaagaggtcatgcgaaccgtaagaagaaagaagcaagaagtgtttatggctaatccaataccgaaggccgccgtgtatgtgcgcacatttttccctgaattctttttcgccgtggttgcctgcggtgtgaaggaaaagcttaatgtgcccgaagaaggttag

SEQ ID NO: 8839 - DNA, 738 bp, synthetic construct
  misc_feature 1..738: note = source = /note="Description of Artificial Sequence: Synthetic coding sequence"
  source 1..738: mol_type = other DNA
atggccagcaccgccctgctggccctgtgcagcaccggcgccttcagtggactcgccgtcgaggccggggccggcgtgtgtcatgctacacccatctatgctggccatagctggcatcaagctaccttcagactcaatgtggccggctccaccctcagccggtatctgagggacctgttggtggctgctaatccggacctcctgcagcaggcactcccaagaaaggcaataactcaccttaaaaaacgctcctgctacgtgagtctggatttcgagggagacctccgagatccagctcgtcatcatccagcttccttcagtgtcgggaatggatgctgcgtgtgtcttagctctgagaggtttcgctgccccgaaccgatcttccagccaggtcttctagggcaggctgagcagggtctccctgccctggcttttcgggctctacagaagatgcctaagactctgaggacccgcctggctgatacggtcgtactggccgggggatctaccctgttcccgggattcgccgagaggctcgacaaggagctggaagcccagtgcaggagacatggctatgctgctctgagaccccacctggtcgctaaacatggtcgcgggatggcggtctggacaggggggtccatggtggcaagcctccattccttccagcggcgatggataacccgcgctatgtatcaggagtgtggaagtcggctcctgtacgatgtgtttaattag

SEQ ID NO: 8840 - DNA, 909 bp, synthetic construct
  misc_feature 1..909: note = source = /note="Description of Artificial Sequence: Synthetic coding sequence"
  source 1..909: mol_type = other DNA
atgcggcggtgggcctgggccgccgtggtggtgctgctgggcccccagttggtgctgctgggaggagtgggtgccagaagggaagcgcagcggactcaacagccaggacagcgcgcggaccctcccaacgcgaccgcatcagcctcatcgagagagggcttaccagaagctccgaaaccctctcaagcatcagggcctgaattctccgatgcccacatgacgtggctcaattttgtccgtaggcctgatgatggggctctgagaaagaggtgcggttcaagggacaagaaacctagagatctatttggtccacctggtcctccgggcgctgaggtaacggccgaaaccctgttgcatgaatttcaggaattgctgaaggaagccaccgaacggcgtttcagcggcctcctggaccccctgctcccacagggcgccggtcttagactggtcggcgaggcatttcattgccggctccaggggcctagaagggtagataagcggacactagttgagctgcatgggttccaggcacccgccgctcagggcgcttttttaaggggcagtggacttagccttgccagcgggcgctttaccgcgcctgtgtcaggaattttccaatttagcgcctccctccacgttgaccattctgaacttcagggaaaagcgaggttaagggcacgtgatgtcgtctgtgtgctgatctgtattgaatctctctgccagcgccacacttgtctggaagctgtcagcggcctggagtcaaactctagagtgttcactctccaggtgcagggcttgctccagctgcaagctggccagtacgcgtctgtattcgtggacaatggatctggggccgtgttgactatacaggccgggtcctcattttcgggcctcttgcttggcacatag

SEQ ID NO: 8841 - DNA, 1416 bp, synthetic construct
  misc_feature 1..1416: note = source = /note="Description of Artificial Sequence: Synthetic coding sequence"
  source 1..1416: mol_type = other DNA
atggacagcgcccccctgttcccccggccccacctgttccagaacctcctgctcttcctgtgggcactgctcaattgtggcctgggagtctccgctcagggaccaggcgagtggacaccatgggtgtcttggactaggtgtagttcctcctgcggccgaggtgtgagcgttcggtcacggcgctgcctgcgtctgcccggcgaagagccctgttggggtgactctcacgagtatagactttgccaacttcctgattgcccacccggcgctgtgccctttagggatcttcagtgtgccctctataatggaagacctgtactagggacacagaagacctaccagtgggtccctttccacggcgcaccaaaccagtgcgatctgaactgcctggccgaagggcacgccttctaccacagcttcggacgggtactggacggcacagcctgttcaccgggggcccagggagtgtgtgtggcaggccgctgcctgtcagcagggtgcgacgggttgctaggctcaggggcacttgaggaccgctgcggccgctgcggtggcgcaaatgacagttgcctgtttgttcagagagtgttccgcgacgccggagcctttgctggttactggaatgttacccttatccccgagggtgctcgtcacatccgcgttgaacatagaagccggaatcatctggcactcatgggaggcgatgggcgctatgtcctgaacggacactgggtagttagtccacccggaacatacgaggctgccggtacccatgtggtgtatacccgggatacagggccacaagaaactttgcaggctgctggccctacatcccacgatcttttgcttcaagtgttgctccaggagcccaaccctggtatcgaattcgaattctggctgccacgggagcggtacagcccatttcaggcgagggtgcaggctctgggctggccgttgaggcagcctcagccgcggggagtggagccccagccccccgctgctccagcggtgaccccagcacagacacctacactggccccagacccctgccctccttgccccgacaccagaggccgggcccaccgattacttcactattgtgggagtgacttcgtcttccaggcccgcgtgctgggccatcaccatcaagctcaagagactcggtacgaagtgcgaatccaactggtgtacaaaaatcgctcacccctgcgtgcccgggaatatgtctgggcccccgggcattgcccctgtccgatgttggctccccatcgagactatcttatggccgtgcagcggctagtcagccccgatgggacgcaagatcagctgcttctacctcacgctgggtacgccaggccatggtcccccgctgaggacagcagaataagactcacagcccgccgctgcccaggttag

SEQ ID NO: 8842 - DNA, 222 bp, synthetic construct
  misc_feature 1..222: note = source = /note="Description of Artificial Sequence: Synthetic coding sequence"
  source 1..222: mol_type = other DNA
atggccccccagaccctgctgctggtgctggtgctgtgcgtgctgcttcttcaagctcaaggaggataccgggacaagatgaggatgcaaaggattaaagtctgtgaaaaaaggccatcaattgatctttgtatccatcactgctcttactttcaaaagtgcgaaacaaacaagatctgctgctctgctttctgtggtaatatatgcatgagcatcctttag

SEQ ID NO: 8843 - DNA, 2349 bp, synthetic construct
  misc_feature 1..2349: note = source = /note="Description of Artificial Sequence: Synthetic coding sequence"
  source 1..2349: mol_type = other DNA
atggcccgggcccgggccggcgccctgctggccctgtgggtgctgggcgcagcagcccaccctcagtgtttggactttagacctccatttcgcccaacccagccactgcgcctgtgcgcccagtattctgacttcggctgttgtgatgaaggccgcgatgccgaattaactcgaaggttctgggcactcgccagccgcgtggacgccgccgagtgggccgcgtgtgcaggctacgctcgggacctgttatgtcaggaatgctccccctacgctgcccatctttacgacgcagaggatccattcacacctcttagaacggtccctggactatgtcaggactactgccttgacatgtggcacaaatgtcgcggtctatttcggcacctaagcaccgaccaggagctctgggcactagagggtaaccttgccagattttgtcgatatctttcgctggacgacactgattactgtttcccttatcttctcgtaaataagaatctgaattccaacctggggcatgtcgttgccgatgccaagggctgtttgcaactctgcctggaggaggtggctaatggtctcagaaaccccgtcgccatggtacacgccagggacggcacccatagattttttgtcgctgagcaggtaggactggtctgggcttacctccccgatcgtagcagattgggaaagccattcctgaacatatctagagtggtactcacctcgccctgggaaggggacgagcgcggattcctcggcatcgctttccatccctcttttcagcataaccgaaggctgtatgtttactattctgtcggaattagaagctccgagtggattcgaatcagcgagtttcgggtctcagaagacgacgagaatgccgtagaccacagctcagagcggattatcctagaagtgaaggagcctgctagcaatcataacggggggcagctgctatttggagacgatgggtacctgtatatcttcaccggcgatggggggatggccggggacccgtttggtactttcggcaacgctcagaataagtcagccctcctcggaaaagtgctgcgtatcgacgtagaccgcaaagaacggggtctgccttatgggattccaccagacaaccccttcgttggggacccagccgcccaacctgaggtttacgcactgggcgtccgcaatatgtggagatgtagcttcgatcgcggcgatccgtcaagcggaaccggcaggggacgcctcttttgcggcgatgtcgggcagaataagttcgaggaggtcgacgtggtggagaggggtggcaactacggctggagggcaagggagggctttgagtgttacgaccgaagcctgtgcgcgaatacttcattgaatgacttgctacctatatttgcttacccccatactgtgggaaaaagcgtaactggaggatatgtgtaccgggggtgtgaataccccaacctcaacggcctttacattttcggagatttcatgtcagggagactgatgtctctgcaggaaaatcccggtaccggtcagtggcagtattccgaaatctgtatgggacatggccagacatgtgagttccccggactcattaacaactattacccttatattatcagcttcggcgaagatgaggcgggagagctgtattttatgtcaacgggcgagccatccgccacggccccccgtggtgtggtttacaaaattatagacgcgtcccgcagggcaccccctggtaaatgtcagatccagcccgcccaggtgaagatccggtctcggctcattccctttgtgcccaaggagaagtttatacccaaaaccaggtccaccccgcggcccacagcgagggcccctacccgcgctcccagacgtggccggcccacagccgcgcccccagcgcccacaccaaggcctgctcggccgacccaacaacctggatcgcgtcgcgggggcggaaggcgccggggcaggctcaatagtgcatctagagctttcagggatggcgaagtgcggctcgtgcgacccgctggactgagttctggcagtggacgggtcgaggtctttgtcggaggaaggtggggaacagtgtgcgatgactcctggaatatatccggggccgctgtagtgtgccgccaactgggatttgcttatgccgtgcgggcagtgaagagagcggaatttggacagggcggcagccttcctatactgctggatgacgtgcggtgtgcagggtgggaaaggaatttgttagagtgtcagcacaatggggtggggacacacaactgtgaacatgacgaagatgccggggtggtgtgctctcaccagaaccctgatctgtag

SEQ ID NO: 8844 - DNA, 1317 bp, synthetic construct
  misc_feature 1..1317: note = source = /note="Description of Artificial Sequence: Synthetic coding sequence"
  source 1..1317: mol_type = other DNA
atgcaccccctgcccggctactggagctgctactgcctgctgctgctgttttcacttggcgtccaggggagtctaggcgcgccctctgcagcaccggagcaggtgcatctctcgtatcccggtgaacccgggagcatgaccgtgacgtggacaacttgggtgcccacgagaagtgaagtccagttcggcctgcagccctctggcccattgccgctccgtgctcagggcacttttgtgccctttgtggatggtggaattcttaggagaaaactgtacatccacagagtgacactgaggaagctccttcccggcgtgcagtatgtgtaccggtgcggatccgcacaaggctggagtcggcggttccgattcagggccctgaaaaatggcgcccactggtccccacggctggcagtcttcggtgacttgggagctgacaaccccaaggcggtgcctaggctcaggagggacacccaacaggggatgtacgatgccgttctgcacgtgggggacttcgcctacaacctcgatcaagacaatgcaagagtcggtgatcggtttatgaggctgattgaacccgtggcagcatctttaccctacatgacctgtcccgggaatcatgaagagcgctataactttagcaactataaggccagatttagcatgcctggtgataatgaaggactatggtactcttgggacttaggtccggcgcacataatcagcttttcaacagaggtctatttcttcctccactatgggaggcacctggtgcagaggcaatttcggtggctcgagtccgacctgcagaaggccaacaagaatagagccgcccgaccgtggatcattaccatggggcaccgtcccatgtactgttccaatgccgacctggacgactgtacgaggcatgagagtaaggtccgaaagggcctgcagggaaaactgtacggactggaagacctgttctataagtatggcgtggacctgcagctatgggcacacgagcacagttatgagcgcctctggccaatctacaactatcaagtcttcaatggctctcgcgaaatgccatatacaaacccacgagggccggtgcatattatcacgggctctgctggctgtgaagaaaggctaacaccgtttgccgtattcccaagaccttggagcgctgtccgggtgaaagagtatgggtacacaaggctgcatatcctgaatgggacacacatccacatccagcaggtctctgacgaccaagacggcaagatcgtggatgacgtgtgggtggtcaggcctcttttcggtcgccggatgtatctctag

SEQ ID NO: 8845 - DNA, 411 bp, synthetic construct
  misc_feature 1..411: note = source = /note="Description of Artificial Sequence: Synthetic coding sequence"
  source 1..411: mol_type = other DNA
atggcccggaccaagcagaccgcccggaagagcaccggcggcaaggcaccacgtaagcagcttgccaccaaagccgcgaggaagagcgccccagcaactggaggagtgaagaagccacaccgctatcgaccaggcaccgttgctttacgcgaaatcaggagatatcagaaatccacagaactcctgataagaaagctgccttttcagcgccttgtgagggagatcgcccaggacttcaagaccgaccttcggttccagagctctgccgtgatggccctccaggaggcctctgaggcatacttggttggactctttgaagacacaaacttatgtgccatacatgcaaaaagggtaactattatgcctaaagacatccagctcgcaaggaggataaggggcgagagagcctag

SEQ ID NO: 8846 - DNA, 1209 bp, synthetic construct
  misc_feature 1..1209: note = source = /note="Description of Artificial Sequence: Synthetic coding sequence"
  source 1..1209: mol_type = other DNA
atggccgcccggcccggccccctgtggctgctgggcctgaccctgtgtgctcttggcgggggaggccctggtctcaggcccccacccggctgtcctcagcgtcggctcggcgccagagagaggcgcgatgtccaacgagagatcctggccgtgctcggtctaccagggcggccgcgaccacgtgcaccgccagcagcttcccggttgccagcgagcgccccgttatttatgctggacctatatcacgcaatggcaggcgacgacgatgaggacggcgctcccgccgagcaaaggttgggccgagccgacctggtgatgtccttcgtgaacatggtcgagcgggaccgggccctggggcatcaagagccccattggaaggagttcagattcgacctgacccaaatccccgccggtgaagccgtgacagctgcagagtttaggatttataaggtccccagcattcacctactgaaccggaccctgcacgtgtccatgttccaggtggtgcaggagcagtcaaaccgggagagcgatcttttttttttggacctgcagacactccgtgccggagacgaagggtggctggtgttggacgtaaccgccgcatcagactgctggctgttgaaaagacacaaggatctgggcctgcggctctacgttgaaaccgaagacggccatagcgtcgaccctggtcttgcaggcctcctcggacaacgggctccacgatcgcagcaacctttcgtagtcacattcttccgagctagcccatctcctatcagaacccctcgggccgtgcggcctcttcggcgaagacagcccaagaagtctaatgagttgccacaagccaatcgcctgcccggcatttttgatgacgtgagagggagccatggcaggcaagtgtgtcgcagacacgagctctacgtgagcttccaggatctgggatggttagattgggtgatcgcgccacagggctacagcgcctattattgtgagggagagtgttcttttccgctggacagctgtatgaacgctactaatcacgcaatattgcaaagtcttgtacatttgatgaaaccaaacgccgttcccaaggcatgttgcgcaccaacgaagctgtctgcgacaagcgtgctgtactatgatagcagcaataatgtgatcctacggaagcaccgaaacatggtggtgaaggcgtgtggatgtcactag

SEQ ID NO: 8847 - DNA, 957 bp, synthetic construct
  misc_feature 1..957: note = source = /note="Description of Artificial Sequence: Synthetic coding sequence"
  source 1..957: mol_type = other DNA
atggccgccgccgccctgcccccccggcccctgctgctgctgcccctcgttctacttctgagcgggaggccaacgcgcgcagacagcaaagtgtttggtgatcttgaccaggtgcgaatgacatctgaaggatcagactgtcgctgtaagtgtattatgcgccccctgtccaaggatgcctgttctcgcgtgagatctggtcgagcccgtgttgaagatttttataccgttgagaccgtctccagtggaaccgattgccgctgctcatgtacagccccaccctcctcacttaatccctgcgaaaacgagtggaaaatggaaaagctgaagaaacaggctcccgaactcctaaagagcatcaaagctaatctgtcccgcgaaaacgaggtcgtcaaagactctgtgagacatctatcggaacaattgaggcactatgaaaatcactccgctatcatgctaggtattaaaaaggagcttagtagactgggtttgcagctcctgcagaaggatgcagcagctgcacccgccactcccgccaccggaacaggaagcaaggcacaggataccgctaggggcaaaggaaaggatatcagcaagtatggctctgtgcagaagtccttcgccgaccgtggtttgccaaagcctccgaaggagaagctactgcaggtggaaaagcttcgcaaggaaagcgggaaggggtctttcctgcaacctaccgctaagccaagagctttggctcaacagcaagccgtcattagggggttcacttattacaaggccggcaaacaagaggtcaccgaggccgtggctgacaacaccctccagggtacctcatggttagagcagttgccgccgaaggtggaaggccgttcgaacagcgcggagcccaatagcgccgagcaggacgaggctgagccgcggtcttcggagagagtggaccttgcgtcagggacctag

SEQ ID NO: 8848 - DNA, 402 bp, synthetic construct
  misc_feature 1..402: note = source = /note="Description of Artificial Sequence: Synthetic coding sequence"
  source 1..402: mol_type = other DNA
atggccctgggcgtgcccatcagcgtgtacctgctgttcaacgccatgaccgctctgacagaagaagctgctgtaaccgtcacccccccgattaccgcacagcaggcagacaacatcgaaggtcctatagccctcaagttcagccatttgtgcctagaagaccacaactcctactgtatcaatggcgcttgtgcttttcatcacgaactcgaaaaggctatctgtcgctgtttcacaggttatacaggggaacggtgcgagcatcttacactgacctcatatgccgtggactcgtatgagaaatacatagcgatcggcatcggagtcggcctgctgttatcagggtttttggtgatcttttactgctacatccgtaagaggtatgagaaagataagatctag

SEQ ID NO: 8849 - DNA, 651 bp, synthetic construct
  misc_feature 1..651: note = source = /note="Description of Artificial Sequence: Synthetic coding sequence"
  source 1..651: mol_type = other DNA
atgagcagcgaggccgagacccagcagccccccgccgccccccccgcagcccctgcactgagtgcggccgatacaaaacccggcacaacaggctcaggcgcgggatccggaggccctggcggcctgacttccgcagctccagcaggcggcgacaagaaggtgattgctacaaaggtcctgggaacagtgaagtggtttaatgtgcgaaacggttacggtttcataaatagaaatgacacgaaggaggacgtgtttgtacaccaaggagccgaggccgcgaatgtaaccgggccaggcggcgttccagtccagggctcaaagtacgcggccgaccgaaatcactaccgtagataccccaggcgtcggggtcctccacgaaactaccaacaaaactaccagaattcggagtccggagagaagaacgagggcagcgagtcggccccggagggccaggctcaacagcggagaccctacagaaggcgccgattcccaccttattatatgagaaggccttacggccgccgtcctcagtacagtaaccctcccgtccagggggaggtgatggagggcgccgataatcagggcgctggagagcagggaagaccggtgagacagaatatgtacagaggttacagaccccgcttcaggtag

SEQ ID NO: 8850 - DNA, 756 bp, synthetic construct
  misc_feature 1..756: note = source = /note="Description of Artificial Sequence: Synthetic coding sequence"
  source 1..756: mol_type = other DNA
aacgactggagcgccgaccagctgtacctggagaccaccggcaagtctaggaccctgcagtctggactggcgttactttatggatttctgccggattttgactggaagaagatatactttagacaccaacccagcgctctgttctgcagcggatcttgctattgtcccgtccggaatcagtatctcgaaaaagagcagaggcggcagtacctccttcgcctcaaaaatagccaattggagaagacctacggggagatggctaagatcgtcgacgtgcccaccaaacagctcagggcagccaatcctatcgatagtatgctctgtcacttttgccacaacgtgtccttcccttgcactcgcaacggctgcgtcgacatggagcactttaaagtgatcaaaacgcatcagatcgaggatgagcgagagaggcgagaaaaaaagctgtatttcggatacagcctgcttggagcccacccgattctgaaccagactattgggcgcatgcaaagagccaccgaaggtcggaaggaggaactctttgctctttactccgcccatgacgtcacactgtccccagtgctctctgctctcggcttgagtgaagcccgcttccctagattcgcagcgcgggtcaatattccatctggtttttttactatggcaagtatgagccactccacacctctcagcgccaaaacaaccacctcagtcctccccagcccgtgcgcccgcttaaaaacctggagcgccctgtag

SEQ ID NO: 8851 - DNA, 576 bp, synthetic construct
  misc_feature 1..576: note = source = /note="Description of Artificial Sequence: Synthetic coding sequence"
  source 1..576: mol_type = other DNA
atggccgccccccggggccgggccgccccctggaccaccgccctgttgctgctgctcgcatcacaagtcctctcccctggttcctgtgccgacgaggaggaggttcctgaagaatgggtcctgctccacgtggtacagggtcagatcggtgccggcaactattcatacctacgactgaaccatgaaggaaagatcgtcctgcgaatgaggagtctgaagggcgacgccgacttatacgtgagcgcctcttcactgcacccttctttcgatgactatgagctgcaatcggccacatgcggacccgatgctgtttctattcccgctcacttcagaagaccggtgggcatcggcgtatacggacatcctagccacctcgagtccgaatttgaaatgaaagtatattatgatggaactgtggagcaacaccccttcggagaagccgcctatcctgccgacggtgcagacgccggtcagaaacacgcaggagctccagaggatgcttctcaagaagaggaaagtgtgctgtggactatcctgatttccattttgaaactggtcttggaaattctattctag

SEQ ID NO: 8852 - DNA, 2301 bp, synthetic construct
  misc_feature 1..2301: note = source = /note="Description of Artificial Sequence: Synthetic coding sequence"
  source 1..2301: mol_type = other DNA
atgggccggcggcggctgctggtgtggctgtgcgccgtggccgccctgctgagcggcgctcaagcacgcgggactcccctgctcgcacgccccgccccacctggtgccagccgttactccctttacactaccgggtggaggccacgactgagaccaggaccccataaggccctgtgtgcttatgtggtacatagaaacgtgacctgtatactacaggagggcgcagagagttacgttaaggccgagtatcgtcagtgtcgttggggacctaagtgtcctggaactgtgacataccgcacggttctgagacctaagtataaggtcggatacaagactgtgactgatctggcttggcgatgctgccctggattcaccggcaaaaggtgccctgaacacctgactgatcacggtgctgctagcccacaactcgagcctgaaccacagatcccgagcggtcagcttgatcccgggccacgcccaccaagctatagcagggctgccccgagcccacatggaagaaagggcccaggcctgttcggggaacgactcgagcgactggagggagatgttcagcggttggcgcagacctacggcacactctccggccttgtagcttcccacgaggaccctaaccggatgaccgggggacctagggctcccgcggtccccgtgggattcggtgtgattcctgagggccttgtggggccaggagaccgagcacggggcccactcactccacctcttgacgaaatcctttccaaggtgacagaggtctccaataccctgcagaccaaggtgcagctgctggacaaggtccatggactcgcccttggccacgaagcccatcttcagaggctccgggaagctccgccctccccccttacctccctcgcactattggaagagtatgttgatcggagactccatcgcctgtgggggagcctcctggatggattcgagcagaagcttcagggcgtgcagtcggagtgcgatctgcgcgttcaagaagttaggcgccagtgcgaggagggacaggccgcctcaaggaggcttcatcagagtttggatggccgggaattagccctgcgccaggagctgtcccagctgggaagccagttacaaggcctgagtgtgtcaggtaggggatcttgttgcgggcagctagcactaattaatgcgcggatggacggattagaacgcgccttacaggccgtcaccgaaacacaaaggggacctggcgctcccgccggagatgaacttactcgcctatccgcggccatgttggaggggggggtggacggcctgctggaaggtctcgaaacattaaacgggaccgagggaggcgctcgcggctgctgtctgagactcgatatgggtgggtggggcgtgggcggtttcggcacaatgctggaagaaagagtgcagagcctggaagaaaggttggctacacttgccggcgaactcagtcatgactctgcatccccaggccgcagcgctcggccactcgtccagaccgaactggccgtgttggaacagcgcctggtgtctctcgagacctcctgtaccccttccaccacctctgcaatcttggacagtctcgtcgcggaggtgaaagcctggcagtccagatccgaagccctgttgcgacaggttgcatcccacgccgcactactccagcagctcaatggcactgtcgcggaggtgcaaggacagctcgctgagggtaccgggtccagtctgcagggggagataaccctgctgaaagtaaacctgaattccgtcagcaaatcactaacgggactgagcgattccgtgagtcagtactccgatgcttttttggctgcgaatacttccctggatgaaagggagaggaaggtggaagccgaagttcaagctattcaggagcaggtttctagtcagggcagccggttacaggctggccacaggcaggttttaaatcttcgcggcgagttagagcagctgaaagctggggtagccaaagtcgcctctggtctcagccgttgccaggacacagctcagaagctccagcatacagtcgggcattttgaccaacgagttgcacaggtcgaaggggcctgtagaagactcggtctcttagccgcaggactcgatagtttgcccacagagcctctcagaccaagagagggtctgtggtctcacgttgatcagctcaaccgcactttggcccagcatacccaagacatcgcccgattgcgggacgatctcctggattgccaggctcagctggccgagcaggtaagacccggccaggctaactag

SEQ ID NO: 8853 - DNA, 1251 bp, synthetic construct
  misc_feature 1..1251: note = source = /note="Description of Artificial Sequence: Synthetic coding sequence"
  source 1..1251: mol_type = other DNA
atgtaccggcacggcatcagcagccagcggagctggcccctgtggactaccatctttatttttctgggggttgccgccatccttggcgttaccatcggcctgctggtccacttcctcgccgtggaaaagacttattactatcagggcgacttccacatttcaggagtaacatacaacgataactgtgagaatgctgcctcccaggcctctactaatctgagcaaggacattgagacaaaaatgctcaatgccttccaaaatagctctatctacaaggaatacgttaaatctgaggttattaagctgctgcccaacgcaaatggatccaacgtgcagctgcaactgaaattcaagtttccccctgctgaaggcgtctccatgcgcacaaaaatcaaggccaaactacaccagatgttgaagaataacatggcgtcatggaatgctgtgccagcttccatcaaattgatggagattagtaaagcagcatccgaaatgctcacaaataactgctgcggtcggcaagtggctaactccattatcaccggaaacaaaatcgtgaacggaaaatcttcgctagaaggcgcttggccatggcaggcatctatgcaatggaaagggcggcactattgcggagctagtctgattagctctcgctggcttctgagtgcagctcattgttttgctaaaaagaacaatagtaaggactggacagtgaatttcggcattgtcgtaaacaagccttacatgacccgtaaggttcaaaatattatctttcacgaaaactattcaagcccaggccttcacgacgatattgccctggtccagctggcagaggaagtctcctttaccgagtacatccggaaaatctgccttcccgaggcaaaaatgaagttgtccgaaaacgacaacgtggtggtcactgggtggggaactttgtatatgaatggctcgttcccagtgattctgcaggaagattttttaaaaataatcgataataagatatgcaatgcatcctacgcttactcaggattcgtcacagataccatgctctgtgctggcttcatgtctggggaggctgatgcatgtcagaacgactccggggggccactagcctatcccgattcacgtaatatttggcatcttgtgggcattgtcagctggggagatggatgcggcaagaaaaacaagcccggcgtttacacccgtgtcacatcctaccgcaattggattaccagtaagaccgggttgtag

SEQ ID NO: 8854 - DNA, 639 bp, synthetic construct
  misc_feature 1..639: note = source = /note="Description of Artificial Sequence: Synthetic coding sequence"
  source 1..639: mol_type = other DNA
atgctgagcagcgtggtgttctggggcctgatcgccctgatcggcactagcaggggatcttatccattctcccattccatgaagcctcatttacatccgcgactctaccatggctgttacggcgacatcatgaccatgaaaacgtcaggcgccacatgtgatgccaattcagtgatgaactgtgggatcagggggagtgaaatgtttgctgaaatggaccttagggcaattaagccttaccagacactgatcaaagaagtgggacagcgtcattgcgtggaccccgctgtaatcgccgcaatcatcagtagagaaagtcacggcgggtctgtgttgcaagatggctgggatcatcgcgggttgaagttcggacttatgcagttggacaaacagacataccaccctgtgggcgcctgggacagcaaggaacatctgtctcaggcaaccgggatcctcaccgaaaggatcaaagctattcaaaagaagttccctacctggtccgtggcccagcatcttaaaggaggccttagcgctttcaagtcagggatcgaggcaattgccacccccagcgatatcgataacgacttcgtgaatgacatcatcgctagggccaaattctacaagcgtcagagtttttag

SEQ ID NO: 8855 - DNA, 378 bp, synthetic construct
  misc_feature 1..378: note = source = /note="Description of Artificial Sequence: Synthetic coding sequence"
  source 1..378: mol_type = other DNA
atggcccggagcgccaccctggccgccgccgccctggccctgtgccttttgcttgccccacccggactggcatggtataagcccgcagctggacacagcagctactcagtgggccgcgcagcaggcctgctatcaggattgcggcggtccccctatgcacggaggtctcagccatacagaggagctgagccccccggcggcgcaggggcctcccctgaattgcagctccatcccagactcaggagtttagcagtgtgcgtccaggatgtggcccctaatcttcagaggtgtgaaaggttgccggacggcaggggaacatatcagtgcaaagctaatgtgttcctgtcactgcgggccgccgattgcctagcagcctag

SEQ ID NO: 8856 - DNA, 867 bp, synthetic construct
  misc_feature 1..867: note = source = /note="Description of Artificial Sequence: Synthetic coding sequence"
  source 1..867: mol_type = other DNA
atgaacaacctgagcttcagcgagctgtgctgcctgttctgctgcccgccttgtccgggtaagattgcttcaaaattggccttcctgcctcccgatcctacctataccttaatgtgcgatgagagcggatcacgctggaccttgcacctctccgagcgcgctgattggcagtacagcagtcgtgagaaggacgcaattgaatgttttatgacaaggacttcaaaggggaacaggatagcttgcatgttcgtgcggtgttctcctaacgccaaatatacattgttgttttctcacgggaacgctgtagatttaggccagatgagtagcttttacatcggcctgggcagcagaatcaactgtaacattttttcctatgattactctggatacggggcaagtagcggtaagcctacagagaagaacctctatgccgatatcgaagcagcctggcttgcactgcgaacccgttatgggatcagacccgagaacgttattatctacggtcaaagcattgggaccgtgccatctgtggacctggctgctcggtacgagtccgctgcggtgatcctgcacagccccctaaccagtggaatgcgggtcgccttccccgacacgaagaagacctattgcttcgacgcattccccaacatcgataaaataagtaaaattacctccccagtgctcatcatccacggtaccgaagatgaggtgattgacttctcccacggactagccctgttcgaacgatgccagcgtcccgtggaaccattatgggtcgagggggcaggacacaatgacgtggagctgtatgggcagtatctggaaagactgaagcagtttgtgtctcaggaactcgtcaatctctag

SEQ ID NO: 8857 - DNA, 417 bp, synthetic construct
  misc_feature 1..417: note = source = /note="Description of Artificial Sequence: Synthetic coding sequence"
  source 1..417: mol_type = other DNA
atggtggcccccgccgcccgggtgttcctgcgggccgtgcgggccgccttaacaagcacagtccctgatcttctgtgcttgctagcccgcgggtcaccaagaggtctggccagtggacgtctgccacttgcagttcatagcgctcagcatggccctggctcgggcgctccatggttacggatagctcggcgagctctgaggtttgttctgtctaaacactggggcgacgattgctatctcacgaataggctttggcaggatttaaagcccccatctcacgttgagaacggtcaggagctcagactcgccccccccgtgcagtgggcactgcaagtccagggaaaccagctgcaaaccgccgtactgtgtctacgtatggcgcccccggaaccagcgggaagtaggcagcgcatttag

SEQ ID NO: 8858 - DNA, 1332 bp, synthetic construct
  misc_feature 1..1332: note = source = /note="Description of Artificial Sequence: Synthetic coding sequence"
  source 1..1332: mol_type = other DNA
atgggcggcccccgggcctgggccctgctgtgcctgggcctgctgttacccggcgggggtgctgcttggtccattggcgccgcccctttcagcgggagacgaaattggtgctcttatgtcgttacccgcacaatctcatgccacgtacagaacggaacttatctgcaacgggtgcttcaaaactgcccttggcctatgtcttgtccgggcagcagctatcgtactgtggtgagaccaacatacaaggtgatgtacaagatcgtgaccgcccgggagtggcgttgctgtcctgggcacagtggagtgtcgtgcgaagaggttgccgcatcttcagcatcactggagcccatgtggtcggggagtaccatgcgtcgcatggcgttgagaccaactgccttctctgggtgccttaactgcagcaaagtctcggagctgacagaacggttgaaggttcttgaggcaaaaatgactatgttgacagtcatcgaacagccagtccctcccacaccagccacgccagaagaccccgctccactgtggggacccccacccgcccaggggagccctggcgatggcgggctgcaggaccaggtcggggcatggggcctgccaggacccaccggccccaagggggacgccggtagtagggggcctatgggcatgcggggacccccaggtccacagggccccccaggctcccccggcagggccggcgctgtgggtacacccggagaaagagggcctcccggtccacctggcccacctggtccaccaggccctcccgcaccggtagggcccccacatgcccgtatctcccagcatggcgatccacttctctctaatacattcaccgaaacaaataaccactggccacagggtcctaccggacccccaggccctcccggccccatggggcctcccgggccccccggaccaaccggagtgccgggcagcccggggcacattggcccccccggcccaactggccctaaaggcatctccggccacccgggagaaaagggtgagcgtggcctgaggggcgaacctggacctcaaggcagcgccggacaacgtggtgagccaggccctaagggcgaccccggcgaaaaatcacactggggcgagggacttcatcaactgcgcgaagcgttgaagatcctcgccgagcgagtgttaattcttgaaacaatgatcggcctgtacgaacccgagctcggtagtggtgcaggcccagccggtacgggcactccctccctcctgcgcggaaagagaggcggccatgcaaccaattatcgcatcgtggcacctcgatcaagagacgagcggggttag

SEQ ID NO: 8859 - DNA, 717 bp, synthetic construct
  misc_feature 1..717: note = source = /note="Description of Artificial Sequence: Synthetic coding sequence"
  source 1..717: mol_type = other DNA
atggtgctgctgctgctggtggccatccccctgctggtgcacagctcacgtggcccagcgcactatgagatgctcggtcgttgtcggatggtctgcgacccacacggccctcgcggacccgggccggatggagcaccagcctctgtgcctccattccctccaggcgccaagggcgaagtcggccgacgcggaaaggcgggtctgcggggcccccctggtcccccaggtccacggggcccgcctggcgaaccaggtaggccaggtccccccgggccacccggacctgggccgggaggagtggcgcccgctgccggctatgtgccgcgcattgctttttatgctggactgagaagaccgcacgagggatacgaagtcttgagatttgacgacgtagttaccaatgtgggaaacgcctatgaagccgcatctgggaagtttacttgtcctatgcctggggtttacttttttgcctatcacgttctgatgcggggcggggatggcaccagcatgtgggccgatctgatgaaaaacggacaggtgcgggccagtgcaattgcccaggatgctgatcaaaactatgactacgcctccaattctgtgatactccatcttgacgtgggggatgaggtctttatcaagcttgatggcggtaaggttcacggcggcaatacgaataaatactcgacgttttctgggttcatcatttacccagactag

SEQ ID NO: 8860 - DNA, 282 bp, synthetic construct
  misc_feature 1..282: note = source = /note="Description of Artificial Sequence: Synthetic coding sequence"
  source 1..282: mol_type = other DNA
atgaagctgttcctggtgctgatcatcctgctgttcgaggtgctgacagacggggcaagactgaagaagtgttttaataaggtgacaggctactgcagaaaaaagtgcaaggttggcgagcgctacgagattgggtgtctaagcggtaaactgtgttgcgccaacgacgaggaggagaaaaaacatgtgtccttcaagaaaccccatcagcactcaggggagaaattgtctgtcttgcaggactatataatactgccaacaatcaccatttttaccgtctag

SEQ ID NO: 8861 - DNA, 609 bp, synthetic construct
  misc_feature 1..609: note = source = /note="Description of Artificial Sequence: Synthetic coding sequence"
  source 1..609: mol_type = other DNA
atggtgcggatctggaccaccatcatgatcgtgctgatcctgctgctgaggattggacctaacaaaccctctctgtctggcagacaagcccctgcccaagcacaaacctccgatctggtgcccagtttgttcccattgggcctttgggccccggggttctgtacgtggagctctcctgacgaagataaagtgtggcgcccagcctgggagcaaggcccaaaaggcgagccggacccaagagggctcaggcctcgcaaaccagtgccagggactggaaacagagactctgggactcggcggagactgcaggatgcgaccgagcaggatccacgtcctggcaatgatgtagcctccgcagaaaccgccgggcctccatcacctagcggaattcgcgctcaggatcgggcccctcgacatcggagagccccccccgcaagaatgccagttgctccagctccaagtgcggacggggaacctctgcaagagcagggtggtgggctgttccatcgaactagatctgtgtataacggactggagctgaacacctggatgaaagtagaaagactgtttgtcgagaagttccatcagtccttcagcctggacaattag

SEQ ID NO: 8862 - DNA, 342 bp, synthetic construct
  misc_feature 1..342: note = source = /note="Description of Artificial Sequence: Synthetic coding sequence"
  source 1..342: mol_type = other DNA
atgctgccctgcctggccctgctgctgctgatggagctgagcgtgtgtacagttgctggtgacggcggagaggaacagaccctaagtacagaggccgaaacgtgggtcatcgtagctctcgaggagggcgcagggccttctattcagttacaactccaggaagtcaagactggcaaggccagccaattctttggactgatgggaaaaagggtgggcggccgcccacttatccaacctaggcgaaagaaagcctatcaacttgagcacaccttccagggcctgctaggaaaacgaagcctctttaccgaggggcgcgaggacgaggcacagggttctgagtag

SEQ ID NO: 8863 - DNA, 1269 bp, synthetic construct
  misc_feature 1..1269: note = source = /note="Description of Artificial Sequence: Synthetic coding sequence"
  source 1..1269: mol_type = other DNA
atgggccccgcctggctgtggctgctgggcaccggcatcctggcctccgtgcactgtcagccacttttagcccatggagataagtcacttcagggcccacagccaccccggcatcaattatcggaacctgcccctgcttaccacagaatcaccccaactatcactaacttcgctctgagactgtataaggagctcgctgccgacgcccctggaaacattttcttttctccagtgtccatttcgactaccttagcgctgctttctcttggggcacaggctaacacttcagctctgattctggagggccttggtttcaatttgaccgaaacacctgaagcagatatccatcagggcttccggagccttctacacaccttggctctgccgagtcctaaacttgaactaaaggtcggcaactcactgttccttgataagcgtctcaagccgcgacaacactacctagactcaatcaaggaactctacggagcttttgccttcagcgccaatttcacagattctgtgaccaccggccgacaaataaacgattatcttagacgccagacctatggacaggtggttgattgtctccccgagtttagccaagacacattcatggttctagcaaattatattttttttaaggcaaagtggaaacaccccttttcacggtaccagacacagaaacaggaatctttcttcgtggatgaacgcacaagcctgcaggtgcctatgatgcaccagaaagaaatgcaccgatttttgtacgaccaggacctcgcatgcaccgtactccagatagaatatagggggaatgcacttgccctcttagtactccccgatccagggaagatgaagcaggttgaagccgcactgcagccacagacactgcgaaaatggggccaattactactgcctagtttgctcgacctgcatttgcccaggttctcaatctccggtacctataacctggaggatatcctgccacagattgggctgactaacatcttgaatctggaggcggatttctcgggtgtgaccggccagctgaataagacaatcagcaaagttagccacaaggctatggtggatatgagcgagaaggggaccgaggccggagcagcttccggattgctgagccaacccccatcccttaacaccatgtccgaccctcacgcccattttaatcgacccttcctgcttctgctgtgggaggtaacaacgcagagtttactgttcctcggaaaagttgtgaatccagtggcgggttag

SEQ ID NO: 8864 - DNA, 237 bp, synthetic construct
  misc_feature 1..237: note = source = /note="Description of Artificial Sequence: Synthetic coding sequence"
  source 1..237: mol_type = other DNA
atggccctgatccggaagaccttctacttcctgttcgccatgttcttcatcctggtgcagcttccctccggatgtcaagctggcttggacttttcacagccttttccctctggagaattcgcggtgtgcgagtcttgtaagctgggccggggtaagtgccgcaaggagtgcttggagaatgagaagccagacgggaactgtagactcaacttcctctgctgccgacagagaatatag

SEQ ID NO: 8865 - DNA, 2139 bp, synthetic construct
  misc_feature 1..2139: note = source = /note="Description of Artificial Sequence: Synthetic coding sequence"
  source 1..2139: mol_type = other DNA
atggccgccgccggcctggtggccgtggccgccgccgccgagtactcaggaaccgttgcatcgggaggtaatctgcccggggtgcactgcggaccctccagtggtgccggccccggatttgggccagggtcctggtcaaggagcctcgacagggccttggaggaggccgccgtcacgggcgtactgagtctgtccggccgcaagctgagggaatttccaagaggtgcggctaatcacgatttgactgacacgacccgggctgacctgtcaagaaacagactgagcgagatcccaattgaggcatgccactttgtttctctggagaacctcaacctgtaccagaattgcattcgctacatccccgaggcaatcttgaatctccaggccttgactttcctgaacataagtagaaaccagcttagcactctcccggtgcacctctgtaacctgccactgaaagttctgatcgcaagcaacaacaaattagtttctctgccagaggagatcgggcatctccggcatctgatggaactggatgtgtcctgtaatgaaatacagacaataccttctcagataggcaacctagaggccctcagggacctcaacgtacgaaggaaccatctggtacaccttccagaggagctggctgagctcccgttgatccgactggactttagctgtaacaaaatcacgaccatcccggtatgctatcggaacttgcggcatctacagactatcactctggacaataatccgctccagtcgccccccgcacaaatttgcatcaagggcaaggtacatatatttaagtacctgaacattcaggcctgcaaaattgccccagacctacccgattatgatcggcggcctctggggtttggttcttgccacgaagaactttactcaagtaggccatacggggcgttggattctggctttaacagcgttgattcaggcgataaaagatggagcgggaatgagcccactgacgaatttagcgacctgcccctgcgcgtcgccgagattaccaaagagcagagactgcgacgggaaagtcaataccaagaaaatagagggtcactcgtggttactaatggtggcgtcgaacacgatctggaccaaatagattatatcgatagctgcacagcagaggaagaagaggccgaagtccgtcagcccaaaggacccgaccccgatagcctttcttcccaatttatggcttacatagaacagagacggatttcccatgaaggctcccctgttaagcccgtggctatcagagagttccagaagaccgaggatatgcgacggtacctgcaccagaatcgagttcccgcggagcctagttctcttctttctctgtcagcatcacacaaccagctttctcacacggatttagagctccaccagcggcgagaacagttggtcgagcgcacaaggagggaggctcaactggccgccttgcagtatgaggaagagaaaattagaacaaagcagatccagagggatgctgtgctggattttgtgaaacagaaagcctcacagtcacctcaaaagcagcacccactcttggacggagtcgacggagaatgtcctttccccagccgacggtcccaacatacggacgatagcgctctgtgcatgagccttagtggcctcaatcaggtcggatgcgccgcaacattgccccattcaagtgccttcacgcctctaaagtcagatgaccgcccaaacgcactcctttcttcccccgcaacagaaaccgtgcaccacagccctgcctattcattccccgctgccatccaacgcaaccaaccacaaaggcccgaaagctttctgttccgcgcaggtgtgcgggctgagaccaataagggacacgcttcacctctgcccccatcagctgcccctaccaccgacagtaccgatagtattacgggacagaattcaagacagcgcgaggaagaattggaactgatcgaccagctgcggaaacacatagaatatagactgaaggtttcactcccctgcgacctgggcgctgcgctcactgacggtgttgtgctttgccacctggccaatcacgtcagaccaagatcagtgccttcgattcacgtaccctcacctgccgtggttagttag

SEQ ID NO: 8866 - DNA, 213 bp, synthetic construct
  misc_feature 1..213: note = source = /note="Description of Artificial Sequence: Synthetic coding sequence"
  source 1..213: mol_type = other DNA
atgcgggtgctgttcttcgtgttcggcgtgctgagcctgatgttcaccgttccaccagccagaagcttcatctctaatgacgaatgtccgagtgagtactaccactgtaggctgaagtgcaacgcagacgagcacgccattagatattgtgccgacttttcaatctgctgcaaactgaagattatcgaaatagatggtcagaagaaatggtag

SEQ ID NO: 8867 - DNA, 789 bp, synthetic construct
  misc_feature 1..789: note = source = /note="Description of Artificial Sequence: Synthetic coding sequence"
  source 1..789: mol_type = other DNA
atggccgccgccagcgccggcgccacccggctgctgctgctgctgctgatggccgtggcagcaccatcacgggctcgagggtctggttgcagggccgggaccggagcccgcggtgctggagctgaagggagagagggtgaggcttgtggaactgtggggctcttattagaacactcttttgagattgacgatagtgccaacttccgcaagcgggggtctttgttgtggaaccagcaggatggcacactcagtctatctcagagacaactctccgaggaggaacgcggaagactgagggacgtcgccgccttgaacggcctgtatcgggttcggattccgcgacggcccggggccttagatggcttggaggcaggtgggtacgtgagtagctttgttcctgcatgttctttagtggaaagccaccttagtgatcagctgaccttgcacgtggatgtggctggcaacgtcgtgggtgtcagcgtagtgacacaccccggtggctgccgcgggcacgaggtcgaggatgtggacctcgagcttttcaatacaagtgttcagctccagcctcccacaaccgctcccggacctgagactgccgcatttattgagaggctggaaatggaacaggcccagaaagccaaaaatcctcaggaacaaaaaagctttttcgcgaaatactggatgtatattataccagtggtgctttttctcatgatgagcggggcccctgatactggtggacagggggggggaggggggggcggaggaggaggcggatccgggagatag

SEQ ID NO: 8868 - DNA, 150 bp, synthetic construct
  misc_feature 1..150: note = source = /note="Description of Artificial Sequence: Synthetic coding sequence"
  source 1..150: mol_type = other DNA
atggacagcagccgggagcccaccctgggccggctggacgccgccgggttctggcaggtttggcagaggtttgatgccgatggccatggccacgagtccaagtttgcgcagggcgaaaccgccgtttatgattatccacgatgtttatag

SEQ ID NO: 8869 - DNA, 213 bp, synthetic construct
  misc_feature 1..213: note = source = /note="Description of Artificial Sequence: Synthetic coding sequence"
  source 1..213: mol_type = other DNA
atgcccggcgccatgaagatcttcgtgttcatcctggccgccctgatattgctggctcagatcttccaggctagaacagccattcatcgagctctgatttccaagagaatggaaggccactgtgaggccgagtgtctgacatttgaagtgaagattggggggtgtagggcagaactcgccccgttctgttgcaagaaccgcaagaaacactag

SEQ ID NO: 8870 - DNA, 711 bp, synthetic construct
  misc_feature 1..711: note = source = /note="Description of Artificial Sequence: Synthetic coding sequence"
  source 1..711: mol_type = other DNA
atgatgcccgccgagcggcggctgcccctgagcttcgtgctggacgttctggagggtcgagctcagcaccctggtgtcttgtacgtccagaagcaatgctccaacttacctagtgagctccctcaactcctgccagacctggagtctcatgtgccctgggcatctgaggcattgggcaagatgccggatgccgtgaacttttggcttggcgaggccgcggcagtcacctcccttcataaggatcactacgagaatctttattgcgttgtctcaggggaaaagcacttcctctttcatcctccctcagacaggccattcatcccgtatgggctgcgcgtcccaggctgtctccagtttcctcataccttgttaccgtgggcccccgagttgtatacgcccgcaacatatcaactcacagaggaaggtacttttaaggtggtggacgaggaggccatggagaaagttccttggattccactagaccccctggcccccgacctggctcgctatccgtcctacagccaggctcaggcactgaggtgtaccgtccgagctggggagatgttatatctcccagcactgtggttccatcatgtccaacagagtcaggggtgcatcgccgtgaacttttggtacgatatggagtacgatttgaaatactcttactttcagctgctggatagcctgacgaaggcctccggcctcgactag

SEQ ID NO: 8871 - DNA, 1098 bp, synthetic construct
  misc_feature 1..1098: note = source = /note="Description of Artificial Sequence: Synthetic coding sequence"
  source 1..1098: mol_type = other DNA
atggcccccaagctgatcaccgtgctgtgcctgggcttctgcctgaaccaaaagatttgtccacatgcaggtgctcaggataaattttcactatcagcctggccctcccccgtggtgccactggggggccgggtgaccctttcatgtcatagccacctgcgttttgttatatggaccattttccaaacaaccggcacccgctcccatgagctccacaccggactttcaaacaacattactatttcccccgtgacccctgaacacgccggcacatatcgctgcgtcggcatctataagcatgcttccaagtggtctgcagagagcaatagccttaagatcatagtcactggactcttcactaaaccaagcatttctgcccacccttcctctttggtacatgcgggcgccagggtgtctttgcgttgtcactccgaactggctttcgatgagttcattctttataaagagggccatattcagcactcacagcagctggaccaaggaatggaagccgggatccactacgtcgaggccgtgttctctatgggcccagtgactccagctcatgccggggcataccgctgttgtggctgtttcagccatagtaggtacgagtggtcagcaccctccgacccgcttgacatagtcatcaccggcaagtacaaaaagcccagtctaagcacacaagttgaccctatgatgcggctgggggaaaaattgaccttgttctgctccagcgagatcagcttcgatcagtatcacttgtttcgacacggcgtagctcatggtcagtggttgagcggagggcagagacatagggaggcgttccaggccaatttctctgttggacgggctacaccagttcccggcggcacttaccgatgttatgggagcttcaacgatagcccatacaaacctcccgttacgcggtgcaactttacccctcaggaaacattacgagtgttgctgtgtcactcacagaatcctcctctgaatctaacacctccctggcagacccaaagcccgcgaaaggccaatggcaggatgaagcggtcactacagcagaaaaggcaccgccggtcatatatgccctcatag

SEQ ID NO: 8872 - DNA, 198 bp, synthetic construct
  misc_feature 1..198: note = source = /note="Description of Artificial Sequence: Synthetic coding sequence"
  source 1..198: mol_type = other DNA
atgcggaccttcctgttcctgttcgccgtgctgttcttcctgacccccgccaagaatgccttctttgatgagaagtgtaacaaactgaaaggtacctgtaagaacaattgtggcaagaacgaagaactgatagcactttgccagaaatctctgaaatgctgcagaacgattcagccttgcggcagcattatcgactag

SEQ ID NO: 8873 - DNA, 198 bp, synthetic construct
  misc_feature 1..198: note = source = /note="Description of Artificial Sequence: Synthetic coding sequence"
  source 1..198: mol_type = other DNA
atgcggaccttcctgttcctgttcgccgtgctgttcttcctgaccccagctaagaacgctttcttcgacgagaaatgtaacaagctgaagggaacttgcaaaaacaactgcggcaagaatgaagagcttatcgcgttgtgccaaaaatctctgaaatgttgccgaacaatccaaccttgtggatctatcattgactag

SEQ ID NO: 8874 - DNA, 237 bp, synthetic construct
  misc_feature 1..237: note = source = /note="Description of Artificial Sequence: Synthetic coding sequence"
  source 1..237: mol_type = other DNA
atggccctgatccggaagaccttctacttcctgttcgccatgttcttcatcctggtgcagcttccgtccgggtgccaggctgggcttgacttttcacaaccctttccatctggtgaattcgcggtctgcgagtcgtgtaagttgggtcgaggcaagtgtagaaaggaatgtcttgaaaatgaaaagccagacggcaactgccgcttaaatttcctgtgctgccgtcagagaatttag

SEQ ID NO: 8875 - DNA, 2868 bp, synthetic construct
  misc_feature 1..2868: note = source = /note="Description of Artificial Sequence: Synthetic coding sequence"
  source 1..2868: mol_type = other DNA
atgtgggccggcctgctgctgcgggccgcctgcgtggccctgctgttgccaggtgcaccagcacgcggttatacgggtcggaaaccgcctggccactttgccgctgagagacggcgtttggggccccatgtctgcctgtccggtttcggaagtggctgctgtcccggctgggcaccaagcatgggaggaggccattgtacccttcctctttgttctttcgggtgtggctccggcatctgtattgctcccaacgtttgctcgtgccaagacggtgaacagggagctacatgtccggagacccatggaccatgtggggagtatggctgtgatcttacctgtaaccatggaggctgtcaggaggttgcccgggtctgcccagttggctttagtatgacagagactgctgtcgggatccgttgcactgacatcgatgaatgtgttacgtcatcttgtgaggggcactgcgtaaatacagagggtggtttcgtgtgtgaatgcgggccagggatgcagctgtcggcagacagacactcctgtcaagatacagacgagtgtctcggaactccatgtcaacagcggtgcaaaaacagtattggtagttacaagtgcagctgccggacagggtttcatctgcacgggaataggcatagctgcgtcgacgttaacgagtgcagacggcctcttgagcggcgagtatgtcaccactcatgccacaatactgtcggctcattcttgtgcacctgcagaccaggattccggctccgggctgaccgcgtgagctgcgaggctttccccaaagcagtgctggcgccttccgcaatactgcagccccggcagcatccaagtaaaatgcttttgcttcttccagaagcgggccgaccagcactaagcccaggccactcaccaccctccggcgcccctggacctccagccggggtacgcacaaccagactgccatctcctactcccagactccctactagctctccatccgcacccgtgtggctgttgtctactctgttggccactcctgtgccgactgcgagcctcctcggtaatctccggccacctagcctgctgcagggtgaggtgatgggcacgcccagctcaccacgggggccagagtcgccaagactcgcggccgggccctcgccatgctggcatctcggtgctatgcatgagagcaggtcaagatggaccgaacccggctgttcccagtgttggtgtgaggacggtaaagtgacttgcgaaaaagtccgatgtgaagccgcctgttctcatcctataccctccagggacggagggtgctgtccttcttgcactggctgcttccactctggcgtagtccgagctgaaggggatgtcttctctcctcctaacgaaaactgcaccgtgtgtgtctgcctggccggtaacgtgtcttgcatctcccccgaatgcccatccggaccatgccaaacccctcctcagacggactgttgtacctgtgtacccgtgcgctgctattttcatggtcgttggtacgcagatggagcggtgttttctggtggaggagacgaatgtacaacatgcgtgtgtcagaatggagaggttgaatgttccttcatgccatgtccagagcttgcatgcccacgggaagaatggcgcttgggccccggacaatgctgttttacctgccaggagccaactcctagcaccggctgtagtcttgatgacaacggggttgagttcccaatcggccagatatggagtccaggggacccctgcgagctttgtatctgccaagctgacggctccgtgtcatgtaaacgtactgattgtgtggacagctgtcctcatcctatacggattccggggcaatgctgccccgattgctccgccggatgtacttacactggccgcattttctacaacaatgaaacctttccctcagtcctggacccgtgcttgagctgcatttgcctcctgggttctgttgcttgttctcccgtggactgcccgattacgtgtacctacccctttcaccccgacggcgaatgctgccccgtgtgccgcgactgcaattatgagggtaggaaagtggctaacggccaggtattcaccctcgacgatgagccatgtacccgctgcacttgccagctgggggaagtgtcatgcgaaaaggtgccctgccagagagcctgcgccgacccagcgctcctgcctggtgattgctgtagtagttgtccggatagtctctctcccctggaagagaagcagggcttgagtccacacggaaatgttgccttctctaaggctggccgaagcttacacggcgacaccgaagctccagttaactgctcctcttgccccggaccacccacagcttctccaagccgccctgttctgcacctcttacagctcctactgcggaccaatctcatgaagacgcaaactctgcctacttctccagcaggggcccatggaccccatagccttgctctcggcttgaccgctacttttcctggcgaacccggcgcctcaccccgtttgagcccgggcccctccaccccgcctggcgcaccgactctgccattagctagtcccggggcaccccagccgccgccagtgacacccgagaggtcattttctgcatccggagctcagatcgtttctcgatggccaccactgcccgggacactcttgacagaagcttccgccttgtcaatgatggacccctccccgagcaaaacgcctattacactgttaggacctcgggtgctttctcccactacttctcgcttaagtaccgccctagctgctaccacacaccccggcccccagcagcctcctgtgggggcgtcgcgcggagaggagtctacaatgtag

SEQ ID NO: 8876 - DNA, 270 bp, synthetic construct
  misc_feature 1..270: note = source = /note="Description of Artificial Sequence: Synthetic coding sequence"
  source 1..270: mol_type = other DNA
atggtgagctgcgagcggcgggccagcaagagcgtgggccagatcctgctgtgggattttggttacacatgccggttgtctcacagaagacgcaatagtacagaaattctctccaggaatctgccagccctgtatactggcatcaaggtttgtgagaagcggccaagtatcgacctgtgcattcatcattgctcctactttcagaaatgtgaaacaaataaaatctgctgcagcgccttctgcggcaacatatgtatgagcatcctgtag

SEQ ID NO: 8877 - DNA, 600 bp, synthetic construct
  misc_feature 1..600: note = source = /note="Description of Artificial Sequence: Synthetic coding sequence"
  source 1..600: mol_type = other DNA
atggagaccttccccctgctgctgctgagcctgggcctggtgctggctgaagcttctgagagcaccatgaagattattaaggaagaatttacagatgaagagatgcagtatgacatggcgaagtcaggacaggagaagcagacgatcgagattctgatgaaccctatcctcttggtgaaaaacacttccctttccatgtccaaagacgatatgtcatccacgctcctcacgttcagaagtctccattacaacgaccccaaggggaattcatctggcaatgacaaggagtgttgcaacgatatgacggtttggaggaaagtgtcggaggcaaatggctcctgcaaatggtcaaacaacttcatcaggtcaagcaccgaggttatgcggcgcgtccatagagctccctcttgtaaattcgtgcaaaaccccggtattagttgctgtgagagtctggagctcgagaacactgtgtgccagtttacaactggaaaacagtttcccagatgccagtaccacagtgttacctcccttgaaaagattctgacagtcctgacaggccactctcttatgtcctggcttgtgtgcgggagcaaactttag

SEQ ID NO: 8878 - DNA, 729 bp, synthetic construct
  misc_feature 1..729: note = source = /note="Description of Artificial Sequence: Synthetic coding sequence"
  source 1..729: mol_type = other DNA
atggccgccgccacccggggctgccggccctggggcagcctgctgggactgctaggcctggtatccgccgccgcagccgcatgggatcttgcatccctgcggtgtacacttggggccttctgcgagtgcgactttcgccctgatctcccaggtctggaatgcgatcttgcacagcatctggccggacaacacttggctaaggctttagttgtgaaagccttgaaggcattcgtgcgggatcctgctcccacaaaacctttagtgttaagtcttcacggttggacaggaacaggaaagtcttacgtgagctcccttttggctcactacctgttccagggtgggctgcgatcacctagggttcaccatttcagtcctgtgttgcacttccctcatcccagccatatagagcgctacaagaaagatctcaaatcttgggtgcaggggaacttgaccgcttgtgggcgctccctctttttgttcgacgagatggacaagatgcctcccggcttgatggaggtgctcagaccgttcctgggatctagctgggtagtgtacgggactaactatagaaaggccattttcattttcattcgctggctccttaaacttggccaccatggccgtgctcctcccaggcgctcaggcgccctgccgccagctcctgccgcacctcggcctgcgttacgcgcccagagggccggccctgcggggcccggggctaaggggtag

SEQ ID NO: 8879 - DNA, 627 bp, synthetic construct
  misc_feature 1..627: note = source = /note="Description of Artificial Sequence: Synthetic coding sequence"
  source 1..627: mol_type = other DNA
atgctgggcctgctggtggccctgctggccctgggcctggccgtgttcgccctcctggatgtgtggtacctggttcggcttccgtgcgctgtgctgcgtgcacggctcctgcagcccagggttagagacttgctggccgaacagcggttcccaggacgcgtccttcctagcgatttggatctactgcttcacatgaacaacgcacggtatcttagagaggcggatttcgctcgagtggctcacttgacaagatgcggggttcttggggccttacgggagctccgcgcccacactgtgctcgctgcgagctgtgccaggcaccgtaggtcccttcgactcctcgaacctttcgaggtaaggactcgcctgctggggtgggatgacagagccttctatttggaagctcgcttcgtcagcctgcgcgatggattcgtctgcgccctgctgcggttcaggcagcatttgcttgggacaagccccgagcgcgtcgtgcaacatctgtgtcagagaagagtcgagccccccgagctgcctgcagacctccaacattggatttcctacaatgaggcgtcgagtcagctgcttcggatggagagcgggctgtccgacgtgaccaaagatcagtag

SEQ ID NO: 8880 - DNA, 423 bp, synthetic construct
  misc_feature 1..423: note = source = /note="Description of Artificial Sequence: Synthetic coding sequence"
  source 1..423: mol_type = other DNA
atgctggtgaagctgaacagccaggcccggctgagcagcatggtgaaaaaggtgagactgccatcccgctgtgagccccctggaaccacatgcaccgtgtcagggtggggtaccaccacttccccagacgttaccttccctagcgatctgatgtgtgttgatgtgaaactgatcagcccacaggactgtaccaaggtgtacaaggatctcctcgaaaacagcatgctttgtgctggcatcccagacagtaaaaagaacgcatgcaatggcgacagtgggggtcctctggtttgccgcgggacattgcagggtttggtctcctggggaacctttccatgcggccaacctaacgatcccggggtgtatactcaggtgtgcaaattcaccaaatggatcaacgatactatgaaaaaacaccggtag

SEQ ID NO: 8881 - DNA, 354 bp, synthetic construct
  misc_feature 1..354: note = source = /note="Description of Artificial Sequence: Synthetic coding sequence"
  source 1..354: mol_type = other DNA
atgctgagcaaggcccacggctgcaagaccgccctgagcctgggccggtgtcccaaaattcgtgaagaatgcgaatttcaggagagagacgtctgcaccaaagataggcagtgtcaggacaacaagaagtgctgcgtattcagctgcggaaagaagtgccttgatctgaaacaggatgtttgtgaaatgccgaaggaaacggggccttgcctggcttacttcctccactggtggtatgataagaaagataatacttgctcaatgttcgtgtatggcggatgtcaagggaataacaataactttcaatccaaggcgaattgcctgaatacatgtaagaacaagcgcttcccatag

SEQ ID NO: 8882 - DNA, 2328 bp, synthetic construct
  misc_feature 1..2328: note = source = /note="Description of Artificial Sequence: Synthetic coding sequence"
  source 1..2328: mol_type = other DNA
atgcaccccggccccgaggaggccggcagcggccggtacggccccaggtacattaccgacatgggggcaggtgaagatgacgagggtttcgaggacgatttagaccttgatatcagttttgaggaagtcaaacccctacccgcaaccaagggcggtaacaagaaattcctggtggagtctaagaaaatgagtatctctaaccctaaaacaatttccaggttgattcctcctacaagcgcttcattaccagtgacaactgtcgctccccagccaatacctatccaaaggaagggcaagaatggtgtggcaatcatgtctcggctttttgatatgccttgcgatgagaccctttgttcagcagattcattttgcgttaatgactacacatggggcggaagcagatgccagtgcaccctgggtaagggcggagaaagttgttccgaagatatcgtcatccaatacccgcagttctttggacactcgtacgtgacttttgagcctctcaagaacagctatcaagcattccagatcaccttggagttccgcgcagaagctgaggacggtttgcttctctattgcggtgagaatgagcacggacgcggggacttcatgagcctggccattattagaaggtcactccaattccggttcaattgcgggacaggagtggccattattgtttccgagaccaagatcaaactgggcggttggcatacagtgatgttatatagagacggtctgaatggactgcttcaactgaacaacggaactccggtaactggacaatctcaggggcaatatagcaaaatcaccttccgaactccgctgtatctggggggtgcccccagcgcctactggctggtacgcgctactggtactaatcgtggattccaaggctgtgtccagtctctggccgtgaacggaaggaggatagacatgcgaccttggcccctgggaaaagcactcagcggggcagatgtgggtgagtgcagcagcgggatttgcgatgaagcatcctgcattcacggcgggacatgcaccgccattaaggctgattcttatatttgtctctgtccgctgggtttcaagggtagacactgtgaagacgcttttaccttaaccattccgcagtttagggaatctctcagaagctatgctgccacaccgtggccactggagcctcagcattatttaagttttatggagttcgagattactttccggcccgactccggggatggtgttctcctgtactcgtacgatacaggatcaaaagattttctgtccattaatctggctggtgggcatgtcgaattcagattcgactgtggatctgggaccggggtgctgcgatctgaagatccgctcacgttaggcaactggcacgaactacgcgtgagtcgcactgcaaagaatggaatcctacaggtggacaagcagaagattgtggaaggcatggccgaaggcgggttcacgcagatcaaatgcaacacagatatctttattgggggcgtgcctaattacgacgatgtgaaaaaaaatagtggcgtgctgaagcccttttctggttctatccaaaagattatcctcaatgatcggacgatacatgtgaagcatgacttcactagtggggttaatgtagaaaatgccgcccacccctgtgtgagagccccttgtgctcacggagggtcctgccggccaaggaaggagggctacgattgcgattgccccctgggttttgagggcctccattgccagaaggctattatcgaagcaatcgaaattccacaattcattggccggagctatctgacttacgataatccagacattctgaagagagtttccggaagcagatctaacgtgttcatgagatttaaaacaaccgcgaaagacggtctgctcctgtggaggggggactccccgatgcgtcctaatagcgatttcatatctctgggccttcgggacggagcactggtcttcagttacaacttggggtctggtgtggcctccatcatggttaatggctccttcaatgacggtaggtggcatcgggtgaaagccgtgagagacggacaatccggaaagatcaccgtggatgactatggcgcacggaccgggaagtccccaggcatgatgagacagcttaatattaacggtgcactttacgtgggaggaatgaaggaaatcgctcttcacacaaatcggcagtacatgcgcggcttggtgggatgcatcagccactttaccctaagcactgactaccacataagcctagtcgaagacgctgtggacggcaagaacattaatacttgtggtgcaaagtag

SEQ ID NO: 8883 - DNA, 1257 bp, synthetic construct
  misc_feature 1..1257: note = source = /note="Description of Artificial Sequence: Synthetic coding sequence"
  source 1..1257: mol_type = other DNA
atgcggaccctgttcaacctgctgtggctggccctggcctgcagcccagtccatacgacattgagcaaatccgacgcaaagaaagccgcctccaagaccttgctggagaaggtgaagttttgcagctgctgcccaggttggtctgctatggccaggtcctggctaacagcaacctccgcaacgcaaagtcagttcagtgataaaccggtccaggaccgcggtctggtggtcactgaccttaaagctgagtccgttgtccttgagcatagaagttactgctcggccaaggcccgcgaccgtcacttcgccggcgatgtgcttgggtatgtcactccctggaacagccatggctatgatgtcacaaaagtgttcgggagcaaattcactcagatcagcccagtctggctccagctgaaaaggcgcggacgtgagatgtttgaagtcacaggcctacacgatgtagaccaggggtggatgcgcgctgtgcggaagcacgccaaggggctgcatatagtgccccggctgttgtttgaagactggacatacgatgatttccggaacgtcctggactcagaagatgagatcgaggaattgagcaagaccgtcgtgcaggtggccaagaaccagcactttgacggttttgtcgtggaagtctggaaccagctgctcagccagaaaagggttgggctgattcacatgctcacccacctcgccgaggcgctccaccaagcaagactcttggccctattagttatccccccagctatcacacccggaacagatcagttgggaatgtttacccacaaggagtttgaacagctggctcctgtgcttgacggttttagtctgatgacctatgattattccactgctcatcaacccggacctaacgctcctctttcttgggttcgagcctgcgtgcaggtcctggacccaaagtcgaaatggcggtcaaagatcctgctaggcctgaatttttatggtatggattatgccacttcaaaggatgccagagaaccagtggtgggcgctcgatacattcagacgctcaaggatcatagaccccggatggtttgggatagccaagcaagcgagcacttctttgaatacaagaagtccaggtccgggcgacacgttgttttttatccaaccctaaaaagcctgcaggtccgcttagagcttgccagggagctcggcgtaggcgtatcgatctgggagctgggccagggccttgactacttctacgacttactctag

SEQ ID NO: 8884 - DNA, 813 bp, synthetic construct
  misc_feature 1..813: note = source = /note="Description of Artificial Sequence: Synthetic coding sequence"
  source 1..813: mol_type = other DNA
atgatgctgcggctgctgagcagcctgctgctggtggccgtggcctctggatacggacctccgtctagccgcccttcaagtcgcgtggtcaatggagaggacgcggtgccgtactcatggccttggcaagtgagcctccagtacgagaagagtggatctttttaccacacatgcggggggtccttgatagccccagactgggttgtaactgctggccactgcattagcagttcccgcacatatcaagtggtgctgggagagtatgacagggcagtgaaggagggtccagaacaggtgattccaataaacagcggggaccttttcgttcaccccctatggaaccggtcatgtgtcgcgtgcggaaacgacatcgctcttataaaactcagtcgctccgcacagttaggggacgcagtgcagctggcatctctgccgcctgctggcgatattctccctaatgagaccccctgctatatcactgggtggggaagactgtataccaatggccccctccccgacaaacttcaggaagccctgctgccagtcgtggactacgaacattgttcccgttggaattggtggggaagcagtgtcaaaaagacgatggtttgcgcaggtggcgatataaggtccggatgcaacggagactccgggggaccactgaattgcccgacagaggatggaggctggcaggtgcatggagtcacttcttttgtttccgcttttgggtgcaacacacgccgtaaacctacggtcttcacgagggtgagcgctttcatcgactggattgaagagacaatagcatcacactag

SEQ ID NO: 8885 - DNA, 585 bp, synthetic construct
  misc_feature 1..585: note = source = /note="Description of Artificial Sequence: Synthetic coding sequence"
  source 1..585: mol_type = other DNA
atgaccatgcggcacaactggacccccgacctgagccccctgtgggttctgctgctgtgcgcacacgtggtgaccttgctggtaagagctacacccgtgtctcagaccacaacggcagctactgctagtgttcgcagcacaaaagacccatgccctagtcaacccccggtttttcccgccgctaagcagtgtcccgcattagaagttacttggccagaggtggaagttccgctcaatggcacactcagtctgtcctgcgtggcctgctctagattcccaaactttagtatactctattggctggggaatggctccttcatcgagcaccttcccgggagactgtgggaaggctcaacttcgcgagagcgcggctctacaggcacccagctctgtaaggcactcgtactggaacagctgactcctgctttacatagtaccaatttcagctgtgtgcttgtagatcctgagcaagtggtccagagacacgtggtgctggcacagctttgggccggcctgcgcgctaccctcccacctactcaggaagccttaccgagctcccacagcagcccccagcagcaagggtag

SEQ ID NO: 8886 - DNA, 1308 bp, synthetic construct
  misc_feature 1..1308: note = source = /note="Description of Artificial Sequence: Synthetic coding sequence"
  source 1..1308: mol_type = other DNA
atgcagggccagggccggcggcggggcacctgcaaggacatcttctgttccaaaatggccagctatctgtatggagtcctctttgcggtaggactgtgtgctccaatctactgcgtcagtcccgccaacgcaccctcagcatatcctcgaccctccagtacaaaatctaccccggcatcacaggtgtattccctgaatacggatttcgcgtttcgcctctatagacggctggtgctggaaaccccctcccagaacatatttttttcccccgtcagtgtgtctaccagtttagccatgctgagcttgggagctcatagcgttaccaaaacacagattctgcaaggcttaggatttaatcttacacatacaccagaaagtgctattcaccagggattccagcatttagtgcatagtttgacagttccttctaaggatttgacgctgaaaatgggcagtgccctgttcgttaagaaagagttacaactgcaggctaatttcctgggcaacgtgaagcgtttgtacgaggccgaggttttctccactgacttcagcaatccatccatcgcccaagcccgcatcaattctcacgttaagaagaaaacccaaggaaaagtcgtggacatcattcagggcctggacctcctcacagccatggtattggtgaatcatattttctttaaagctaaatgggagaagccttttcacccagaatataccaggaaaaacttcccttttctcgttggtgagcaggtaaccgtccacgtgcccatgatgcatcaaaaggaacagttcgccttcggagtcgatacagagctgaactgtttcgtcttgcagatggattacaagggagacgcggtggctttctttgtcctgcctagcaagggaaaaatgcgtcaattggaacaggctctgtcagcccgcaccctccggaaatggtcacacagtctgcagaagcgctggattgaagtgtttatccccaggttctctatctccgcatcctataatttggagacaattctgcctaagatgggcattcagaatgtctttgataagaacgcggatttttcaggcatcgccaaaagggattctctgcaagtctccaaagccacccataaggctgtactggatgtgagtgaagaaggcaccgaggccaccgctgctactaccacaaaatttattgtgagatccaaagatggacccagctacttcaccgtgtcgtttaacaggaccttcctaatgatgattactaacaaggcaactgacgggatcttgtttctcggcaaagtagagaatccaacaaaatcatag

SEQ ID NO: 8887 - DNA, 393 bp, synthetic construct
  misc_feature 1..393: note = source = /note="Description of Artificial Sequence: Synthetic coding sequence"
  source 1..393: mol_type = other DNA
atggccagcgacctgatccggaccatcctggccgtggccctgatctctaagttgggcaccgcagtggatgcagagctcatgccaagcggggccatacttcagaacaagagggagaatctaccccgagtctgccatgccctggctttcctcggcatggcacggtgccaagacctgttcctcgtgaggctgcaagggtggaagctcggcaccagatttcaggacgggcctcggagtaccccgcaagaagaaggcggatcacctcagcggaagagaggaatgccagttcagattcactttcttcttaaatcatttctctctagccctattaccttcgccttcatctccctggcccggacagtctccttagcaacagcaatttgcaagatcgtctag

SEQ ID NO: 8888 - DNA, 837 bp, synthetic construct
  misc_feature 1..837: note = source = /note="Description of Artificial Sequence: Synthetic coding sequence"
  source 1..837: mol_type = other DNA
atgcagtggctgcgggtgcgggagagccccggcgaggccaccggccatcgggtgaccatgggcaccgccgcccttgggccagtttgggcagctctgctgctgtttctgctgatgtgtgagatacctatggttgagctcacgttcgatcgggccgttgcaagtggttgccagaggtgttgcgattctgaggatcctttagacccagcccacgtcagttcggctagctcctctgggagaccacacgctttgcctgaaatccgcccgtacatcaatattacaatcctaaaaggcgacaagggagatcccgggcccatgggcctgcccggttacatgggtcgggaagggccacaaggcgagcctgggccccaaggaagcaagggcgacaagggcgaaatggggtcaccgggtgccccttgtcagaaacggtttttcgccttctctgttggtcggaaaaccgctctacacagcggcgaagacttccagactctccttttcgagcgcgtgtttgtaaatcttgatgggtgtttcgacatggcaaccggtcagtttgccgcccctcttcgcgggatttacttcttcagcctcaatgtccacagctggaattacaaagaaacgtacgtacatatcatgcacaaccagaaggaggccgtgatcttgtacgctcaaccttctgagcggtccatcatgcaatcgcagtccgtgatgctggacctggcttatggagatagagtgtgggtgaggcttttcaagcgccagagggagaatgcaatttattcaaacgatttcgacacatacatcacgttttcaggccatcttattaaggcagaagacgattag

SEQ ID NO: 8889 - DNA, 1635 bp, synthetic construct
  misc_feature 1..1635: note = source = /note="Description of Artificial Sequence: Synthetic coding sequence"
  source 1..1635: mol_type = other DNA
atgtgcaccgtggtggacccccggatcgtgcggcggtacctgctgcggagacagctgggccagggcgcctatggaattgtatggaaggccgtcgatcgcagaacgggagaagtagtggcgatcaaaaaaatttttgatgcgttcagggacaagacagatgctcagcggacttttagggagattacgttactgcaggaattcggggaccaccctaacataatttccctgcttgatgtgatcagggcagagaacgacagggatatataccttgtgttcgagttcatggacactgacctcaatgcagtgatcagaaaggggggcctgcttcaggatgtgcacgtgcgcagtatcttttaccagttgctgagagccacaagattcttgcactccgggcatgtggtgcaccgtgatcagaaaccttcaaacgtccttctggacgcaaactgcacagtcaaactctgtgactttgggctcgccaggagtctgggggatcttccagaaggcccagaggaccaggctgttacagagtacgttgcaactcgctggtatcgcgccccagaagtgctgctttcaagccatcggtatacactcggggttgacatgtggagtttgggctgcatactaggcgagatgctccgcggcagaccactattcccaggtacttccaccttacatcagctggagctcattctggagacaatcccacctccgtctgaggaggacctgcttgccctggggtctggctgccgcgcctctgtactgcaccagctcggctctagacctcgtcagacacttgacgcgctgttgccaccggacacctctcccgaggccctagaccttctgcgccggctactggtttttgctcccgacaaaaggcttagtgctacacaggccctacagcatccctacgtccaacgcttccattgtccctctgatgagtgggcaagagaggcagatgttcgaccgagggcgcacgaaggagtccaattatctgtgcctgagtaccgaagccgggtttatcagatgattctggaatgcgggggctccagcgggacaagtcgtgaaaagggccccgaaggcgttagtccatcccaggcccacttgcataagccccgggccgaccctcagctgccatcccgaactcccgtgcaaggcccgaggcctaggccacagagcagtcccggtcacgatcctgccgagcacgagtccccaagagctgccaagaacgttcctaggcaaaacagtgcaccccttttacagacagctctcctgggaaacggcgagagacctccgggcgcgaaggaggcccccccactgaccctgtctctggttaaaccatcagggagaggagccgccccctctctgacttcgcaggcagctgcccaggtggccaatcaagctctgatccgcggagactggaaccgcggcggcggagtgagggtggcaagtgtccagcaggtgccgcccaggctgccccccgaggcgaggcccggacggcgaatgttcagtactagcgccttgcaaggtgcccaaggaggagctcgtgccctgcttggtggctattcccaagcttatggcactgtctgtcatagcgcactggggcacctgcccctgttagagggacaccacgtgtag

SEQ ID NO: 8890 - DNA, 399 bp, synthetic construct
  misc_feature 1..399: note = source = /note="Description of Artificial Sequence: Synthetic coding sequence"
  source 1..399: mol_type = other DNA
atgaagagcagcggcctgttccccttcctggtgctgctggccctgggcacgctcgcaccttgggcagtagaaggatctggcaagtcattcaaagctggtgtgtgcccccctaaaaaaagtgcgcagtgtctcagatataagaaacctgaatgccaatcagactggcagtgccctgggaagaaacgctgctgtcctgatacttgcggtattaaatgtctggatcccgttgacacaccaaatccaacccgacgcaaaccaggaaagtgtcctgtgacttacggtcagtgtctgatgcttaacccacctaacttctgcgaaatggatggccaatgcaagcgcgatctgaagtgttgtatggggatgtgcggcaaaagctgtgtgagtcccgttaaggcatag

SEQ ID NO: 8891 - DNA, 1401 bp, synthetic construct
  misc_feature 1..1401: note = source = /note="Description of Artificial Sequence: Synthetic coding sequence"
  source 1..1401: mol_type = other DNA
atgaagccccccctgctggtgttcatcgtgtgcctgctgtggctgaaagacagccactgcgctcccacatggaaggacaagaccgcaataagcgaaaacctaaagagcttttcagaggtcggcgagatcgatgccgacgaagaggttaaaaaagccctgaccggcataaaacaaatgaaaatcatgatggaaagaaaggagaaggaacataccaacctgatgagcaccttaaagaagtgtcgtgaagagaagcaagaagcccttaagctgcttaacgaggtgcaggagcatctcgaagaagaagagaggctctgtcgagaaagcctggcagattcctggggggagtgtcgctcttgtttagagaacaattgcatgagaatctacactacatgccagcctagctggagctccgtgaagaacaagattgagaggttttttagaaaaatctaccagtttttattcccatttcacgaagataacgagaaggatctccctatcagcgaaaaattaatcgaggaagacgctcaactgacacaaatggaagatgtcttcagccaactcaccgtggacgtaaactctttattcaaccggagttttaacgtcttccgtcaaatgcagcaagaattcgatcagacgtttcagagtcacttcatcagtgacaccgatctgacagagccctattttttcccagccttttctaaggagcctatgacaaaggccgatttggaacagtgctgggacatccccaactttttccaattattctgcaactttagtgtgtctatctatgagtcagtgtccgagaccatcacgaagatgctgaaggccatagaggacctgccaaagcaagataaagccccagatcacggagggctcatctccaaaatgctcccaggacaggaccgaggactgtgcggcgagttggatcagaacctctcccggtgttttaaattccacgagaagtgccagaaatgtcaggcccatctgagcgaggattgtccggatgtccccgccttgcatacagagctcgatgaggccatccggctggtgaacgtttccaaccaacagtacggtcagatactccagatgacacggaagcaccttgaagacacagcatatctcgtcgagaaaatgagaggacaattcggctgggtgagtgaactggccaaccaggcacctgaaaccgaaattattttcaacagtattcaagtggtgcctaggatccatgaagggaacatcagcaagcaggatgagactatgatgacagacctaagtatccttccctcatccaatttcactctcaaaatccccctggaagagagcgctgagagttcgaactttattggctacgtggtggccaaggcactccagcactttaaggaacactttaagacctggtag

SEQ ID NO: 8892 - DNA, 522 bp, synthetic construct
  misc_feature 1..522: note = source = /note="Description of Artificial Sequence: Synthetic coding sequence"
  source 1..522: mol_type = other DNA
atgcactggaagatgctgctgctgctgctgctgtactacaacgccgaggcatctatgtgccacagatggagtagagctgtgctgtttcccgcagcgcaccgccctaagcgctctagtagtctgcccctgaatcctgtgcttcagacttcattggaggaagtcgaactgctgtacgagtttctgttagcagaactggagatctcacccgatctacagatatctattaaagatgaggaattggcttcgttgagaaaagcatctgattttcgtacggtctgcaataacgtgatccccaaatcaattcccgatataagacgcctttcagcatctctgtcctcccaccctgggattctgaaaaaagaggactttgaacggacagtgctcacacttgcttacactgcttaccgaactgccctgtcacacggacaccagaaggatatctgggctcagagccttgtgtccctgttccaagccctgagacacgatctcatgaggtcctcacaacccggtgtccctccttag

SEQ ID NO: 8893 - DNA, 1473 bp, synthetic construct
  misc_feature 1..1473: note = source = /note="Description of Artificial Sequence: Synthetic coding sequence"
  source 1..1473: mol_type = other DNA
atggaggacagcgacagcgccgccaagcagctgggcctggccgaggccgctgccgtcgccgcggccgcggcggtcgcagcagcggcagcagccgccgcggggggggaggccgaagagccggttctgagtcgagacgaagactccgaagaggacgctgactctgaagctgagcgggagaccccgcgcgtgactgccgtagccgttatggccgcggaaccaggtcatatggatatgggtgcagaagccttgcctggaccagatgaggcggccgccgctgccgcttttgccgaggtcaccaccgtgacagttgcgaatgtcggtgccgccgccgataacgtgtttaccacatctgtggccaacgctgccagtattagcggtcacgttctgtccggccggactgccctccagatcggagatagtttaaacactgaaaaagcaaccctcatcgtcgtgcacaccgatgggtctatcgtggagaccacgggactgaaaggacccgccgcacccctcactcctggaccgcagtcccccccaacaccgctggctcccgggcaggagaaaggcggaacgaagtataactgggatccctcagtttatgactccgagttgcccgtgcggtgcagaaacatctccgggacgctatacaagaatcgacttgggagcgggtgggatttgaaaccctcacggtgtctcctccatctgtgctgtctgcttcggcgtcatgacttaatcactgtaacacctagtggccagattaccactagcggcgccctgacattcgaccgcgcctctacagtggaggcaactgccgtgattagcgaatctccagcccagggcgatgtgtttgcaggcgcgacagtgcaggaggctagcgtgcaacctccatgcagggcaagccatccagagcctcattacccaggctaccaggactcctgccagatagccccatttccagaggcagctctgcctacaagtcacccaaagatcgtgttaacatctttgcccgcgttggctgtgcccccgcctacacctacaaaggcagctcctcccgccctggtgaacggactggagctgtctgagccaagaagctggctttatttagaggagatggtcaatagtctcctgaatactgcacagcagttaaagactttgtttgaacaggctaagcatgccagcacttaccgcgaggccgccactaaccaagctaagattcacgccgacgccgagagaaaggaggtcatccaccctccacgcctgcccaaagtactgggattgcaacaaagctgtgtgaattgtggccgtgaggccatgtctgagtgcacaggctgccataaggttaactattgttccacgttctgccagagaaaagattggaaagaccatcagcacatttgtgggcaatccgccgcagtaacggtgcaagctgacgaagtgcatgttgccgaaagtgtgatggaaaaggtgaccgtctag

SEQ ID NO: 8894 - DNA, 1476 bp, synthetic construct
  misc_feature 1..1476: note = source = /note="Description of Artificial Sequence: Synthetic coding sequence"
  source 1..1476: mol_type = other DNA
atgcccagcaccgtgctgcccagcaccgtgctgcccagcctgctgccaaccgccggagccggttggtctatgagatggatcctctgttggtccctaactctttgcctgatggcacagacggccctgggtgccctgcacacgaagaggccccaggtggtcaccaagtatgggactctccagggtaagcaaatgcacgtcggcaagacacccattcaagtgttccttggagtgccattttcccgaccccccctgggaattcttcgttttgctcctcccgagcccccggaaccatggaagggcatccgggacgccaccacctatcccccgggctgcctccaagagtcttggggccagttggcatctatgtatgtatctacccgcgaaagatacaagtggctaaggttctctgaggattgtttgtacctcaacgtctatgccccggcgagagctcctggcgacccccagctcccagtgatggtgtggttccctgggggagctttcattgtgggagcagcctcatcttatgaagggtctgatctggccgcacgcgaaaaggtggtacttgtgttcctccagcacagattaggaatttttggcttcctctcaactgatgactctcatgctagagggaattgggggctgcttgaccagatggccgcacttcgttgggtgcaggagaatatcgcagccttcggcggcgatcccgggaatgtcaccctctttggccagagtgccggtgctatgtccatttcaggtctcatgatgtctcccctggccagtggcctattccaccgggcgatatctcaatctggcacagccctgtttcggttgtttatcacgagtaatccccttaaagtcgcaaagaaagtcgcccaccttgcgggctgtaaccacaacagtacacaaattctggtaaactgtctgcgcgccttgagcggaactaaggtgatgcgagtgtctaataagatgcggttcctccaactcaacttccagcgggatccggaagagattatctggtccatgagtccggtggtggacggggtcgtaattcccgacgatcccctggtgctgttaactcaagggaaagtgagcagcgtgccttacttgttgggggtgaacaatctcgaattcaattggttgctgccctacatcatgaaattcccactgaaccgccaggcaatgcggaaggagactatcacaaaaatgctgtggagcacacggactcttctcaacatcactaaagagcaagttcccctggtggttgaagaatatctggataatgtcaacgagcatgattggaaaatgcttcgtaataggatgatggacattgttcaagacgctacgtttgtctatgcaaccctccagaccgcccactaccatagggaaacacctatgatgggaatttgtccagcgggccacgccaccacccgaatgaaatctacctgctcttggatcctgcctcaagagtgggcatag

SEQ ID NO: 8895 - DNA, 753 bp, synthetic construct
  misc_feature 1..753: note = source = /note="Description of Artificial Sequence: Synthetic coding sequence"
  source 1..753: mol_type = other DNA
atgcccgccagcagccccttcctgctggcccccaagggcccccccggaaatatgggcggtcctgtacgcgagccagctttgagtgtggctttgtggttgagctggggggcagccctgggcgccgttgcatgtgccatggccctgttgactcagcagacagagctacagagtcttcggcgggaggtttcccgcctgcagggcacgggtggacccagtcagaatggcgagggatatccttggcagtctttacctgagcaaagttctgacgccctcgaggcatgggagaacggggaacgcagccgcaaacgccgagcggtcttaacacagaaacaaaagaagcagcactccgtcctgcacctggtgccaataaacgctacctcaaaggacgactcagacgtgacagaggtgatgtggcagccagccctccgcaggggcaggggcctccaagcccaggggtatggcgttcggattcaagatgccggcgtgtacctgttgtattctcaagtgctattccaggacgtgaccttcactatggggcaggtagtgtcccgagaagggcagggtcgccaagagacccttttccgctgcatcagatccatgcctagtcatccggaccgagcatacaactcctgttatagtgcgggggtgttccacctgcatcagggtgatatcctctcagttattatcccaagggcgcgcgcaaagctgaacctgtccccgcacggcacattcctgggttttgtcaaactgtag

SEQ ID NO: 8896 - DNA, 1437 bp, synthetic construct
  misc_feature 1..1437: note = source = /note="Description of Artificial Sequence: Synthetic coding sequence"
  source 1..1437: mol_type = other DNA
atgagcccccccctgctgaagctgggcgccgtgctgagcaccatggctatgatatccaactggatgtctcagacattgcccagcctggtcggcctgaataccacaaggctttccacccctgacaccctcacgcaaatctcaccaaaagagggctggcaggtttactcaagtgcccaggatccagacggccggtgtatttgtaccgtggtggcccctgaacagaacctgtgttctcgcgacgccaagtcccgacagctgagacagctactagaaaaggtacagaacatgtcacagtcgattgaggtcctgaacctgagaacccaaagagactttcaatacgtgttaaaaatggagactcagatgaagggcctgaaggctaaatttcggcaaattgaggatgatagaaaaacactcatgacaaaacacttccaggagttgaaggagaaaatggacgagctcctgccgctgatcccagtgctggaacaatataagacagatgctaaattaatcacacagttcaaggaagagattcgcaatctgagcgcggtcctgaccgggatccaggaggaaataggcgcttacgactacgaggagctgcaccagagggtgctcagcctcgagactcgtctgcgggattgcatgaaaaaactcacctgtggtaagctgatgaaaatcaccggaccggtaacggttaagacctcggggacgaggttcggtgcttggatgaccgaccccctggcctctgagaagaataaccgcgtctggtatatggactcttacaccaacaataagattgtgcgcgagtacaaaagtatcgcagattttgtgtccggcgctgagtcccgtacctataacctgcctttcaagtgggcaggcacaaatcatgtggtgtataatggctccctgtatttcaacaagtatcagtctaacatcattatcaagtacagtttcgatatgggccgagtgctggcccagaggagcctggagtatgctgggttccataacgtgtacccttacacctggggtggattctccgacatcgacctgatggctgatgagattggactgtgggcagtgtacgcgaccaaccagaacgccggtaacatcgttatcagccaactgaatcaggacacactagaagtgatgaagagctggtccaccggttatccaaagcgaagtgcaggcgagagctttatgatctgcggtaccttgtatgttactaactcgcacttaacaggcgctaaggtctactattcctattccacaaaaacctcgacatacgagtacactgacattcctttccataatcagtactttcatatctcaatgctggactacaatgctcgtgatagagccctctacgcctggaacaatggtcatcaggtcctttttaacgtgaccctgttccacataataaagaccgaagacgatacgtag

SEQ ID NO: 8897 - DNA, 1101 bp, synthetic construct
  misc_feature 1..1101: note = source = /note="Description of Artificial Sequence: Synthetic coding sequence"
  source 1..1101: mol_type = other DNA
atggcccgggagcggccccccggccggggctgcggcgtgctgcggagatgcctcctgggagctgtgctcctcttcggtctgagactgtgcgctgagttacgtcgagcgggaccaggatctccgacccgatccgccccgcccgggcctgcctggcgcccaccaggcccccaccttccacccgcccccggccaaccacggggagcttctcgcaggcaagtcacgtacgtgcgttccggcaggagggctcccccaggcggcgggggatccgggacaccagaacccggctgctgcgcccctcgcggacgcccgcgcaggaaagggccgagatggcacatcgatcttcagccctgggcagggtccgcccagagtcttgacgaagaagcgtggaggtttctccgctacatttcaaccacccaaattgcatgcaatcacatgaacaccgacagcctggccacagatagttcacccactcacaaaccatggagcgtttgcctcgacgaccgtttcaaccttgcccaccagattcgcaacaagcagtgccgtttgtattcgctgggtcttggcagtgacgacacccactttgaagttagcatggccaacaatggatgcgaagttcacaggtttgatccctcagtcaagtcagctcatatactggaatctcaacacctctggtaccatcggctgagtatcgattggagagatccgcacccagccgtagccgcccagaagccccattccaatacaaggaagctcgggagcatcctgaatgagttcggccaccacaagatcgatgttcttaaagctgaccttgagtccgcggaatggaaagtgctggaaaacctcatcctcgaggacgtcctggagcaaatcggacagttgatcttcgaaattcatctccactggccaggctttgaggttagcggctcagatagcagcgtggttcgcttctggtacagcctgctcaaagaactggaacagaaagacttccggctttttcatagctacaaagatctgtcaaaacctcagttgttcctgaaaaaagacatctttaatgccagcagctgctacacattgagctgggttaacacacgttggaagtag

SEQ ID NO: 8898 - DNA, 300 bp, synthetic construct
  misc_feature 1..300: note = source = /note="Description of Artificial Sequence: Synthetic coding sequence"
  source 1..300: mol_type = other DNA
atgaagatccccgtgctgcccgccgtggtgctgctgagcctgctggttctccattccgcacaaggcgccacgctcgggggtcctgaagaggagagcaccatcgagaactatgcatccaggccggaagccttcaacacaccctttttaaacattgacaagctgcgctctgcattcaaggcagatgaattcctgaattggcacgccctttttgagagcatcaagaggaagctgcctttcctgaactgggacgcattccccaagctcaagggtctccgtagtgccaccccggatgcccaatag

SEQ ID NO: 8899 - DNA, 618 bp, synthetic construct
  misc_feature 1..618: note = source = /note="Description of Artificial Sequence: Synthetic coding sequence"
  source 1..618: mol_type = other DNA
atgatgcggaccctgatcaccacccaccccctgcccctgctgctgctccctcaacaactgctgcagctggtccagttccaggaggtggatacagactttgattttccagaggaagacaaaaaagaagagttcgaggagtgtttggagaaatttttttccactggacccgcacgccctccaacgaaagaaaaagtgaagcgcagggttttgatcgaacctggtatgccactcaaccacattgaatattgtaaccacgagatcatgggcaagaatgtctattataagcacaggtgggtcgcggaacactacttcctcctcatgcagtacgacgagcttcagaagatctgctataaccggttcgttccgtgtaagaacggaatcagaaagtgtaatcgtagcaaaggactggtggaaggtgtgtactgcaaccttactgaggctttcgagatccctgcttgtaagtatgagagtctatatcggaagggatacgtacttatcacatgttcttggcaaaacgagatgcagaaaaggatcccacacaccatcaacgatctggtcgagccccccgagcaccgctcattcctgagtgaggacggcgtgttcgtgatttcaccatag

SEQ ID NO: 8900 - DNA, 402 bp, synthetic construct
  misc_feature 1..402: note = source = /note="Description of Artificial Sequence: Synthetic coding sequence"
  source 1..402: mol_type = other DNA
atgctggactggcggctggccagcgcccacttcatcctggccgtgaccctgaccctgtggagtagtggtaaggtactctcagtcgacgtcactacaaccgaagccttcgactccggcgtcatcgacgttcagagtaccccgacggtacgtgaggagaaaagcgccaccgatctgacggccaaactcttactgctggacgaactcgtatccctggaaaatgatgttattgaaaccaagaaaaaacgatcattttccggcttcggtagcccgctggataggcttagcgcggggtctgtggaccacaagggaaaacagagaaaggtcgtggatcaccccaagcggaggttcggcatccctatggatcgcattggtcgcaatcggctgagtaactcacggggctag

SEQ ID NO: 8901 - DNA, 846 bp, synthetic construct
  misc_feature 1..846: note = source = /note="Description of Artificial Sequence: Synthetic coding sequence"
  source 1..846: mol_type = other DNA
atgggcagccggggccagggcctgctgctggcctactgcctgctgctggcgttcgcgtcgggtttggttctgtcccgagtgccccatgtgcagggcgaacagcaggaatgggagggcacagaagagctccccagcccaccggatcacgctgaacgagccgaagagcagcacgagaaataccggccttctcaggatcagggtcttccagcttctaggtgcctccgctgctgcgaccccgggacatccatgtatcctgcgaccgcagtcccacaaatcaacatcacaattctcaaaggcgagaaaggtgaccgtggagatcggggattgcagggaaaatatggtaagacaggaagtgcaggagcgcgcggccacacggggcccaagggccaaaaggggtcaatgggtgctcccggggagcgttgcaagagccattacgcagcgttctcagtgggccgaaaaaagcctatgcatagcaaccattattaccagacagtcatctttgacaccgagttcgtgaacctgtatgatcactttaatatgtttactggcaagttctactgctatgtaccaggtctgtatttctttagcctgaatgtccacacttggaaccaaaaagaaacttatctccatataatgaaaaacgaggaagaggtggtcatactttttgcccaggtgggagaccgatccattatgcagagtcagtctttgatgctggagctgcgcgagcaggaccaggtctgggtcagactctataaaggtgagcgggagaacgcaatcttctctgaggaactggacacgtacattaccttctccggttacctggtgaagcacgctactgaaccatag

SEQ ID NO: 8902 - DNA, 132 bp, synthetic construct
  misc_feature 1..132: note = source = /note="Description of Artificial Sequence: Synthetic coding sequence"
  source 1..132: mol_type = other DNA
atgaagctgctgtacctgttcctggccatcctgctggccatcgaggagcccgttataagcgccctggtgcgcactgtggggtgttgtctggacaccgctaggcagaccccgcaccccagcatgcatgggtag

SEQ ID NO: 8903 - DNA, 861 bp, synthetic construct
  misc_feature 1..861: note = source = /note="Description of Artificial Sequence: Synthetic coding sequence"
  source 1..861: mol_type = other DNA
atgaaggtgctgctgctgaccggcctgggcgccctgttcttcgcctactattgggatgacaatttcgaccctgcgtctttgcaaggcgccagggttcttctgactggggccaacgccggcgtcggtgaagagttagcgtaccattatgccaggctggggagccacctggtcctgacagctcatacagaggccctcttgcaaaaggtggttggcaattgccggaagctgggagcgcctaaagtattttacatcgcagcggatatggccagccccgaggctccggagagcgtcgtgcagttcgcgctggataagctgggtggactggactacctggtactcaaccatattggcggggcccccgcaggaaccagggctaggtctccccaggctacgagatggttaatgcaagtgaattttgtgagctatgtgcagttgacatcacgggctctgccctccttgactgactcgaagggctccctcgtcgtggtgtctagtctgctgggcagagtcccaacatcattctccactccctatagcgctgctaagttcgccctggatggcttttttggctccctgaggagggagctggacgtacaggacgtgaacgtggcaattaccatgtgtgtattgggacttcgtgaccgtgcatctgcagctgaggccgtccggggggtcactagagtgaaagctgcacccggtccgaaggctgctctggcggtgatccgaggcggggcaactcgagctgctggggttttctatccctggcgattccgcctgctttgcttgttgagacgctggttgcccaggccgagagcctggttcatccgccaggagctgaacgtgacggcagccgccgcttag

SEQ ID NO: 8904 - DNA, 1326 bp, synthetic construct
  misc_feature 1..1326: note = source = /note="Description of Artificial Sequence: Synthetic coding sequence"
  source 1..1326: mol_type = other DNA
atgcgggtggtgaccatcgtgatcctgctgtgcttctgcaaggccgccgaactccggaaggctagcccaggttcagtgcgttctcgagtgaaccatggcagggcaggcggtggtaggagaggaagtaatcctgtgaaacggtatgcacccggcctgccctgtgatgtctacacttatttgcatgaaaaatacctggattgtcaggaacgcaagcttgtgtatgtgttaccgggatggccccaggatcttctgcacatgttgctggccaggaacaagattcgtacattaaagaacaatatgtttagcaagttcaagaaattgaaaagcctagaccttcagcaaaatgagatttccaaaattgagagcgaagcttttttcggacttaacaagttgactaccctcctgttgcagcacaaccaaattaaggttctgaccgaggaagtttttatctacactcctttgctcagctatctgcgtctctatgacaacccatggcattgtacctgcgaaattgagaccctcatctccatgctgcagatccccaggaaccggaatttggggaattatgccaaatgcgagagtccgcaagagcagaagaacaaaaagctcagacaaattaaaagcgaacagctctgcaatgaggaggagaaggaacagctggaccctaaacctcaggtctcagggcgacctccggtcataaagccagaggtggattcaaccttctgccacaactacgtgttcccgatccagaccctcgattgcaagcgcaaggaattgaagaaggtgcccaataatattccccccgatattgtgaagctggatctgagctataacaagatcaaccaacttaggcccaaggagttcgaagacgtccacgagttgaagaaactcaatttatcctcaaacgggatcgaattcatcgacccagccgcctttctcggcttaacccatcttgaggagcttgatctgtccaataattctttacagaattttgattacggcgtactggaagatctctatttcttgaagcttctgtggctgcgagacaatccttggcgatgtgactataatatccactacctctattattggctgaaacaccactataacgtgcattttaacggccttgagtgcaaaactccggaggagtataaagggtggtcagtggggaagtacatcagaagttactatgaagaatgcccaaaagataagttgcccgcttatccagaatcattcgatcaagatactgaggacgacgagtgggaaaagaagcaccgggatcacacagccaagaagcaatctgtgatcattactatcgttggctag

SEQ ID NO: 8905 - DNA, 1539 bp, synthetic construct
  misc_feature 1..1539: note = source = /note="Description of Artificial Sequence: Synthetic coding sequence"
  source 1..1539: mol_type = other DNA
atggccgagagcggcctggccatgtggcccagcctgctgctgctgctcctacttcccgggcctcctcccgtggctgggttagaagatgctgcctttcctcaccttggggagagcctgcagccgctcccgcgcgcgtgcccccttcggtgcagttgtcctcgcgtcgacacagtggattgcgacggccttgacttaagagttttcccagacaatattacacgcgccgcccagcacttatcccttcaaaacaaccagctgcaggagctgccttataacgagctgtctcgcctctctggcctgagaaccttaaacttgcacaacaatttgattagtagcgagggcctgcctgatgaagcattcgaatccctgacacagctgcagcacctttgtgttgctcataacaaattgtctgtcgcccctcagttcctgccacgcagtctccgtgttgccgatctggctgcgaaccaggtgatggagatcttccctctgactttcggcgaaaaacccgctttacggtccgtatacctgcataacaatcaactgtctaacgccgggcttcctccggatgccttccgagggagtgaagcaattgccactctgagcctgtctaacaaccagctgtcttacctgcctccatcacttcctccatcactggaaagactgcacctgcaaaacaacctaatctcaaaggttcctcgcggtgccctgtcccggcaaactcaattaagggaactctaccttcaacataaccagttgacagatagcggattggacgcaaccactttttccaaactgcacagccttgagtatctcgatttatctcacaaccagttgaccactgttcccgcaggtctgccgcgtacactcgctatcctgcaccttggacgcaaccgaatacgacaggtggaagccgccagactgcacggagcaagaggactcagatacctgctccttcagcacaatcaattaggaagttcaggactccccgctggcgccttgcgccccttgcgagggttgcatacgctgcatctgtacggaaacggcctagaccgcgtgccgccagctctccctcgtcggctacgggccctggttctaccccacaaccacgttgcagcattgggcgcacgagacctggtcgccacacctgggcttaccgaactaaatttggcttacaaccgccttgccagcgcccgtgtccaccaccgcgcctttcggaggctcagagccttgagaagtttggatctggccggaaaccagctgacaagactgccgatgggtctgccaacagggctgcggacgctgcagctgcagcggaatcagctccgtatgctggagcccgaacctctagcaggattagatcagttacgggagctgtccttagcccacaaccgccttcgtgttggcgatattggcccgggtacatggcatgaactgcaggcattgcaggtccggcatagactggtcagccacactgtgccgcgggccccaccatccccctgcctgccatgccacgtccctaacatactcgtgtcatggtag

SEQ ID NO: 8906 - DNA, 2328 bp, synthetic construct
  misc_feature 1..2328: note = source = /note="Description of Artificial Sequence: Synthetic coding sequence"
  source 1..2328: mol_type = other DNA
atgaaggagggccccgaggaggccggcagcggccggtacggcccccggtatatcactgatatgggcgcaggcgaggatgacgagggattcgaggacgatctggacctggatatatccttcgaagaggtaaaacctctccctgcaaccaaaggtggaaacaagaaattcctggtcgaatcaaagaagatgtccatctcaaatccaaagaccatatctaggctaatccccccgacctccgccagcctgccagtaactacggtagctccacagcccatccctatacaaaggaaaggaaaaaacggcgttgctatcatgtctcgactctttgacatgccatgcgacgagactctgtgctcagcagattcattctgcgtgaatgattacacttggggggggagtcggtgccagtgcactcttggaaagggcggtgagagctgttcagaggatattgtgattcagtacccgcagtttttcgggcacagctacgttacttttgagccgctgaagaacagctatcaggctttccagataacactcgagtttagagccgaggcagaagatggcctgctcctgtattgcggagagaacgaacacggcaggggcgacttcatgtccttggcaatcatccgtagatccctgcagtttagatttaactgtggtacaggcgttgccatcattgtcagcgagacaaagataaagttaggcggatggcacaccgtgatgctgtaccgggacgggctaaatggccttttgcagcttaacaatgggacccctgtgactggacagagccagggacagtactccaagataaccttcagaactccactctatttggggggagctcctagcgcctactggctggtacgcgccacgggaactaacaggggattccaaggctgtgtacagagcctggcagttaacggacgcaggatagacatgagaccatggcccctgggcaaagctctgagcggcgccgatgtcggagagtgctcttccggaatttgtgatgaggcctcctgtatccacggggggacatgcactgccattaaagctgactcatacatctgtctgtgtcccctcgggttcaaggggaggcattgcgaggatgcattcactttaactatcccacagtttagagagtctctcagaagctacgcggctaccccctggcctctggagccacagcactacctctcctttatggagttcgagatcactttccggccagactccggggacggagtgcttctgtattcatatgacactggatcaaaagacttcttgtctataaatctcgccggcggacacgtggaattccggttcgactgtggcagtggcaccggggtgttgcggagcgaagacccccttactctcgggaactggcacgagcttagagtcagcagaacggccaaaaacggcatccttcaggtagataagcagaaaattgtcgaaggcatggctgagggagggttcacccaaataaagtgcaacacagatattttcattgggggggtgcctaactacgacgacgtgaaaaaaaattccggagtgcttaagcctttcagcgggtccattcagaagatcatactcaatgatagaaccattcatgtgaagcatgatttcacatccggtgtgaacgtggaaaatgcagcacatccctgcgttcgggcaccgtgtgcccatggaggatcttgccggccccgtaaggagggctacgactgtgattgtcccctcgggtttgagggcctgcactgtcagaaggccattatcgaggccatcgaaattcctcaatttataggacgatcatacttaacatacgataatcccgacatcctcaagagagtgtctggtagtagaagcaacgtatttatgaggtttaagacaacggccaaagacggattgctgttgtggcgcggcgactcacccatgcggccgaattctgatttcataagtctggggctgcgggacggcgctctagtgttttcatataatttgggtagtggagtcgcctccatcatggtgaacggatcatttaatgacggcaggtggcaccgggtgaaagctgtgcgggacggacagtccggcaaaatcaccgtcgacgactatggagcaaggaccggtaagtctcctgggatgatgcggcagctgaatattaatggtgccctatatgtgggtggtatgaaggaaattgccctccacaccaatagacagtacatgcggggcctagtcgggtgtatttcacactttaccctctccacggattaccacatcagtttggtggaagacgcagttgatggcaagaatatcaacacctgcggtgcgaaatag

SEQ ID NO: 8907 - DNA, 1431 bp, synthetic construct
  misc_feature 1..1431: note = source = /note="Description of Artificial Sequence: Synthetic coding sequence"
  source 1..1431: mol_type = other DNA
atgaagttccagggccccctggcctgcctgctgctggccctgtgcctcgggtctggtgaggccggcccactgcaaagtggagaagagagtacaggaactaatatcggagaggcgctgggacatgggctcggcgacgccctgagtgagggtgtcggtaaagcaatcggaaaagaagccggaggcgccgccggtagcaaagtttcagaagcgcttggacaggggacccgggaggctgtgggcaccggcgttcgccaggtgccagggtttggggtcgccgatgcgctgggaaacagggttggcgaagctgcacacgccctagggaacaccggccacgagatcgggcggcaggcggaggacgtgatccgacacggcgctgatgctgttcggggcagctggcagggtgtaccaggccacaacggcgcctgggagacctcggggggacacgggattttcgggtcacagggaggattgggcggtcagggccagggtaaccccggtgggctcggaactccctgggtgcacggctaccccgggaacagcgctggctctttcggcatgaatccccagggcgccccttggggccaggggggcaacggaggtccacctaacttcggaaccaacacgcagggtgccgtggctcagcccggatatgggtccgtccgcgcaagcaatcagaacgagggctgtactaatccaccaccttctggcagcggggggggttcttccaatagcggaggaggttccggctcacagtcaggaagttctggaagtggatctaacggcgataacaataatggatcatcttccggaggaagctctagcggaagctcctctggaggatcctccggtggctcgtctggaggatcctccggaaatagcgggggaagcaggggcgactccggctcagaatcatcctgggggagctctaccggatcttccagcggaaaccacgggggctctgggggaggtaacggacacaagcccgggtgtgagaagccaggaaatgaggccaggggttcaggggaatcaggtattcagaatagcgagacctcgccagggatgtttaactttgataccttttggaagaattttaagtctaagctgggcttcataaactgggacgcaataaataagaatcaggtcccaccaccctccacaagagctctactttactttagtaggctgtgggaggactttaaacagaacacaccttttcttaattggaaggccattatcgagggggcagacgctagctctttacagaagcgggcaggcagggatgatcaaaactacaactacaaccagcacgcctatcccactgcgtatgggggcaaatatagtgttaaaactcctgctaaggggggtgtttcacccagttccagtgcaagcagagtccagccgggtcttctacagtgggtcaaattttggtag

SEQ ID NO: 8908 - DNA, 1911 bp, synthetic construct
  misc_feature 1..1911: note = source = /note="Description of Artificial Sequence: Synthetic coding sequence"
  source 1..1911: mol_type = other DNA
atgaccacctggagcctgcggcggcggcccgcccggaccctgggcctgttgctgcttgtggtgctggggttcctcgtgctcagacgcctggactggtctactcttgtacctctgcgattgcggcaccgccagttaggcctccaggcaaaaggctggaacttcatgctggaagactccactttttggatctttggcgggtctatccattactttagggtgccgagagagtactggcgggatcgactcctgaaaatgaaggcgtgtggtctgaatactctcacaacctatgtgccttggaatctacatgagcctgaaaggggcaaattcgatttctctgggaacctggacctggaagcctttgtgctgatggctgcggagataggactgtgggtaattctgcgacccgggccttatatatgcagcgagatggacttgggcggactgcctagctggctcctgcaggatcccggcatgcgcctgagaacaacgtacaaggggtttacagaagccgtggacttgtacttcgaccaccttatgtctcgggtggttccactccagtataaacgtggcggtcctatcatcgctgtgcaggtagaaaacgaatatggtagttacaacaaagatcctgcctatatgccttatgtgaagaaagctctggaagaccgcggcatagtcgagctcctgctgacctccgacaataaggacggcttgtccaagggcatcgttcagggcgttctggcgacaatcaacctgcagtcgacccacgaactgcaattgctaacaacctttttgttcaatgtccagggtacccagcccaagatggtaatggagtattggacaggttggttcgatagctggggaggccctcacaatattcttgattcctctgaggtgctcaaaacggtgagcgcaattgttgacgctgggtcctccattaatctgtatatgtttcatggtggcacgaactttgggtttatgaatggggcaatgcacttccacgattacaagtccgacgtcacaagctacgactatgacgccgtgttaacagaggctggagactatactgccaaatatatgaagctgagggacttttttggatctataagcgggatacctctccctccccccccggatttgctgcctaaaatgccttacgaacccctaaccccggtgctgtatctcagcctatgggatgccctgaagtacttaggcgaaccaattaagagcgaaaaacccatcaatatggaaaatttacccgttaacgggggaaatggccagtcattcggatatatcctgtatgagacttcaatcacctctagtggaatcttgagcggacatgtacacgaccggggccaggtctttgtgaataccgtctccatcggctttctggattataaaaccaccaagatcgccgtaccactgattcaggggtacactgttctgcggattttggttgaaaacagggggagagtcaactacggcgaaaatattgacgatcaaaggaagggactcatcggtaatctgtatctaaatgatagcccactgaaaaactttcgcatctactccctggacatgaagaagtcctttttccagcgattcgggctggacaagtggtcaagccttccagagactcctacactccccgccttcttcttgggatccctgtccatttcatcaaccccgtgcgacacatttttgaagcttgaaggatgggaaaagggggtcgtgtttatcaacgggcagaatttaggtcgatactggaatattggaccccagaaaactttgtacctgccgggtccgtggctgtcgtctggcatcaatcaggtcatcgtgtttgaagagacaatggcagggccggcactccaattcactgagacacctcaccttgggcggaatcagtatatcaagtag

SEQ ID NO: 8909 - DNA, 672 bp, synthetic construct
  misc_feature 1..672: note = source = /note="Description of Artificial Sequence: Synthetic coding sequence"
  source 1..672: mol_type = other DNA
atgacccggtggagcagctacctgctgggctggaccaccttcctgctgtattcttacgagagctccgggggaatgcacgaggaatgtgtgtttccttttacttacaagggaagcgtgtatttcacctgcacacacatacactccctgtcaccgtggtgtgccactcgcgctgtgtataatggccagtggaagtactgccagagcgaggactatccacgctgcatcttcccattcatctaccgaggcaaagcctataacagttgcatttcacaggggtcattccttgggtcactctggtgctccgtcacatcggtcttcgacgaaaagcagcagtggaagttttgcgaaactaacgagtacgggggcaacagtctccggaaaccttgtattttcccctcgatttaccgaaataatgtggtgtccgattgtatggaagacgaatctaataagctttggtgccctacgacggagaatatggacaaggacggtaaatggtctttttgcgctgacacaaggatcagcgcattggtgcctggattcccctgccacttccctttcaattacaagaacaaaaactattttaattgcaccaatgaaggctcgaaggaaaacttggtgtggtgcgcaactagctataactacgaccaagatcacacttgggtttactgttag

SEQ ID NO: 8910 - DNA, 1368 bp, synthetic construct
  misc_feature 1..1368: note = source = /note="Description of Artificial Sequence: Synthetic coding sequence"
  source 1..1368: mol_type = other DNA
atgctgcaccccgagaccagccccggccggggccacctgctggccgtgctattagccttgcttggcaccacctgggctgaggtttggcccccccagctgcaagagcaggccccgatggccggggcgctaaatcgaaaggagagtttcctgttactgagtttacacaaccgcttgaggagctgggtgcagccccctgctgcagacatgaggaggctggactggtccgattcccttgctcaactcgcccaggcccgcgccgcgctgtgtggcatccctacacctagtctcgccagtggtctgtggcgaacactgcaagttggatggaacatgcaactcttacctgccggactcgccagcttcgttgaggtggtgtcattgtggtttgccgagggtcagcggtacagccacgcagcaggcgagtgtgcacgcaatgcaacatgtacgcactatacacaattagtgtgggcaacatcatctcagctgggatgcgggagacacttgtgcagtgccggccagacggcaattgaggccttcgtctgtgcatatagcccagggggaaactgggaagtgaacgggaagacgatcattccttacaaaaaaggggcttggtgttctttgtgcactgcctctgtgtccggctgctttaaggcatgggaccacgctggtggcttgtgcgaggtgccaagaaatccgtgcagaatgtcatgtcaaaatcatggaagactgaacatctccacatgccactgccactgcccgccaggctacactggacgctattgtcaggtgcggtgctcgttgcaatgtgtccatggaaggtttagggaggaagagtgctcatgcgtttgtgacatcgggtatggaggggcccaatgtgctacgaaggtgcacttcccctttcatacatgcgatttgcgaatcgacggcgattgtttcatggttagctctgaagccgacacctactatcgtgcgcgcatgaaatgtcaaagaaaaggaggggtgcttgcgcaaattaaatctcagaaagtgcaagacatcttggccttttacctgggacgactggagacaactaacgaggtgattgacagcgatttcgagacaaggaacttttggattggcttaacatacaagacagctaaggactccttccgttgggctaccggcgagcaccaggcgttcacttctttcgccttcggtcagcccgacaaccatgggctcgtgtggttgagcgctgccatgggatttgggaattgcgtcgagttgcaggcgtcagcagccttcaactggaatgaccagcgctgtaagacaaggaataggtacatctgtcagtttgctcaagaacacatttcaaggtggggcccaggctcatag

SEQ ID NO: 8911 - DNA, 1425 bp, synthetic construct
  misc_feature 1..1425: note = source = /note="Description of Artificial Sequence: Synthetic coding sequence"
  source 1..1425: mol_type = other DNA
atggccgacatgcagaacctggtggagcggctggagcgggccgtggggaggctggaagctgtatcccatacttcagatatgcatcgcggctatgcggattccccctctaagggcgctgcaccttacgtgcaggcctttgactcattgttagccggacccgtagccgagtacctgaagatctctaaggagattgggggagatgttcagaagcatgctgagatggtccataccggcctgaagttggagagagctctcctggtcactgcctcccaatgtcagcaacctgcagaaaacaaactgtctgacctattggccccaatcagcgagcagatcaaagaggtcattacattcagggagaaaaatcgaggctctaaactttttaaccacctgtcagcagttagtgaaagtatacaggccttgggctgggttgctatggcaccaaaaccgggaccctacgtaaaagagatgaacgacgctgccatgttttacacaaaccgtgtactcaaagaatataaagacgtggacaagaagcacgtcgactgggtgaaagcgtacctgtctatctggaccgagctccaagcctacattaaagagttccacacaacaggcctcgcctggtccaagaccggacccgtagccaaggagctgtcaggccttcctagtggcccctctgctggctcatgtccgcccccaccgccaccctgcccccccccacctccggtgtccacaattagctgcagctatgaaagcgcatccagatccagcctgttcgcacagattaatcagggggaaagcataacacacgctctaaagcatgtgtcagacgacatgaagacacacaagaaccccgctttaaaagctcagagcggccctgtgcgtagtggcccaaagccattttcagcccccaaaccccagacctctccttctccaaaaagggcaaccaaaaaggagcctgccgtgttagaacttgagggaaagaaatggcgcgtcgagaatcaggagaatgtctcaaacctcgtcattgaagatactgaattgaagcaggtggcatacatttacaagtgcgtcaataccacactgcagattaagggtaagattaactcaattactgtggacaattgcaaaaagttggggctggtgtttgacgatgttgtgggcattgtggaaattataaactctaaggatgtcaaggtgcaagtcatgggaaaggtacctacaatttcaataaacaagaccgatggttgtcacgcctatttgtctaaaaattcactagattgcgagattgtctctgccaaatcgtccgagatgaacgttctgatcccaacagagggaggcgattttaacgaatttcccgtccctgaacagtttaagaccctgtggaatggccagaagcttgtcaccaccgtcaccgagatcgccggatag

SEQ ID NO: 8912 - DNA, 360 bp, synthetic construct
  misc_feature 1..360: note = source = /note="Description of Artificial Sequence: Synthetic coding sequence"
  source 1..360: mol_type = other DNA
atgaacaagatcctgagcagcaccgtgtgcttcggcctgctgaccctattgagtgtactgagctttctccagagtgtgcacgggcgaccttatctgacccaagggaatgagatttttccagataagaagtatactaatcgcgaagagttgcttctggctctgctcaataagaacttcgatttccagagaccctttaataccgatttggctcttcccaataagctggaggaactaaaccagttggagaaactgaaggaacaactggtcgaggaaaaagattccgagacatcttatgccgtggacggcttattctcaagccacccctccaagagagcctgcttctggaagtactgcgtgtag

SEQ ID NO: 8913 - DNA, 3756 bp, synthetic construct
  misc_feature 1..3756: note = source = /note="Description of Artificial Sequence: Synthetic coding sequence"
  source 1..3756: mol_type = other DNA
atgcggctgctgctgctggtgcccctgctgctggcccccgcccccgggtccagcgcccctaaagttaggagacagagcgatacctggggcccctggagccagtggtcaccatgcagtcgcacctgcggcggcggcgtttcctttagggagcgtccttgttactctcagcggcgggacggcggctcaagctgcgttggtcccgcaagatcccacaggtcctgcaggacagagtcctgccctgatggggctcgcgatttcagagcagagcaatgcgccgaatttgatggagccgagttccaagggagacggtacaggtggctgccttactatagtgcccccaacaagtgcgaactgaactgcattcccaagggagaaaacttttattataaacatagggaagccgtggtggatggtaccccctgcgaaccgggcaaacgagacgtatgtgtggacggcagttgtagagtcgtgggttgcgaccacgaactggactctagtaaacaggaagataaatgccttcgatgtggcggggatgggacaacctgctatcctgttgccggcacattcgatgcaaatgacctgtctcgggcggtgaagaacgtgagaggggagtactatctgaacggccattggaccattgaagctgcccgagcactccccgctgcatctaccatcctccactacgagaggggtgccgagggcgacctagctcccgaacgcttacatgcaaggggaccaacttctgagcccctggtgatcgagctcattagccaggagccaaaccccggggtccactacgagtaccacctgcctttgcgccgaccttctcccggcttcagttggtcacacggcagctggtccgactgttctgccgagtgtggggggggccaccagagcagactggttttctgtacgattgatcatgaggcttatccagatcacatgtgtcagagacagccccggcccgccgaccgccggtcatgtaaccttcacccttgccccgagacaaaacgatggaaagccggcccgtgggctccctgttctgcaagttgcgggggcggctcacagagccggagcgtgtactgtatctcttccgacggagcgggaattcaggaggctgtggaagaggctgaatgcgccggcttgcctggtaaaccacctgctatacaagcttgcaatctgcagagatgtgctgcgtggagtccggagccttggggggaatgcagtgtcagctgtggcgtgggtgtgcgaaaaaggagcgtcacttgtaggggagagaggggctctctcctccatactgcagcctgctccctggaggataggccaccactgactgaaccctgcgtgcacgaagattgccccctcctctcagaccaggcctggcatgtaggtacgtggggcctgtgctccaagtcttgctcatctgggacgcgaaggagacaggtgatctgcgccatcggaccaccttcgcactgtggctccctgcagcactccaagccggttgacgtggagccttgtaatacccagccatgccatctgccacaggaggtgccttcaatgcaagacgttcacacgcctgcgtctaatccctggatgcctctgggcccgcaggagagccctgcttcggatagccgcgggcagtggtgggcagcgcaagaacaccccagcgcacggggcgatcacaggggcgagcggggagatcctaggggagaccaggggacccacttaagcgcgctgggtcctgccccgtctctccagcagcctccctatcaacaaccgctgaggagcggcagcggaccgcatgattgccgtcattctccacatggctgttgtcccgatggtcataccgcgtccctggggccccagtggcaaggttgccccggggccccgtgccagcagagtaggtatggctgttgtccggatcgggttagcgttgccgaaggacctcatcacgctgggtgcacgaaaagttatggcggggactctaccggcggtatgcctcgtagccgagccgtggcaagcaccgttcacaacactcatcagcctcaggctcagcaaaatgagccaagcgagtgccggggctcccagttcggctgctgctacgataacgtggctaccgcagcaggacctctgggagaagggtgtgtgggacagccctctcatgcttaccccgtgagatgtttgctgccaagtgctcatggcagctgtgccgactgggctgcgcgctggtacttcgtggcttcagtcggacagtgcaatagattttggtatggtggctgtcacgggaatgcgaataattttgcctccgagcaggaatgtatgtcctcctgtcagggatcacttcacgggcctcgtcgacctcagcctggtgccagcggaagatcgacacacaccgacgggggtggttccagtcccgccggcgagcaggagccatcccagcatcgcaccggagctgccgtgcagagaaaaccctggcctagtggtgggctgtggcggcaagaccagcagccaggcccaggcgaggcccctcatactcaggctttcggagagtggccttggggccaagaacttgggagccgagcacccggcctcgggggggacgctggtagccccgcaccgcccttccactccagctcttaccgtatctcacttgctggcgtcgagccatccttagtacaggccgcactagggcaactggtgagactcagctgttctgacgacacagctccagagtcgcaggcagcttggcagaaggacggtcagcccatcagctccgaccgtcatcgcttgcagttcgatggctcactaatcatacaccctctgcaggccgaagatgccgggacatactcctgcggaagcacaaggcccgggagggacagccagaaaatccaactgcgtattatagggggcgatatggctgtcttatctgaggcggaattgtctcgctttccgcagccacgcgatcctgcccaggatttcggccaggcaggagcagcagggccattaggagcgatcccaagcagccatccccagcctgccaatcggctcagactggatcagaaccagcccagggttgttgatgcgtctcctggccagcgcattaggatgacatgccgcgccgagggattccctccccctgccatcgaatggcagagggacggtcaacccgtctccagtccccgacaccaactgcagcctgatggaagtctcgtcatcagccgcgtggctgttgaagatgggggtttctatacgtgtgtggcattcaatggccaagaccgggatcagcgatgggtgcagttaagagtgctaggggagctcacgatatccggattgcctcctacggtgacagtgcctgagggcgacactgctcgactgttgtgcgtggtcgccggcgagtctgtgaacataaggtggagtcgaaacgggttacccgtgcaggctgacggccatagagtgcaccagtcccccgatgggactctgctgatttataatctccgggcccgagacgaagggagctatacatgcagcgcctatcaaggatcccaagccgtatcccgcagcaccgaggtcaaagtggtctcccccgcccccacagcacagcctagagaccccggtagggactgcgtggatcagccagagttggctaactgcgatctgattctgcaggctcagttgtgcgggaacgaatactattcctctttttgctgtgcctcctgctcccgcttccagccgcatgcccaaccaatctggcagtag

SEQ ID NO: 8914 - DNA, 1731 bp, synthetic construct
  misc_feature 1..1731: note = source = /note="Description of Artificial Sequence: Synthetic coding sequence"
  source 1..1731: mol_type = other DNA
atggcccagggcgtgctgtggatcctgctgggcctgctgctgtggtctgatcccgggactgcaagcctgcctctactgatggattcggtaatacaggctctggcggagctcgagcagaaagtccccgccgcaaagacccggcacaccgccagtgcttggctgatgagtgcccctaacagcggcccccacaataggctttatcattttctattgggcgcctggagccttaacgcaaccgagttagatccctgtcctctgagtcccgagcttctgggcctcacaaaagaggtcgcaaggcatgacgtgcgcgagggtaaagagtatggggttgtgctggccccagatgggagtactgtggccgtcgaacccttgctggccggcctggaagccggtctgcagggccgaagggtcattaacctgcccctcgacagcatggctgctccttgggagactggggacaccttccctgatgtggtggcaatcgccccagatgttcgcgccacatctagccccggccttagagatggaagtcccgacgtcactaccgccgatattggtgccaatacacccgatgcaaccaaggggtgtccagacgttcaggcgtccctgcccgacgccaaggccaagagtcccccaacaatggtggacagcctcctggcagtcacccttgccggcaatctgggtctaacttttctacgcggtagccagacacagagccaccccgacttgggaactgaggggtgttgggaccagctgtcagcccccaggaccttcaccctgttggaccctaaagcctccctgctgactatggcattcctaaacggagccctcgacggagtgatcctgggcgactacctgtctcggactccagaacctcggccaagcctcagtcaccttctgtctcagtattatggcgccggggtggcacgcgacccgggctttcgctcaaactttcgacgccaaaacggtgctgcactgacctccgccagcatcctggcccaacaggtgtggggaacactggttctccttcagaggctggagcctgtacaccttcagctccagtgcatgtcccaggagcaattggcgcaggtggccgctaacgccaccaaggagttcactgaggcttttttaggctgccctgctatccacccacgatgccggtggggcgcagccccctatcgcgggagacccaagcttttacaattaccattaggattcctttacgtacaccatacgtacgtcccagcgcctccgtgcactgacttcaccagatgtgcagcgaatatgagatctatgcagaggtatcatcaggacacccaaggatggggagacatcgggtattcttttgtggtcggaagtgacggatacgtatacgaagggaggggttggcattgggtgggtgcccataccctcggtcataattctcgcggattcggggtagccatcgtgggtaattatacagccgcccttcctacagaggccgccctgcggactgttcgggacacactgccaagctgtgctgttcgtgccggattattacggcccgactacgccctcctgggtcacaggcagctggtcagaaccgattgccccggggacgccctattcgaccttctccgtacttggcctcattttaccgcgaccgtgaaacccaggcctgctcgcagtgtttccaaacggtccagaagggagccccctcccagaaccctgcctgccactgatctgcagtag

SEQ ID NO: 8915 - DNA, 846 bp, synthetic construct
  misc_feature 1..846: note = source = /note="Description of Artificial Sequence: Synthetic coding sequence"
  source 1..846: mol_type = other DNA
atgctgcccaagagccggcgggccctgaccatccaggagatcgccgcactcgccaggtcgagcctccatggcatcagccaggtcgtgaaagaccacgtgacaaagccgacggcgatggcccagggcagggtcgcacacctgatcgagtggaaaggctggtcaaagccaagtgactcacctgccgccttggaatccgctttcagcagctatagtgatctgagtgaaggtgagcaagaggccagatttgctgccggggtcgcagaacaatttgcgatcgcggaggccaagttgcgggcatggagttctgtggatggggaggactcaacggatgatagttatgatgaggacttcgctggcggcatggatactgacatggccggccagctacccctgggccctcacctccaggatctcttcaccggccatcgatttagtagacccgttagacagggttctgttgaacccgaaagtgattgcagccagacagtgagtcctgataccctttgctcgtcactgtgcagcttggaagacggacttcttggctcccccgcaaggctggcctctcaactgctgggcgacgagctgctgcttgctaagctgcccccctctcgcgaatccgcattcaggtcactgggcccactcgaagcgcaggattccctctacaactctcctctaacagaaagctgcctgagtccggccgaagaagagccggccccctgcaaggattgtcaaccgctgtgcccacccttgaccggctcttgggaacggcagcggcaggcctcagacttagcctcatcgggggtagtctcacttgacgaggatgaggccgagccggaagaacagtag

SEQ ID NO: 8916 - DNA, 2619 bp, synthetic construct
  misc_feature 1..2619: note = source = /note="Description of Artificial Sequence: Synthetic coding sequence"
  source 1..2619: mol_type = other DNA
atgggcatcgtgtggatcctgatgagcgtgctgccctggtggggccgttgcgctgacttagccatcgcaagtacacagctcgtgccatccaccgcctcagcacggatggccttgtcctcccaactgatgggtcggacagtctggaccccaatgagcgcttctgctctgcaggagcccgcgtatccggccctggccagaacttctcgagctccttccgccgccagcgtgccactggcatctaggtgcagagtgaccactgctttgataagtacatctgcccagcggtctcccacctcagcgagccttgctccggtgcccactgctctcggtgcctccagcgcctctgcacacctcgccctcagctctctcactatgggaactgttgccctcacccacggacgcgtgtctgcttccccagtgctgcgattgggttctgcacgttgtcctaagctctccacacccccgcgacctgcagcagccgccgttaggggactcggcagagcaggggagacaccagccaactgcgtacccaggagagctgtcccaggccctgatgatagtagggaggatgtgaatgagtgcgctgagaaccccggagtgtgtacgaatggcgtgtgtgtgaacacagacggcagttttagatgtgagtgcccttttggctactcccttgatttcaccgggatcaattgcgttgatacagacgagtgctcagtaggccatccttgtggtcagggcacttgcactaatgtgatcggcgggttcgaatgcgcctgcgccgacggcttcgagcctgggctcatgatgacctgtgaggacattgacgagtgttcgctcaacccattactctgtgctttccgttgccataacactgagggctcttacctgtgtacatgtcctgctggctacacgctgcgggaggatggggcaatgtgccgggatgtggatgaatgtgcagacgggcagcaggactgccatgccaggggtatggagtgtaaaaacttgatagggacattcgcatgtgtctgtccccccggaatgcgccccctgccagggagtggcgaaggttgcacagatgataacgagtgccacgcacagcccgatctatgcgtgaatggacggtgtgttaacactgctggcagctttaggtgtgattgtgacgaggggttccagcctagccccaccctcaccgagtgccacgacatacgacaagggccgtgctttgccgaggtccttcaaacaatgtgtcgatccctctccagttctagcgaggccgtcactagggctgaatgctgctgcggtggcgggcgggggtggggaccccgatgtgaattgtgtccattacccgggactagtgcttataggaagctgtgtccccacgggagtggttataccgcagagggcagggacgtcgacgagtgccgcatgttggctcatctatgtgcacatggagaatgcatcaattcactgggatccttcaggtgccactgccaagccgggtataccccagacgcaactgctaccacgtgtctggatatggacgagtgttcacaggtgccgaagccatgtaccttcctttgcaaaaacaccaagggttctttcctgtgcagctgtcccaggggctacctcctggaagaggatggtaggacctgcaaggatctggacgagtgcacctcacgccagcataactgtcaatttctctgtgtgaacaccgtgggggcatttacctgtagatgtcctcccggttttacccagcaccaccaggcctgttttgatgtaaatgaatgtgatgggccccatcgttgtcaacacggttgccagaaccaactcggcggctatcgctgctcgtgcccccaggggtttacgcagcattcgcagtgggcgcagtgtgtagatgaaaacgaatgcgcgctgtctcctcccacgtgcggctctgcctcatgcagaaatactctaggagggttccggtgtgtatgcccttcggggtttgatttcgatcaggcactgggtggttgccaggaagtcgatgagtgtgccggccgtcgcggcccctgttcttactcctgcgccaatactcccggcggtttcctctgtggctgtccacagggttactttagggcgggtcaggggcattgcgtgtctgggctcggcttcagtccaggaccacaggatacgcccgataaggaggagctgctttcttccgaagcatgttatgaatgcaagataaatggcctgtcgcctcgtgataggccccggaggagtgcccaccgggaccatcaggtgaacctggcaaccctggacagtgaagccctcctgaccctcgggctcaatttatctcatctaggaagggcggagagaatactagagctccggcctgccctagaggggcttgagggcaggatcaggtacgtgatcgttagggggaatgagcaagggttttttcgcatgcatcatctaaggggcgtgagctctcttcagctgggccggcgcagaccgggtccaggaacctacaggttggaggtggtctcccacatggcaggcccttggggcgtacaaccagaaggccagcccggaccctgggggcaggcactgcggctcaaagttcagctgcagctactctag

SEQ ID NO: 8917 - DNA, 1368 bp, synthetic construct
  misc_feature 1..1368: note = source = /note="Description of Artificial Sequence: Synthetic coding sequence"
  source 1..1368: mol_type = other DNA
atggcccggaaggccctgaagctggccagctggaccagcatggcccttgccgcatcagggatttatttttattccaacaagtatcttgaccccaacgacttcggggccgtgagagtcggccgggcagtggccactaccgccgtaatcagttatgattacctcaccagcctcaaatcagtgccgtatggcagcgaagagtatctgcaattgcgctccaagatccacgacctgttccagtccttcgatgacactcccctgggaactgcttcgctcgcccaggtacacaaagctgtcctacatgacggaagaacagtcgccgtgaaggtccaacatcccaaagttagagctcaatcttcaaaggacattttactaatggaagttctggtcctggcggtaaagcaactgttccccgagtttgaatttatgtggttggtcgacgaagcaaaaaagaacctgcctctggagttagacttcttaaatgagggacgcaatgcagaaaaggtgtcccagatgcttcgccattttgacttcctgaaagtgccgcgcattcactgggatttgtctactgagcgcgtgcttctgatggagtttgtggatgggggacaggttaatgatcgcgactatatggagagaaataaaattgacgtgaacgaaatcagtcggcatctggggaaaatgtattccgaaatgattttcgtgaatggatttgtacactgcgatcctcacccaggaaacgtgcttgtgagaaagcaccccgggactggcaaggccgagatagtcctgctggatcatggactttatcagatgttaacagaggagttcaggctcaattactgccacctgtggcaatctctgatatggactgacatgaaacgcgtcaaggaatatagtcaaaggctgggggccggggatctgtaccccctgtttgcatgcatgctgacggcccggtcatgggactcagtgaaccgcgggatttcccaggctcccgtcactgcaacagaggacttggaaatccggaataatgctgctaactacttgccacagattagtcacctacttaaccatgttcctcggcagatgcttcttattttgaaaaccaatgacctgctgaggggaattgaggcagccctgggcacccgggcctcagcctcttctttcttgaatatgagtcgatgctgcattagggctctggcggagcataagaagaagaatacttgtagcttttttcggcggacgcagatttcattttccgaagcctttaatctgtggcagattaatctgcacgaacttatcctcagagtgaaagggttgaagctggccgaccgtgtactggccttaatttgctggctctttcccgcacccctttag

SEQ ID NO: 8918 - DNA, 1245 bp, synthetic construct
  misc_feature 1..1245: note = source = /note="Description of Artificial Sequence: Synthetic coding sequence"
  source 1..1245: mol_type = other DNA
atgaaccccaccctgggcctggccatcttcctggccgtgctgctgacagttaagggactactcaagccttccttttccccgcgaaactacaaagcgctctccgaggtgcagggttggaaacagcgtatggccgctaaagagctcgctcgccagaatatggacttggggtttaagcttcttaagaaactcgcattttataaccccggtaggaacattttcctctcaccattatccatctccaccgccttttctatgctgtgtctgggcgcccaggactccactctggacgagattaagcaggggttcaattttcgcaagatgcctgagaaggatttacacgaagggtttcattatatcatccacgaactcacccagaagacacaggacttgaaactttccatcgggaatacattgttcattgatcagagactgcagccacagcgaaaatttctcgaggacgccaagaacttttactcagcagaaaccattctgacaaattttcagaatctggaaatggcccagaagcagatcaatgacttcattagccagaaaacccacggcaaaatcaataatttgattgaaaatatcgatccagggactgtgatgcttctggccaattacatttttttccgcgctagatggaagcacgaatttgatcccaacgtaaccaaggaagaggatttcttcttagagaaaaattcaagtgtcaaagtgccaatgatgtttaggagcgggatctaccaggtgggttatgatgacaaactgtcttgcaccattctggagatcccataccagaaaaacattaccgccattttcatcctgcctgacgagggcaagttgaagcacctcgaaaaaggcctgcaggtagatactttctctcggtggaagacattactctctcgacgcgtggtggatgttagcgtgccaaggctgcatatgacaggaacattcgacctcaagaaaaccctgtcctacataggagtgtcgaagattttcgaggagcacggggaccttaccaaaatcgctccgcaccggagcttgaaggtcggcgaagccgtccataaagcggagcttaaaatggacgaacggggtacagaaggtgcagcgggaacaggcgcccagacactcccgatggaaacacctttggttgtgaagatcgacaaaccttacctgcttctcatttactccgaaaagatcccatccgtgctgtttttgggaaaaatcgtcaacccaatcggcaagtag

SEQ ID NO: 8919 - DNA, 942 bp, synthetic construct
  misc_feature 1..942: note = source = /note="Description of Artificial Sequence: Synthetic coding sequence"
  source 1..942: mol_type = other DNA
atgagcgacctgctgctgctgggcctgatcggcggcctgaccctgctgctgcttttgacccttctggcttttgctgggtactctggtctgcttgccggggtggaagtaagcgcgggcagccctcccattcgtaatgtgacagttgcttacaagttccatatgggcttgtatggagaaaccggacggttgtttacagaatcctgtagtatcagcccaaaactccgctctattgcagtgtactatgataacccacatatggttccacctgacaagtgccgttgtgcggtcggaagcatattatctgaaggagaagaatcgccatctccagagcttatcgatctctatcagaaattcggtttcaaggtgttctcctttcccgcaccttcacacgttgtgacagccacatttccatacaccacaatcctcagcatctggctggccacccgcagggtgcatcctgctctggacacatacatcaaggagcggaagctgtgtgcctacccgcgcctggagatctatcaagaggaccaaattcacttcatgtgcccgctggctaggcagggcgatttctatgttccggaaatgaaagagacagaatggaaatggcgtggtcttgtggaggcaatagacacccaagttgatggtaccggagcagacactatgagcgacacatccagcgtatccctcgaggtttcacctggttcccgggagacgtcagccgcaactttgagtccaggagcctcgtctcggggttgggatgatggagacacacggtctgagcacagctattccgagagtggggcatcaggcagtagcttcgaagagctcgacctagagggtgagggtccattaggggagtccaggctggacccaggaaccgagccactgggcactacaaaatggctgtgggaaccaaccgcccctgagaaaggcaaggagtag

SEQ ID NO: 8920 - DNA, 603 bp, synthetic construct
  misc_feature 1..603: note = source = /note="Description of Artificial Sequence: Synthetic coding sequence"
  source 1..603: mol_type = other DNA
atggcctggggcggcgtgcacacctgctgcttccacctgtgctgctgctgttcatggcctcagggggcggtgccggaggaactgcacaaacaccctggccagacgctgttacttcagtgtcagtactctcccaagcgcgggccgtatcagccgaagagctggtgccaacagacctcaccgagcagatgcactctcctagtcacgtcttctaaaccgtggaccgctgtgcagaaatcgcattatacaatctgggataagccaaacgccggattcttcaatatcaccatgatccagctaacccagaacgattccggtttttactggtgcgggatctataacgctagcgagaacattattacagtgctcaggaatatcagcctggtggtcagtcctgcacccactacatcccccatgtggacccttccatggctgccaacatcaacagtgctcatcactagtccggaaggcacaagcggacatccctcgatcaacggtagtgagactagaaaatctcgggcacctgcttgcctgggttccggaggaccccggttcctggttctggtcctgtgcgggcttttactcgccaaaggcctgatgctatag

SEQ ID NO: 8921 - DNA, 1035 bp, synthetic construct
  misc_feature 1..1035: note = source = /note="Description of Artificial Sequence: Synthetic coding sequence"
  source 1..1035: mol_type = other DNA
accacccccagccgggccctgcccggctggagcaactgccggccccgatggcgtgccggccctaccccacaatcgccgacccctcaatcacgcatgcgcctgtccccgggccccccaagcgagtggacttggctgctgcctcacttcaatccctgccatcatcaccacaggcaccaccaccctaatcctacgacaagcctgttgcctacagaaccaccaagcggtcctgaagtctccagtcaaggcagagaggcgagctgcgaaggaaccctcagggcagtcgatccccccgtacggcatcatagctacgggcgacacgagggcgcttggatgaaagaccctgccgccagagatgatcgcatttacgtcactaactactattacggcaactccctagtagaattccggaacctcgaaaattttaagcaaggtagatggtcaaacatgtataaattgccctataactggatagggacaggccacgttgtgtatcagggagccttctactataaccgagcctttaccaaaaatataataaagtatgacctgcggcagaggtttgtggcttcttgggcgttactgccggacgtggtctatgaggacacaacaccatggaaatggagaggtcatagtgacattgatttcgctgtggacgagtccggtctgtgggttatctatcctgccgttgacgatcgcgatgaggcccaacccgaggtgatagtgctgagccggcttgacccgggtgacttgtctgtccaccgtgaaacaacatggaagacacggttgaggcggaacagctacggtaactgcttcttagtttgtgggatcctgtacgctgtggacacttataatcagcaggagggacaggtggcatacgcattcgacacccacaccggtactgatgcccgcccacaattaccatttcttaatgagcacgcttacaccactcaaatcgattacaaccccaaggaacgcgtgctatacgcctgggacaacggacatcagcttacttatactcttcatttcgtggtctag

SEQ ID NO: 8922 - DNA, 2682 bp, synthetic construct
  misc_feature 1..2682: note = source = /note="Description of Artificial Sequence: Synthetic coding sequence"
  source 1..2682: mol_type = other DNA
atggccgaggccgccctggaggccgtgcggagcgagctgcgggagtttcctgcagcggccagggaactgtgcgtacccctggccgtgccatacctcgataagcccccgaccccactacacttttacagagattgggtctgtcccaacaggccttgcatcattagaaatgccttgcagcactggccagccctgcagaaatggtccctgccttactttagagccacagttggcagcactgaggtaagcgtggccgtcacacccgacggatacgccgacgccgttagaggggatcgttttatgatgccagctgaaaggagactaccactctcctttgtgctcgacgtgcttgagggacgagcacagcaccccggtgtcctgtatgtacagaagcagtgcagcaatcttcctagcgaactgccccagctgttgcctgacctcgagtcccacgtgccttgggcctctgaagccctcggaaagatgcctgatgccgtcaacttttggctcggagaggcagctgctgtgacatccctgcataaagaccactacgaaaacctctactgcgtagtgagtggcgagaagcactttttgtttcatcctccttcagatcgacccttcattccctacgagctgtacacacctgcaacctatcagctgacagaggaggggacattcaaggtggtggacgaggaggcaatggaaaaagcagaggtgtctagaacgtgcctacttactgtgcgggtgctgcaggcacaccgtctgcctagtaaagatcttgtcacacccagcgattgttacgtcactctctggctgcccacagcgtgctcacacaggctccagacaagaacagttaaaaattcctcctcccccgtgtggaatcagagcttccactttcggattcaccgccagctgaagaatgtcatggagctcaaagtgtttgaccaagatctggtcacaggcgatgaccccgtgctgagtgtgctgtttgacgctggtaccctcagggccggtgaattccgtagagaatcattttccctgagcccacaaggggagggcagattggaggtggaattccgactgcagtcattggccgacagaggggaatggctcgtaagtaacggggtcctggtggcacgcgaactaagctgtttacacgtccagttggaagaaactggcgaccagaaaagctccgaacacagagtacagcttgttgtgcctggctcatgcgaaggcccccaggaggctagcgttggaaccggcactttcagattccactgccccgcatgttgggaacaggagctgagcatcaggctgcaggacgctcccgaagagcagcttaaggctcctttatccgcgctgccatctggccaggtagtacggcttgttttccctactagccaggaacccctcatgagagtggaactgaagaaggaagcgggcttaagggaattagcagtgaggttaggcttcgggccctgcgcagaagagcaggcttttttgagtcgcagaaaacaagtggtcgcagctgcacttcgccaggccctccagctggacggggaccttcaagaagacgagatcccagttgtggccataatggctaccggggggggcatcagggccatgacgagtctttacggccagctggccggactcaaggagttagggttgctcgactgtgtaagctacataaccggtgcttcaggctctacctgggctctggcaaatttgtacgaagaccccgaatggagccagaaggacttggccgggcccacagagctattgaagacgcaggtgaccaaaaacaagcttggtgtgctagctcccagccagcttcagagatacagacaagaattggccgaaagagcacgactaggatacccaagttgttttacgaacctctgggctttaatcaacgaggcactgctacacgacgaaccccacgaccacaaactgtctgatcagcgagaggcactcagccatggtcagaatcccctccctatctattgcgcacttaataccaagggacagtccttgacaacttttgagtttggcgagtggtgtgaattctctccttacgaagtgggattccctaaatacggagctttcatccctagcgaactgtttggttcagagtttttcatgggacagctgatgaagcgcttacccgagtcccgtatctgtttcctcgaaggcatttggagcaatttgtatgccgccaatctgcaggattccctgtattgggcctcagagcctagccagttttgggacaggtgggtgcgcaatcaagctaacctcgacaaggaacaggtaccccttttgaaaattgaagaaccacctagcacagcggggaggatcgctgagtttttcaccgacttactgacttggaggccattggcgcaggccacacataacttcctgcgaggcttacacttccacaaggattattttcagcacccccacttttccacttggaaggcgactaccttggacgggcttcctaaccaattgactccatcagagccccacctctgcctcttagacgttggatacttgatcaacacgtcatgtcttccattactgcagcctaccagggacgtcgatttaattctgtcattagattataacctccatggcgcttttcaggggagcggcgggcacccacggcggcggcagctgggccgatag

SEQ ID NO: 8923 - DNA, 354 bp, synthetic construct
  misc_feature 1..354: note = source = /note="Description of Artificial Sequence: Synthetic coding sequence"
  source 1..354: mol_type = other DNA
atgatcatcgacagcagccggatccccagcttcacccagctgcactcaaccatgacacgagcccctctactgttgctgtgtgtcgcactagtgcttcttggtcacgtgaacggggccacagtaaggaatgaagataagtggaaaccactaaacaatccacgtaaccgggacctgttctttcgcagactccaggcctatttcaaggggcgagggctggatcttgggacttttcctaatcccttccctacaaacgagaatcctcgtcctctcagcttccagagtgaactaactgcctccgcctcagcagattatgaagaacaaaagaactcattccataattacctcaaggggtag

SEQ ID NO: 8924 - DNA, 4143 bp, synthetic construct
  misc_feature 1..4143: note = source = /note="Description of Artificial Sequence: Synthetic coding sequence"
  source 1..4143: mol_type = other DNA
atgcggcacggcgtggcctgggccctgctggtggccgccgccctgggcctcggcgcccgcggcgtacgaggggctgtggcccttgcagatttttacccatttggagctgaacggggcgacgcagtcactcccaaacaggacgatgggggtagtgggctgcggcctttatcggttccctttccattcttcggcgccgagcattcaggactttatgttaacaataatggcatcatatctttcctgaaagaggtttcacagttcactcctgtcgcttttccgattgctaaagatcgatgcgtcgtcgcggcattttgggctgatgttgataacagacgggcaggcgacgtatactacagagaggctacagacccagctatgctgagaagagctacggaagacgttcgccattattttcccgagttactggacttcaatgccacttgggttttcgttgctacatggtatcgtgtgaccttttttggggggtcttcttctagcccagtcaacaccttccagacggtcctaattacagatggaaaactttcgttcacaatcttcaactacgaatcgatcgtgtggacaaccggaacacacgcttctagtggcggaaatgccaccggtttaggcggcatcgcagctcaggcaggcttcaatgctggcgacggccagcgttatttctcaattccagggtctcgtaccgctgacatggccgaggtcgagactacaaccaatgtaggcgtgcccggccgttgggccttcaggatcgacgatgcccaggttcgggttggtggatgtggacacactacgagtgtatgcttggcactgagaccatgtttaaacggagggaaatgcattgatgactgcgtgaccgggaacccatcctacacctgctcatgcctatctgggttcactggccggaggtgtcatttagatgtgaatgagtgcgcctcccagccatgtcaaaatggaggcacctgcacacatggtataaactcgtttagatgccagtgccctgctggcttcggcggtcccacgtgcgaaactgcacagtccccctgtgacacgaaagaatgccaacatggcgggcagtgtcaggtggagaacggctctgccgtgtgtgtttgccaggccggatatacgggcgctgcttgcgaaatggatgtggacgactgttcaccggacccttgcctgaacggcgggtcttgcgtagatctcgtcgggaactatacttgtctgtgcgccgaaccttttaagggcctgagatgcgagacaggcgatcacccagtgcccgacgcctgcctgtctgccccttgccacaatggtgggacctgcgtggacgcggaccagggatatgtatgcgaatgccctgaaggcttcatgggcctcgactgccgagaacgtgtgccagacgactgcgagtgccgcaatggggggcggtgccttggagctaatacaaccctctgtcagtgcccgttgggattctttgggctgttgtgcgagtttgagataaccgctatgccatgcaatatgaacactcagtgccctgacggcggatactgtatggaacacggtggttcgtacctgtgcgtttgccacaccgatcacaacgcttcgcatagccttccaagcccatgtgattctgatccctgcttcaatggtgggtcatgtgacgcgcacgatgacagctatacatgtgagtgtccacgggggttccacggcaaacattgcgaaaaagctcgcccacatctctgttccagcggaccctgccggaatggaggtacttgcaaagaagccggcggcgagtatcactgcagctgcccctaccggttcaccggaagacactgtgagataggtaagccggacagttgtgcaagcggtccctgccacaacggcggaacatgttttcattatatcggtaagtataaatgtgattgccctccagggttctctggcagacactgtgagattgccccgagcccttgttttagatctccctgcgtgaacggcggcacctgcgaagacagagacacagattttttttgtcactgtcaggccggctacatgggccgaaggtgtcaggccgaggtggactgtggtccacccgaggaggtgaagcatgcaacactgcgtttcaatggaacgcgcttgggggccgtggccctttatgcttgcgacagaggatactccctgtccgcccccagccgaatcagggtttgccagccacacggggtgtggtcggagcccccacagtgcctggaaattgatgagtgcagatctcaaccctgtctgcacggcggaagctgtcaagaccgggtggccggatacttgtgcctctgctctaccggttacgagggggcccactgtgagctcgagagagacgaatgtcgcgcacatccttgtcgcaatggtggttcttgtcggaacctgcccggcgcctacgtttgtcggtgccccgcaggttttgtaggcgtccattgcgagacggaggtagatgcttgtgactccagcccttgtcagcatggtgggcggtgtgaatctgggggcggcgcatatctctgtgtctgtccagaatccttttttggttatcactgcgagacagtgtctgatccatgcttctcctccccatgtggcggccgcgggtattgcttagcctccaatggctcacactcatgcacatgtaaggtaggctatactggagaggattgtgccaaagaactatttccaccgacagcattgaagatggagcgagttgaggaatctggagtgagtattagctggaaccctcctaacggacctgccgctaggcagatgctggacggatacgcagtcacgtacgtatcttccgacggttcttatcggaggacagattttgtggatcggacccggtcctcacatcagctgcaggccctggcagcaggccgagcctataatatttcagtcttttctgtaaagcgcaacagtaataacaaaaacgatatttcaagacctgcagttctcctagcccggaccaggccccggccagtggaaggattcgaagtcactaacgtaacagctagcaccatctccgtacaatgggctcttcatcgcatcagacacgctaccgtctccggggtacgggtgagtatccgccaccctgaagcactgcgagatcaggccactgacgtcgatcgaagcgtggataggtttaccttcagggctctgctgccagggaagcgttataccatccagttaactaccttgtccggcctccggggtgaggaacatcctaccgagagtctggctacagcaccaacccatgtctggactagacctcttccccccgccaatttgaccgcggccagagttacggccacctctgctcacgtcgtgtgggatgcccccacacctggctccctgttggaggcctacgtaatcaatgtgacaacaagtcagagcacaaagtcgcgctacgtacccaatggcaagctggcatcctacacggtgcgagatttattacctggccggcgctaccaattgagcgtcattgccgtgcagtctaccgaactgggtccccagcattccgaaccagctcatctgtacataattacaagtcctcgagacggtgctgaccgtaggtggcatcaaggaggacaccaccctcgggtactgaaaaatcgccccccccctgccagattgccggagcttcgcttactcaatgaccactctgcgcctgagacacctacccagccgccgcggttctctgagctcgtggacggcaggggccgggtttccgcccggtttggtggctctcccagtaaggctgccaccgtgaggtcacatgtgcctgggaattgctcggagaacccctgccagaatggcggcacctgtgtgcccggggcggacgctcattcttgcgattgtggcccgggatttaagggccgcaggtgcgagttggcttgcattaaggttagcaggccctgcactcgcctgttctcagaaactaaagcttttccagtctgggagggaggcgtctgccatcatgtgtataagcgtgtttacagagttcaccaggatatctgttttaaggagtcctgcgaatctacatcactgaaaaagacccctaatagaaagcagagcaagagtcagactctggaaaaaagctag

SEQ ID NO: 8925 - DNA, 474 bp, synthetic construct
  misc_feature 1..474: note = source = /note="Description of Artificial Sequence: Synthetic coding sequence"
  source 1..474: mol_type = other DNA
atggaggccctgcggcgggcccacgaggtggccctgcggctgctgctatgccgtccatgggccagtcgggccgcagcgcggccaaaaccttctgcatctgaggtgttaactcggcaccttttacaaagacgacttccacattggacttcattttgtgtgccatacagcgcagtgcgtaacgaccagtttggattgtctcacttcaactggcctgtgcagggtgcaaactaccacgtgctaaggaccggatgcttcccttttataaagtaccactgttcaaaggctccttggcaggacttggcaaggcagaacaggttctttaccgccctcaaagtggtcaacctcggcatcccgaccttactgtatggtcttggaagttggctgtttgcgcgggttaccgaaacagttcatacctcttacgggcccataactgtgtactttctcaataaagaggacgaaggagcaatgtattag

SEQ ID NO: 8926 - DNA, 288 bp, synthetic construct
  misc_feature 1..288: note = source = /note="Description of Artificial Sequence: Synthetic coding sequence"
  source 1..288: mol_type = other DNA
atgaagggcagccgggccctgctgctggtggccctgaccctgttctgtatttgccgaatggcaacaggtgaggacaacgatgaattttttatggacttcttgcaaacactgcttgttgggacccccgaggagctctatgaggggaccctggggaagtacaacgtgaacgaggatgccaaggcagccatgactgagctgaagagctgtatcgatggcctgcaaccaatgcacaaagcggagctcgtgaagcttttagtacaggtcctgggaagccaggatggcgcttag

SEQ ID NO: 8927 - DNA, 1053 bp, synthetic construct
  misc_feature 1..1053: note = source = /note="Description of Artificial Sequence: Synthetic coding sequence"
  source 1..1053: mol_type = other DNA
atgaagtgcagcctgcgggtgtggttcctgagcgtggccttcctgttggtctttatcatgtctctactttttacatattcgcatcattccatggcaaccctaccttatttagatagcggggcccttgatggcacacatcgggtgaagttggtgccgggctacgctgggcttcaacggttgtcaaaggagaggttatcaggaaaatcgtgcgcctgccgtcggtgcatgggggatgccggcgcttctgactggttcgattcccactttgatgggaacatctcacctgtgtggacgcgtgagaatatggatctccctcccgatgtgcagaggtggtggatgatgctgcaacctcagtttaaaagccacaacaccaatgaagtgcttgaaaagctctttcaaatcgtaccgggcgagaacccctacagattccgtgacccacatcagtgcaggcgttgtgcagtggttggtaactccgggaatctgcgtggcagcggctacgggcaggacgttgacggtcataatttcattatgcggatgaaccaagcccctaccgttggctttgagcaagacgtggggagcagaacgacgcaccatttcatgtacccagaatcagccaagaatctgcccgccaatgtatcgtttgttcttgtcccctttaaggttttggatcttctatggatcgcaagtgcactctcgacagggcagatccgttttacatatgctcctgtgaaaagcttcctgcgggtggataaggagaaagtgcagatttataaccccgccttctttaaatatattcacgacagatggacagagcatcatgggcgctacccgtccacaggcatgctggtgctgttctttgcattacacgtgtgcgacgaagtgaatgtatacgggtttggcgctgactccagaggtaattggcatcactactgggagaataaccgctacgccggcgagttcagaaaaaccggagttcatgacgcagacttcgaggctcatattattgatatgctggcgaaagcctccaagatcgaagtgtatcgtggaaattag

SEQ ID NO: 8928 - DNA, 600 bp, synthetic construct
  misc_feature 1..600: note = source = /note="Description of Artificial Sequence: Synthetic coding sequence"
  source 1..600: mol_type = other DNA
atggccagccccgaggcccccgagagcgtggtgcagttcgccctggacaaattggggggcctcgactacctggtcctgaaccatatagggggcgcacctgcgggcacacgcgccaggtctccccaggctaccaggtggttgatgcaggtcaattttgtttcatacgtgcaattgacttctcgcgctctgcccagtctgacggactcgaaagggtccctggtggtggtgagcagcctgctgggccgcgttcctacgagttttagtaccccttactcagccgcaaaattcgcactcgacggattcttcggttccttgaggagagaacttgatgtgcaggatgtaaacgtggccataactatgtgcgtactgggactaagggatcgtgctagcgctgccgaggccgtgcgcggcgtcacccgagtgaaagcggcaccggggcctaaagccgcgctggcagtcatccggggaggggcgacaagagctgccggcgtcttctacccctggcgattccgactactgtgtctcctcagaaggtggctacccagaccgagagcctggttcatacgccaggagctgaatgtcaccgccgccgctgcttag

SEQ ID NO: 8929 - DNA, 411 bp, synthetic construct
  misc_feature 1..411: note = source = /note="Description of Artificial Sequence: Synthetic coding sequence"
  source 1..411: mol_type = other DNA
atggtgcggccctaccccctgatctacttcctgttcctgcccctgggcgcgtgctttccactcctcgacagaagagaaccaacagatgctatgggcggcctaggggcaggcgagcggtgggcagatctggccatgggcccccggccgcattccgtgtggggaagctctaggtggctgcgcgcatcccagccacaagccctactcgtcatcgcgaggggcctccagaccagtggtagagaacacgcaggttgccgtttcagatttggacggcaggacgagggtagtgaggccaccggattccttccagccgccggggagaagacctctggaccactgggaaatctggctgaggaactgaacgggtactctaggaaaaaggggggcttcagtttcaggttcgggaggcggtag

SEQ ID NO: 8930 - DNA, 663 bp, synthetic construct
  misc_feature 1..663: note = source = /note="Description of Artificial Sequence: Synthetic coding sequence"
  source 1..663: mol_type = other DNA
atgcggggccagggccggaaggagagcctgagcgacagccgggacctagacggctcttacgatcagctgactgacagtgtagatgatgagtttgagttatccacggtgtgtcatcggccagagggtctggagcagctgcaggagcagaccaagttcactagaaaggagctccaggtgctttatcggggattcaaaaacgaatgccccagcggcattgtaaacgaagaaaattttaagcagatttacagtcaattctttccacagggcgattccagcacctacgccacgttcctgtttaatgctttcgataccaatcatgacggatccgtgtcatttgaggactttgttgctggcctatccgtgatactgagggggacagtcgacgataggctgaactgggcctttaatctttacgatctgaacaaggacggctgtatcacaaaagaggaaatgctggacattatgaagtccatctacgacatgatgggaaagtacacgtaccccgcccttcgggaggaagctcctagggagcacgtggaatccttctttcagaaaatggataggaacaaggatggggttgtgaccatagaagagttcatagagtcctgtcagaaggacgagaacattatgaggtctatgcagctgtttgataatgtgatttag

SEQ ID NO: 8931 - DNA, 2175 bp, synthetic construct
  misc_feature 1..2175: note = source = /note="Description of Artificial Sequence: Synthetic coding sequence"
  source 1..2175: mol_type = other DNA
atgctgcggaccagcacccccaacctgtgcggcggcctgcactgcagagccccttggttgtcttccggcatcctttgcctgtgtctcatctttctcctgggtcaggttggtctcctgcaggggcacccacagtgtcttgactacggcccgccattccagccccctctgcacttggaattttgctctgactatgagagctttggatgctgcgaccaacacaaagacagaagaatcgccgcacggtactgggatatcatggagtactttgacttgaagcggcatgagctgtgcggggactatataaaagatatcttatgccaggaatgttcgccatacgcagctcatctctatgatgcggaaaatacccagacccccctgagaaatcttcctggcctgtgctctgattattgttctgcttttcatagcaattgtcactctgctatcagtctgctgacaaacgacagggggctgcaggagtctcatgggagggacgggacaagattctgtcacctgctggacctgccagataaagattactgctttcccaacgtcctcagaaacgactacttaaaccggcacctagggatggtggcccaggacccacagggatgtctgcagctgtgtcttagcgaggtagccaatggcctcagaaaccctgtgtcgatggttcacgccggagacggcacccaccgcttctttgtggctgagcaggtgggggttgtgtgggtgtacttaccagacggatcacgcctggaacagccattcctcgatctaaaaaatatcgtgctgacaacaccttggattggcgacgaacgcgggttccttggcttggcattccaccccaaatttcgacataaccggaaattttatatctactattcttgtctggacaagaagaaggtcgagaagatcaggatctccgagatgaaggtctctcgggctgaccctaacaaggccgatttgaaaagcgagcgcgtgattctggagatcgaagaacctgctagcaaccacaatggtgggcagctcctcttcggactcgacggttatatgtatatctttactggggatgggggccaagcaggtgacccgttcggcttatttggcaacgcacagaataagagctcactcctgggcaaggtacttcggattgacgtcaacagagcaggctctcatggaaaacgataccgagtaccaagcgacaacccgttcgtcagtgaacccggagcccaccctgctatttatgcttatgggattaggaatatgtggagatgtgcggtagaccgaggcgatccaattaccagacaaggaaggggccggatcttctgcggcgatgtaggacagaacagatttgaagaggtggacctgattcttaaaggtggcaattacgggtggcgcgctaaagagggctttgcctgttacgacaagaaactgtgtcacaatgcctccctggatgacgttctccccatctatgcttatggccatgctgtgggtaagtccgtcaccggtggctatgtctataggggctgcgaaagcccaaatttgaacgggctgtacatttttggagactttatgagtggcaggctgatggccctccaggaggatagaaagaacaaaaaatggaagaagcaggatctctgtctgggatcgaccacttcatgtgcatttcccgggctgattagcactcacagcaagtttattatttcatttgctgaagatgaagccggtgagttgtatttcctggccacctcttatccaagcgcatatgccccacggggaagcatttacaagtttgttgacccttctaggagagcaccacccggcaagtgcaagtacaaacctgtgcccgtgcgaaccaaatcaaagcgcatcccttttcgccctctcgccaagacggttctggacctgctgaaggaacagtcagagaaagccgcccgcaagagcagctcagcaaccctcgcttctgggcctgcgcagggcctttccgagaaaggctcctctaagaaactggcctccccaacgagttccaaaaacacactgcggggtccaggtacaaagaagaaggcacgggtcggaccacatgtgcggcaggggaagagaagaaagtctctgaagagccactccgggcgaatgaggccttccgctgagcagaaaagggctggacgcagtttgccctag

SEQ ID NO: 8932 - DNA, 1218 bp, synthetic construct
  misc_feature 1..1218: note = source = /note="Description of Artificial Sequence: Synthetic coding sequence"
  source 1..1218: mol_type = other DNA
atgtggtacgtgagcacccggggcgtggccccccgggtgaacttcgagggcgcactgttcagcggttacgctcccgatggcgggctcttcatgcctgaggagttgccacagctcgatcgcggcaccctatgccaatggtccacactcagttaccctgggctggtaaaggagttgtgcgccctgttcattggcagcgaactgctgccaaaagacgaactcaatgacctgattgacagagccttctcacgattccggcaccgagaagttgttcaccttagcaggctcaggaatggtttaaatgtactcgagctgtggcacggcgtgacctatgcttttaaggacctgtccctctcatgcaccacacaatttctccagtacttcctcgaaaaacgagagaagcacgtgacagtagtggtgggcacaagcggggacacggggtccgctgcaatcgaaagcgtgcagggcgcaaaaaacatggatatcatcgtgcttctgcctaagggacactgtacgaagatccaagaactgcagatgacaacagttctgaaacaaaacgtgcacgtcttcggcgtggaaggcaatagcgacgagctcgacgagccgatcaaaacagtgtttgctgatgtcgcatttgtgaaaaaacataacttgatgagtctgaatagcattaattggtcccgggtgctcgtgcagatggcgcaccacttcttcgcatactttcagtgtaccccctcacttgacacacacccattgcccctggtcgaggtggttgtcccaaccggtgccgctgggaacctggcggccggttatattgctcaaaagattgggctcccaatcagattagtggtggctgtgaacagaaatgatataatccataggaccgtgcagcagggagatttctctctcagcgaggcagtgaaatccacactcgcgtctgccatggacatccaagtgccctataacatggagagggtgttttggttgttgagcggatcagatagccaggtgacgagggctctcatggagcagtttgaacggactcagagcgttaatcttcctaaggaactgcacagtaaatgggaacgccaagattatgaaaaaatggcggtgatggaatgtgacggatgttgtgtggagctgtgcctaggcaactgtgggccacggagaggttctgtcacagacatacccgggacggcaatggttcgcggcggcggctag

SEQ ID NO: 8933 - DNA, 492 bp, synthetic construct
  misc_feature 1..492: note = source = /note="Description of Artificial Sequence: Synthetic coding sequence"
  source 1..492: mol_type = other DNA
atgaccatgcggcacaactggacccccgacctgagccccctgtgggtcctcctcttatgtgcccacgttgtgactctcttggttcgcgctacacctgtgtcccagaccactactgccgcaaccgcctctgtacgaagcactaaggatccgtgcccatcccagccccctgtttttcccgctgcgaaacagtgtccggcactggaagttacctggcccgaggtggaagtccccctgaacggaaccctaagcctgtcatgcgtcgcctgtagtagattcccaaatttctcaatcctgtattggctgggcaacgggtccttcatcgaacacctgcccggtcgattgtgggaaggatctacatcacgcgaaagaggcagtactggatgggccgaggggaatctcgcacctcacccacgtagccctgccctgcagccacaacagagtactgccgcaggtctgcggctgtcaactggccctgctgcagcccaaccttag

SEQ ID NO: 8934 - DNA, 1590 bp, synthetic construct
  misc_feature 1..1590: note = source = /note="Description of Artificial Sequence: Synthetic coding sequence"
  source 1..1590: mol_type = other DNA
atggcccccgcccggaccatggcccgggcccggctggcccccgccggaatacctgcggtggctctctggctactttgcactctcgggctgcagggcacccaggcgggtcctcctccagcacctcccggcctgccagccggcgcggactgcttgaatagcttcacggccggagtgcccggcttcgtgttggataccaatgcaagcgtcagcaatggggccacattcctggaaagtcccaccgtgcgaaggggttgggactgcgtccgggcgtgttgtacaacacaaaattgtaatctagccttggttgaacttcagcccgatcgcggagaagacgcaattgctgcttgttttctaataaactgcctctacgagcagaatttcgtgtgtaagttcgctcctcgggaaggtttcatcaactatctcacgcgtgaggtgtacagatcttaccggcagctgcgtactcagggcttcggagggtccggcatcccaaaggcttgggcgggcatcgaccttaaagtccagcctcaggaacctttggtactgaaggacgtcgagaatactgactggcgtctcctgaggggggacaccgacgtccgagttgagaggaaagaccccaaccaggtcgagttgtggggtctgaaggaggggacttacctgttccagctgaccgtgacgagcagtgaccacccagaagacacagcgaatgtgacagtgacggttttaagcactaagcagacggaggactactgtctggcgtcaaataaagtcggacgatgccgaggttcttttccccggtggtactacgatccaacagagcagatttgtaaaagttttgtttatggcggttgcctcggtaataaaaacaactatcttcgggaagaggagtgcattctggcatgtcgaggcgtccagggcggtccactgagagggagctctggagctcaggcaacctttcctcagggaccatcaatggagaggcgccatccagtctgttcaggaacatgtcaacccacccaatttcggtgtagcaacggctgttgcatcgattctttccttgaatgcgatgacacccctaactgtcccgacgcgtcagacgaagctgcctgtgaaaaatatacctcagggtttgacgagctgcagcgcattcattttccatctgataaaggccactgtgttgatctccctgatacgggattatgtaaagagtcgatacctcgctggtactataatcccttctccgagcattgcgcgaggttcacgtacggcggctgttacggaaataagaacaacttcgaggaggaacagcagtgtctcgagtcatgcagagggatatcaaaaaaggacgtgttcgggttgcggcgggagattccgatcccaagcaccggttccgtcgaaatggccgtggctgtattcctggtgatctgtatcgtcgtagtggtcgccattttgggatactgcttcttcaagaaccaaaggaaagactttcacggccatcatcaccaccctccgccaactccagcctctagcacagtgtcaaccactgaggacaccgagcacctggtctacaaccacaccaccagaccattatag

SEQ ID NO: 8935 - DNA, 1803 bp, synthetic construct
  misc_feature 1..1803: note = source = /note="Description of Artificial Sequence: Synthetic coding sequence"
  source 1..1803: mol_type = other DNA
atgcagggccccctgctgctgcccggcctgtgcttcctgctgagcctgttcggagcggtcacccagaagactaaaactagctgtgcaaaatgtcccccaaatgcttcttgcgtgaataatacccactgtacatgtaaccatggatacaccagtgggtctggccagaagttgtttaccttcccccttgagacctgtaacgatactacctcctccaaaactacagaggggagaaaggagctacagaaaattgtggataagtttgaatccctcttgactaatcagactctgtggaggaccgagggacggcaggaaataagctccacggctaccactattctgcgggatgtggagagcaaggtgttagaaacagccctcaaggatccggaacagaaggtccttaaaatccagaatgattctgttgctatagagactcaagccatcaccgataattgttcagaggagaggaagacgttcaatttgaatgtgcagatgaacagcatggatatccgctgttctgacattattcagggtgacacacagggccctagcgctattgccttcatctcttattctagcttgggcaatatcattaacgccactttcttcgaggaaatggacaaaaaagaccaagtgtatctgaattctcaggtggtgagcgcagctataggaccaaaaaggaatgtgagtcttagcaaaagtgtcacgttgaccttccagcatgtaaagatgacaccttctaccaagaaagtattttgtgtgtattggaagtcaacaggtcaggggtctcagtggtcccgtgacggatgttttttaatccatgtcaataagtctcatactatgtgtaattgctcacacctttcaagctttgctgtgctaatggctttgacctcacaagaggaagaccccgtgctcaccgtaatcacttacgttgggttgagcgtgtccttactgtgtttacttctcgcggctctcacctttcttctgtgtaaggctatcagaaacacctcaactagtctgcacctccagctgtccctgtgcctgtttctggctcacttgctctttctggtgggcattgatcgcaccgaacccaaggtgctctgctctatcatcgctggcgcccttcattacctgtacctcgcagccttcacatggatgttgttggaaggtgtccacctgttccttactgcgagaaatctgaccgtggtgaactatagctctattaataggcttatgaaatggattatgtttccggtgggctatggtgtgcccgccgtcactgttgctatttctgcggcctcctggcctcacctatacggtacagcagatcgttgctggctccacctggaccaaggcttcatgtggtcttttctaggacctgtgtgtgctattttttcagcaaatctggttctctttatcctagtgttttggatcttaaaacgaaagctgagctcacttaatagtgaggtttccacaatccagaacacccgcatgctggccttcaaggccacggcacagctgttcatcctgggctgtacttggtgcctcggcctgctgcaagttgggcctgctgcccaggtgatggcctacctcttcactataatcaacagtctgcagggattcttcatttttctggtttattgtctgctgagccagcaagtgcagaaacagtaccagaagtggtttcgcgagattgttaaatcaaagagcgaaagtgaaacgtacactctttcttccaagatgggaccagactctaagccctctgagggcgacgtatttccaggccaggtgaagaggaagtattag

SEQ ID NO: 8936 - DNA, 660 bp, synthetic construct
  misc_feature 1..660: note = source = /note="Description of Artificial Sequence: Synthetic coding sequence"
  source 1..660: mol_type = other DNA
atgaagctgctgctgtgggcctgcatcgtgtgcgtggccttcgccaggaagcgccgattccctttcattggggaggatgataacgatgacggacatccccttcacccctctctgaacattccatacggcatcagaaacctgccgccgcctctctactatcgacctgtgaacacagtccctagctatccagggaacacatacaccgatacaggcctgccatcttacccttggatcctgactagtccaggctttccctacgtgtatcatattagagggttcccactggccactcagttgaacgtgcccccattacccccccgaggcttcccttttgtgccgcctagtagattcttctccgctgcagctgcaccagccgctccacctatagcggcagagcccgccgcggcagcgcccctcacagcgactcctgtggccgctgagcccgcagccggtgcacctgttgctgctgaaccagctgccgaagcccccgttggagccgaacctgccgccgaggccccggtggccgcggaaccggcggcagaggcacctgtgggagtcgagccagctgccgaagaaccgagtcctgccgaacctgcaacagccaagcccgctgccccagagccccatcccagccctagtctggaacaagccaatcagtag

SEQ ID NO: 8937 - DNA, 1743 bp, synthetic construct
  misc_feature 1..1743: note = source = /note="Description of Artificial Sequence: Synthetic coding sequence"
  source 1..1743: mol_type = other DNA
atgcacctgagcgccgtgttcaacgccctgctggtgagcgtgctggctgcagtcctgtggaaacatgtccgactgcgcgaacacgccgccacactggaggaggagctggcactgagcaggcaagcaacagaacccgccccagcacttcgcattgattaccctaaagcgctgcagatcctcatggagggcggaacccatatggtgtgtactggccgcacacacactgacaggatttgccgttttaagtggctttgttattctaatgaggccgaagagtttatttttttccacggcaatactagcgtgatgttaccaaacttgggatcccgtagattccagcccgctctgttggatctgtccacagtcgaggatcataacacccaatacttcaactttgtcgagctgcctgccgcggcccttcgatttatgcccaagcccgtgttcgtgccagacgtggcactcatcgcaaataggtttaatcccgataatcttatgcacgtatttcacgatgacctgttgcccctcttttatacactgcgacagttccccggactcgctcacgaagcccgccttttcttcatggaaggatggggtgagggggcacacttcgacttatataaattgctgtcaccaaagcagccgctgttgagggctcagctgaagacgctcgggcgcttactgtgcttttcccatgcgtttgtcgggctgtctaaaatcacgacttggtaccagtatgggtttgttcaaccccagggaccaaaagctaacattttggtgagcgggaacgaaataagacagttcgcccggtttatgacggagaagctgaacgtaagtcataccggtgtgcctctgggggaggagtatattttagtgttctcgcggacacagaacagattaattctgaacgaggctgaactgctgctcgctctggctcaggagtttcagatgaaaacggtcaccgtgtctctggaggaccatacgttcgctgatgttgttcgtctagtttctaatgctagcatgctggtctccatgcatggcgcacaactggtcactactctcttcttgccacggggggcgactgtggtggagctgtttccatatgccgttaatcctgaccactacaccccttacaagactctcgctatgttgcccgggatggatttgcagtacgttgcctggaggaacatgatgcccgagaacacagtgacacacccagaaagaccatgggatcagggaggtataacccatctggatagggccgaacaagccaggattttacagagtagggaggtgcctcgccacctctgttgtcggaatccagagtggctctttcggatctatcaagataccaaagtcgacatcccttctcttatccagaccatccgccgggttgtgaagggacggcctggccctagaaagcagaagtggaccgtcgggctttatcctggaaaagtccgggaagctcgctgccaggccagcgttcatggggcatctgaagcccgcctgactgtctcgtggcagattccttggaatctgaagtacctgaaagttagagaagtcaaatatgaggtgtggttacaggagcagggagaaaacacctatgtgccctatattctcgcgttgcagaatcacacatttactgagaacatcaaaccattcacaacctacctcgtttgggttaggtgtattttcaataagattctccttggcccatttgccgacgtgctcgtatgtaacacatag

SEQ ID NO: 8938 - DNA, 5130 bp, synthetic construct
  misc_feature 1..5130: note = source = /note="Description of Artificial Sequence: Synthetic coding sequence"
  source 1..5130: mol_type = other DNA
atgggcttcctgcccaagctgctgctgctggccagcttcttccccgcgggacaggcatcttggggcgtctcgagcccacaggacgtgcagggggttaagggaagctgcttgctaataccatgtatcttctccttccccgcagacgttgaggttccggatggcatcacggctatctggtactatgactactcagggcagagacaggtggtttctcatagcgccgacccaaaactggtcgaggcaaggttccgtggcaggacggaatttatgggaaatcctgagcacagagtttgtaacctcctgctgaaggaccttcagcccgaggattcaggttcatataatttccggtttgaaattagcgaagtcaatagatggtctgatgttaagggaaccttagttaccgtgacggaggagcccagggtgcccacaatagcatctcccgttgaattgttagagggaacagaagtcgatttcaattgctccaccccttatgtgtgcctgcaggaacaggtaaggctccagtggcaaggacaggatccagctagatctgtgacttttaacagccagaagttcgaaccgacgggcgttggccacctcgagacccttcacatggcgatgagttggcaggatcacgggcgcattcttaggtgccagctctccgtagccaaccatcgagctcagagcgaaatccacctgcaggtgaaatatgcacccaaaggagtgaagatactcctgtctccttctgggcggaatattctcccaggagagttggttacgctaacctgccaggtgaactcatcctatccagcagttagctctatcaaatggcttaaagacggagtacgtttgcagacaaagaccggggtgttgcacctcccccaagccgcctggagtgacgcaggcgtctacacctgccaggcagagaacggagtgggctccctggtgagcccaccaatttccctgcacatctttatggctgaagtgcaagtaagccctgcaggccctatcctggaaaatcagaccgtgaccctggtctgtaatacccctaatgaagctccttctgatctcaggtattcctggtataaaaaccacgtgctcttggaagatgctcactctcatacactgagactgcaccttgcgacaagagctgacacaggtttttacttctgtgaggtgcagaacgtccacggctcagagcggagcggcccagtgagtgtggtggtaaatcaccctcccttaactccagttctcacagcatttctggagacccaggcagggcttgtggggatcctgcattgttctgtggtgtctgagccccttgccacactggtgctgtcgcatggcggacacatactggcatctacaagcggtgatagtgatcattcccccagattttctggcacctccggacccaatagccttcggctggaaatccgagaccttgaggaaaccgattccggcgagtataagtgttcagcaacgaactcattgggtaatgctacgagcaccctcgactttcatgctaatgctgcccgacttctcatttccccagctgctgaggtggtggaaggccaggctgtcaccctttcgtgccggtccgggctgtcccctactcctgacgcacgatttagctggtacctgaatggtgcgttactgcatgaggggccggggagctctctactgctgccggccgcttccagcaccgatgcaggctcctaccactgccgcgccagagatggacactcagctagcggaccgagcagtcccgccgtgctaactgtgctttatcctcccaggcagcccacctttactacaaggctcgatttagatgcggcgggggccggtgcaggaagaaggggactcctgctgtgtcgcgtggactctgatccgcccgcccggcttcagctgctccataaagatagagtcgtcgccacatcccttccctcaggagggggttgcagcacttgtggagggtgcagcccgagaatgaaggtgactaaggcgcccaacttattgcgggtggagattcacaaccctctgttggaggaggaagggctgtatttgtgcgaagcgagtaacgcccttggaaacgcttcaacgagtgctactttcaatgggcaggccacggtcttggctattgcccctagccatacccttcaagagggtaccgaagctaacctgacctgtaatgtcagccgcgaggccgcgggctctccagccaacttcagttggttccgcaacggtgtgctgtgggcccagggcccgctggagaccgtcacactgttaccagtagctaggactgacgcagccctttacgcatgtagaatcctgacagaggcaggcgcccagctgagcaccccagttctattatctgtgctctatccccccgataggccaaagttgtcagctcttcttgatatggggcagggccatatggccctttttatctgcactgtggacagtcggcccctcgcactgcttgccctgttccatggagagcacctgttggccacttctcttggccctcaagttccctctcatggaagatttcaggccaaggctgaggctaattctttgaagttggaagttcgcgaattgggcctcggcgacagtgggtcttacagatgtgaagcgacgaatgtactgggctccagtaataccagtttattcttccaggtccggggggcttgggtccaagtcagtccgtctccagaattgcaggaagggcaggccgtggtgctaagctgccaggtccatacaggtgtcccagaaggcacttcctatcgctggtaccgagacggtcagccacttcaagagtcgacctctgctacattaaggttcgctgccatcacattgactcaggcaggcgcctatcattgtcaagctcaagcccccggctccgcaactacatccctggccgcccctatttctctccatgtgagctatgctcctcgtcatgtgaccctgactacgttaatggacacaggaccaggccgcctgggactgctcttgtgccgcgtcgatagcgaccccccagcccagctgaggttactgcatggcgaccggctcgtggcctcaacactacaaggggttgggggtccagaagggtcatcaccccggctacacgtggccgtggcaccgaatacattgaggctcgagatacatggggccatgttggaagacgagggcgtgtatatctgcgaggccagcaacacgctcggtcaggcaagcgcgagcgcggactttgacgcacaggccgtaaacgttcaggtctggcccggggctaccgtgagggagggtcagctcgttaatctgacttgcctcgtgtggacaacccatcctgcccaactgacttatacatggtaccaggacggtcaacagagactggacgcccactctatccccttacccaacgtgaccgtgcgggacgcaacttcttatcgctgtggcgtgggccctcccggtagggcgcccagattgagccgccccattaccctcgacgtgttatacgcccctaggaacctgagactgacgtatttattagagtcccacggtggccagttagccttggtgttgtgcactgttgatagtaggccacctgcccaactggccctctctcacgccggacgcctactggcatcgagtacagcggctagtgtgcctaataccttaaggctggagttgcgcggaccacagcctagagatgaggggttttactcatgttcggcaagaagtccactcggccaggcgaacacctctctcgaactgaggcttgagggtgttagggttatcctcgcaccggaagcagctgttcctgagggcgcccctatcacggttacgtgcgctgaccccgctgcacacgccccaacactttacacctggtatcataatggaagatggctgcaagaagggcccgccgcttccttgagtttcctcgtggctaccagagctcacgccggagcttacagctgtcaggcacaggacgctcagggcacgcgaagttcgagaccagcggctttgcaagtgctgtacgccccccaggacgcagtgctctcaagcttccgcgactccagggctaggtctatggccgtgatacagtgcaccgtcgactcagagccaccagccgagttagctctgtcccatgacgggaaagtgctggcaactagctcaggcgttcacagcttggcctctggtaccggccacgtgcaagtggcacgtaacgcactgaggttgcaagtgcaggacgtgcccgcaggcgatgatacctacgtctgtactgcacagaacctgctgggcagtatttccacaattggaaggcttcaagtggaaggagccagggtagtcgctgagcccggactggacgtgccagaaggcgcggctcttaatctgagctgcaggctcctgggtggacccggccctgtcgggaattccacctttgcctggttctggaacgaccgacgacttcacgctgagcctgtccctactctcgccttcacgcacgtagccagagcgcaagccggaatgtaccactgtctggctgagctcccgaccggagcggccgccagtgcccccgtaatgcttcgtgtgctgtacccccccaagactcccacgatgatggtttttgtcgagcccgaggggggcctgcgggggatcctggactgcagggtggacagtgagccattagcttccttaacactccaccttggctcaagactcgttgcaagctcgcagcctcagggcgcccccgcagagccacatatccacgtgctggcctctcctaacgctctgagggtagatattgaagcgctcaggccctccgatcagggagagtatatctgctccgcttccaacgtgctgggtagtgcttctaccagcacgtactttggggtcagagccctacaccggctgcaccagttccagcaactgctctgggtactgggtctgctggtgggcctcctgttgctactgctggggctcggagcttgttacacatggagaagacggcgggtttgtaaacaatcaatgggagaaaacagcgtggagatggccttccagaaagagaccacacaactgatcgacccagacgccgccacctgcgaaacctccacctgcgcccccccactaggctag

SEQ ID NO: 8939 - DNA, 693 bp, synthetic construct
  misc_feature 1..693: note = source = /note="Description of Artificial Sequence: Synthetic coding sequence"
  source 1..693: mol_type = other DNA
atgtgcgtgacctaccacaacggcaccggctactgcaagtgccccgaaggattcctaggggagtattgccaacaccgcgacccctgcgagaaaaaccggtgccagaacggcggaacttgcgtggcccaggcaatgctgggaaaggccacctgtaggtgcgcgagtgggtttactggtgaggactgtcagtatagcaccagtcacccttgctttgtgtcccggccatgccttaacggaggcacctgccacatgttgagtcgtgacacctacgaatgcacttgtcaggtaggctttaccggcaaggagtgtcaatggaccgatgcttgtctatctcacccgtgtgcaaatggttcaacctgtactaccgttgctaatcagttctcttgcaagtgtctgacagggttcaccggccagaagtgcgaaactgatgtcaacgaatgtgacattccggggcattgtcagcatggaggcacctgcctgaacctgccagggtcataccagtgccagtgtctacagggctttaccggtcaatactgcgacagcctgtacgtcccttgtgcacctagcccctgtgttaacggaggaacttgtagacagaccggcgacttcactttcgagtgtaattgcctcccagccacttggccaatattcccaaagttgttgtcgttacaggagaaggagtcctattgttag

SEQ ID NO: 8940 - DNA, 660 bp, synthetic construct
  misc_feature 1..660: note = source = /note="Description of Artificial Sequence: Synthetic coding sequence"
  source 1..660: mol_type = other DNA
atgttcgtgagctacctgatcctgaccctgctgcacgtgcagaccgccgttttggctcgcccaggcggtgagtccataggctgcgatgattaccttggttccgacaaagtagttgacaagtgcggtgtttgcgggggagacaataccggatgtcaagtagttagtggcgtgttcaagcacgcactcacatccttgggctatcatagggtcgtcgaaatccctgaaggggcaaccaaaattaatatcacagaaatgtacaaatcaaacaagaagaaatcacatcttaaacccgctacacgtggctctcagttctcttccgttaaagtatgctcagtgccagctgcctgtaaacttcttggaacccctggccgggcacgtcagcctgttcccgcaccaagggagctggagcacgacaagaattccccacattgcgcatatttatccctgtacctcacctccctagctcagtcctcatggagggtcttctctttgttttcatatgtgctgatttacttgtttagcaaatacctggctttcaataccttgtttgcacttaagcggatggctctccagcgggaccgtaaagaaaaaactcgggcatggtgtatctttatcaagctgtgcggacgggagattcagattctgcccgggcccgtgtag

SEQ ID NO: 8941 - DNA, 363 bp, synthetic construct
  misc_feature 1..363: note = source = /note="Description of Artificial Sequence: Synthetic coding sequence"
  source 1..363: mol_type = other DNA
atggacaacgtgcagcccaagatcaagcaccggcccttctgcttcagcgtaaagggtcatgttaagatgctcagattggccttgacagtaacaagcatgactttttttattatagcccaggctcccgaaccatacattgtgattactggattcgaggtgaccgtgatccttttttttattctgctgtacgttttgcgtcttgatcggctgatgaaatggctgttttggcccctgctagttttcgccctcgtcacagctgtatgctgcctcgccgatggggcactgatttaccggaaactgctgttcaatcctagtgggccctatcagaagaagcccgtgcacgagaaaaaggaggtactttag

SEQ ID NO: 8942 - DNA, 864 bp, synthetic construct
  misc_feature 1..864: note = source = /note="Description of Artificial Sequence: Synthetic coding sequence"
  source 1..864: mol_type = other DNA
atggccccctggagccaccccagcgcccagctgcagcccgtgggcggagacgccgtttctcctgctctgatggtcctgctgtgcttgggaaatttgtcgaaagccactctatgggccgagcctggatctgtgatttctagaggtaattcagttacaattaggtgtcaaggaacactggaggctcaggaataccgccttgttaaggaaggctctcccgagccatgggacacccagaatcctctcgaacctaagaacaaggcacggttctcaattccttccatgaccgagcaccacgcgggcaggtatcgctgctactactactccccagccggttggtctgagccatcagatcctcttgagttggttgtgaccgggttctataacaagcccacattgagcgctttgccatctccagtggtgacgtctggggaaaacgtgacgctccaatgcggtagcagactgcgctttgataggtttatcctaacagaagaaggcgaccacaaattgagttggaccctggacagtcagctgactccgtcaggacaatttcaggccctgttccctgtggggcccgtgaccccgagccaccgctggatgctgaggtgctatggctcacggcgccatatactgcaggtatggtcggaaccctcagaccttctggaaatacccgtctcaggtgccgctgacaatctgagcccaagtcagaataaatccgattccgggacggcaagccacctgcaggactatgctgtggaaaatcttattagaatgggcatggctggactgattctcgtggtgcttggcatcctcatctttcaggattggcattcacagcgctccccccaggccgccgccggccggtag

SEQ ID NO: 8943 - DNA, 438 bp, synthetic construct
  misc_feature 1..438: note = source = /note="Description of Artificial Sequence: Synthetic coding sequence"
  source 1..438: mol_type = other DNA
atgggcatcggctgctggcggaaccccctgctgctgctgatcgccctggtattgagcgctaaactgggccactttcagcgttgggagggatttcaacaaaagctgatgagtaagaagaacatgaactcaacacttaacttttttatacagtcctataataacgcctcaaacgatacctacctttacagggtacagaggctgattcgatctcagatgcaattgacgactggggttgagtatatagtgacagtcaaaatcgggtggactaaatgtaagcgcaatgacactagcaactcctcatgcccacttcagagtaagaagctgaggaaaagtctcatctgtgaaagccttatctacacaatgccctggatcaactatttccagctgtggaataactcttgcctcgaggctgagcacgtcggccgaaacctcagatag

SEQ ID NO: 8944 - DNA, 1776 bp, synthetic construct
  misc_feature 1..1776: note = source = /note="Description of Artificial Sequence: Synthetic coding sequence"
  source 1..1776: mol_type = other DNA
atgcagcaggacggcctgggcgtgggcacccggaacggcagcggcaagggccgatctgttcacccttcatggccgtggtgtgcacccaggccgctcagatacttcggcagagacgcaagggcccggcgggcccagaccgctgcgatggccttggctatccaggttaccgtgtcaaacccctatcacgttgtcattctcttccaacctgtgaccctcccatgtacctatcagatgacatctacgcccacacagccaatcgttatatggaaatacaagtctttctgcagagacagaatagcagatgctttctccccagcctccgttgacaaccagctgaacgctcagctggcagctggtaaccccgggtacaacccttacgtggaatgccaggactctgtgcgtactgtgcgggtggtggccaccaagcaggggaacgcagtcaccttaggtgactactaccagggcaggaggattacaatcactggtaacgcagatctgacatttgaccagacagcctggggcgacagcggcgtgtattattgcagcgtggtcagtgcccaggacttacagggtaacaatgaagcttacgccgaactcattgtcctagggcgtaccagtggggtggcggagttactgcccggcttccaggccggccctattgaagattggttgtttgttgttgtggtttgtctcgctgcatttttgatctttctcctgctgggaatttgttggtgtcagtgttgtccacacacctgttgctgttacgtgcggtgcccctgctgcccagacaagtgttgctgtcctgaggcactgtatgccgcaggaaaagccgccacttccggtgttccctcgatatacgccccatccacctatgcgcacttgtcgccagctaagaccccgcctccaccagcaatgatccctatgggacctgcctacaacggttacccaggcggataccccggagacgtagatcgcagttcctccgtcaggagcggatacaggatccaagcttcccaacaagatgattccatgcgggtactctattacatggagaaggaactggcgaacttcgatccgtctcgccccggacctccgagcggacgcgtcgagcgtgccatgtcagaagtgaccagccttcatgaagatgattggaggtctcgcccatctcgcggtccagccctgactccgattagagacgaggagtggggtggacattccccccgctcaccgcgtggttgggatcaggagcccgccagggaacaggccggcggtgggtggagggccagaagaccccgcgccaggagtgtagacgcactcgacgacctgactcctcctagcactgctgagtcaggttcacgctcccctacgtctaatgggggccgttctcgcgcctatatgcccccccgctcccgcagcagagacgatttgtacgaccaagatgactctcgtgattttccccgatctcgcgatccccactatgacgattttcgaagcagggagagacctcctgccgacccaaggtctcatcatcaccggacgagggatcctcgcgataatggttctcggagcggggatcttccttatgacggccgcttattagaagaagccgtgagaaagaagggcagtgaagagaggagaaggccacacaaagaggaggaggaagaggcttattatcccccagccccacccccgtactcagagactgattctcaggcctcaagagaaagacggctgaaaaagaatttggcattgtccagagagtcactcgtagtctag

SEQ ID NO: 8945 - DNA, 678 bp, synthetic construct
  misc_feature 1..678: note = source = /note="Description of Artificial Sequence: Synthetic coding sequence"
  source 1..678: mol_type = other DNA
atgaaccggtgcccccggcggtgccggagccccctgggccaggccgcacggtccctctaccaactggttaccgggtctttgagtccggatagcgtggacgatgagttcgaacttagtactgtctgtcacaggcccgaaggcctcgaacaactacaagaacagacaaaattcactcgaaaggaactgcaagtgttgtaccggggattcaaaaacgagtgcccctcaggcatcgttaatgaggaaaactttaaacagatctactcacagttctttccacagggagattcctcgacatacgccacgttccttttcaatgcctttgacaccaaccatgacgggtcagtgagttttgaagacttcgtcgctggactcagcgtgattctaaggggcaccgtggatgaccggttgaattgggcttttaatctctatgatctcaataaagatggttgcattacgaaagaggagatgctggatatcatgaagtcaatatacgatatgatgggcaaatatacctacccggccctgcgggaagaagctcctcgcgagcatgtcgaaagcttttttcagaaaatggaccgcaacaaggatggagtggtgaccatagaggaatttattgagtcttgccaaaaagatgaaaacatcatgcggagtatgcagttgttcgacaacgtgatctag

SEQ ID NO: 8946 - DNA, 705 bp, synthetic construct
  misc_feature 1..705: note = source = /note="Description of Artificial Sequence: Synthetic coding sequence"
  source 1..705: mol_type = other DNA
atgcccgccagcagccccttcctgctggcccccaagggcccccccggcaatatgggtggacccgtcagggagccagcacttagcgtcgctctgtggcttagctggggcgccgctctcggggccgtggcttgtgccatggccctgctgacccagcagactgagttgcagagcctgagacgggaagtatccagactgcaaggcacggggggccctagtcagaatggggagggatatccgtggcaaagcctgccggagcagagttcagacgccctagaggcctgggagaatggagaaagatcacggaagcggcgggccgtgcttacccagaaacagaagaacgactctgacgtcacagaggttatgtggcagcctgctcttaggcgggggcggggcctgcaggcccagggttatggggtgagaattcaggatgcaggggtttaccttctatattcgcaggttctcttccaagacgtgacctttacaatgggccaggtggtttctcgggagggacagggtcgacaggaaaccctgtttcgctgcatacgctccatgccttcgcatcccgaccgcgcctataattcctgctattctgctggggtttttcacctgcaccagggcgatattctcagcgtaatcattccccgcgctagagctaaactgaacctcagcccacatggtaccttcctaggctttgtaaagctgtag

SEQ ID NO: 8947 - DNA, 2400 bp, synthetic construct
  misc_feature 1..2400: note = source = /note="Description of Artificial Sequence: Synthetic coding sequence"
  source 1..2400: mol_type = other DNA
atgaagcccatgctgaaggacttcagcaacctgctgctggtggtgttgtgtgattacgtcctcggggaggcggagtacctgctcctaagagagcccggccacgtcgccctgtcgaacgacacagtatacgtcgacttccagtacttcgatggggccaatggaacccttcgcaacgtctcggtgctgttactcgaagcgaacacaaaccagaccgtcactactaagtacctgctgacgaatcagtctcagggcaccctcaaatttgaatgcttttactttaaagaggccggcgactattggttcacaatgactcccgaagccaccgacaattcaactccattcccatggtgggaaaagtccgcctttctgaaagttgagtggcccgtctttcacgtcgatttaaacaggtctgccaaggcagccgaagggaccttccaggtcggcctttttacttcacaacctctttgtcccttcccggtggacaaacctaatatagttgtggatgtcatctttaccaatagtttgcccgaggctagacgcaattccaggcagcccctggaaattcgtacgagcaaacgaacagaactggctcaaggccagtgggtagaattcggttgcgccccactgggtccagaggcttatgtcacagtcgtgctcaagctcttggggagggactctgtaatcactagcacagggccaatcgatctagcccagaagttcggttacaagctggtaatggtgcccgagttaacttgcgagtctggggtagaggtgaccgtgctaccacctccctgtacattcgtgcagggagtagtaacagtctttaaagaagccccccggtacccaggaaagaggaccattcatcttgcagagaattcattacccctgggtgagcggcgaacgatttttaactgtaccctgtttgacatgggcaaaaacaaatattgcttcgactttggcattagttcccgaagtcacttttcagccaaagaggagtgtatgcttattcagagaaatacggcttttcaacccagctcgccttctccactccaacctcagggcccggtcaaatctaacaacatagtcacggtgactggcattagtctctgcttattcatcataatagcaaccgtgctcattacactgtggcgacgcttcggacgacccgccaagtgtagtacccccgcccgccacaacagcattcactcccctagctttagaaagaactctgacgaagagaatatttgtgagttatcagaacagcgaggctcttttagcgacgggggggatggaccaaccggcagccctggggacaccgggatacctcttacctatcggcgttcagggcctgtgccacctgaagacgatgcaagcgggagcgaaagttttcaatcaaacgcccaaaaaatcatcccaccgctattcagttaccggctcgctcaacagcagctgaaggagatgaagaagaagggcttgaccgagacaacgaaagtgtatcacgtctcccagtctcccctcaccgacaccgccattgacgccgccccctctgcccctctggatctggagagtcccgaggaagcagcagcaaataagttccggataaagtcacctttccccgagcagcccgcggtcagcgcaggggagcggccaccttccaggctggacctaaacgtaacacaggcctcgtgcgctatatcccccagccagactttaattaggaaaagtcaggcccgtcatgtgggatctcgcgggggcccaagcgagagatcacacgccagaaatgcgcattttaggcgcactgccagcttccacgaggcccgccaggccaggccatttagagagcggtccatgtccacattgactccccggcaggcgcccgcttactcatcacgtactagaacctgcgaacaagccgaggatagatttcgtccccagtcacgcggcgctcatctgttcccagaaaaattagagcattttcaggaggcatccggaacccgggggccgctgaaccccctgccaaagtcctatacgctcgggcaacctttgcgcaagccagacctgggcgatcaccaggctgggctggttgcaggtatcgaaaggacggaaccgcatcgagcccggagagggccgtccccctctcataagagcgtgagtcggaagcagtcttctccaatctcccctaaagacaactaccagagggtgagttctctgtccccctcacaatgcagaaaggacaaatgccaatcctttccaacacatcccgaatttgccttctatgacaatacgagtttcggtctaaccgaagccgaacagcgaatgctggacttgccgggttacttcggctctaatgaagaggatgagacaacgtctacgctctccgtcgaaaagctggtgatctag

SEQ ID NO: 8948 - DNA, 927 bp, synthetic construct
  misc_feature 1..927: note = source = /note="Description of Artificial Sequence: Synthetic coding sequence"
  source 1..927: mol_type = other DNA
atgcggctgctgcccgagtggttcctgctgctgttcggcccctggttactgaggaaagcagtgagtgcccagattccagagtccgggaggcctcagtaccttgggctgcgccctgcagcagctggggcgggggcccctggccagcaactgccagaacctaggtcctccgacgggttaggcgtaggtcgtgcctggagctgggcctggcccaccaaccataccggtgcgctggctagagcaggagcggcaggggccctgcccgcacaaagaacaaaacgcaagccaagcataaaggccgctcgcgccaaaaaaatcttcggatggggcgacttctatttcagagtccatactctaaaattttcattactggtaaccggaaaaatcgttgatcatgttaacggaacattctccgtgtacttcagacataatagtagctcccttgggaacctgtccgtgtctatagtgcctccttccaaacgagtggagttcggcggagtttggttgccaggtcctgtcccacacccccttcaaagtacgctagccctcgagggagttctccccgggttaggacccccattgggtatggccgccgccgccgccggacctggactcgggggaagcttggggggcgccctagctggaccactgggcggagccctgggggttcctggcgcaaaggagtcgagagccttcaattgccacgtcgaatacgagaagacgaacagggcacgaaagcacagaccctgcctttacgacccttcgcaagtgtgtttcactgaacatacccagagtcaggccgcctggctttgcgcaaagcctttcaaagtaatctgtatctttgtatcattcctgagcttcgactacaagcttgtccagaaggtttgccctgattataatttccagagcgaacacccttactttggatag

SEQ ID NO: 8949 - DNA, 795 bp, synthetic construct
  misc_feature 1..795: note = source = /note="Description of Artificial Sequence: Synthetic coding sequence"
  source 1..795: mol_type = other DNA
atgaagctgggctgcgtgctgatggcctgggccctgtacctgagcctgggcgtcctttgggtggcgcagatgctcttggccgctagctttgaaacactgcagtgcgagggcccagtgtgcactgaggaaagttcctgccataccgaggatgacttgacagatgccagggaagctgggttccaggtcaaggcatacactttttccgaacccttccacctcatagtgagttacgactggctgatcctgcagggacccgcaaagccagtgtttgagggggacctcttggtgctgcgctgccaggcatggcaagattggccactaacccaggtaactttctaccgggatggcagcgctttagggccgcccggccctaatcgggagttttccatcaccgtggtgcaaaaggccgattccggccattaccattgttctgggatctttcagtctcctggtccaggaattcctgagacagcttctgttgtggccataacagttcagggtgcctccagctccgcggcccccccgaccttaaaccccgctccacaaaaatctgccgcaccaggaaccgctccagaagaggctccagggcccctccccccaccccccaccccgtctagcgaagatccgggtttctccagccctttgggaatgccagatccgcacttgtatcaccagatggggctgctgctaaagcatatgcaggatgtcagagtgttgttgggacatctgctgatggaattacgggagctctcaggccatagaaagccagggacaactaaggccacagccgaatag

SEQ ID NO: 8950 - DNA, 1362 bp, synthetic construct
  misc_feature 1..1362: note = source = /note="Description of Artificial Sequence: Synthetic coding sequence"
  source 1..1362: mol_type = other DNA
atgctgcggatcctgtgcctggccctgtgcagcctgctgaccggcaccagagctgacccaggggcactcttaagactaggtatggatattatgaatcaggttcagtcagctatggacgaatctcacattctcgaaaagatggcagccgaggccggcaagaaacagccgggcatgaaaccaattaagggcattacgaatctcaaagttaaggacgtgcagctacctgtgattacgcttaactttgtgcctggtgtaggcatttttcagtgcgtgagcacgggcatgacagtcaccgggaaatctttcatgggcggaaatatggaaattattgttgccttgaatataactgcaactaaccggctgctaagagacgaggagactggactgcccgtgttcaagagcgaagggtgtgaagtgattttggtcaacgtaaaaaccaacctgcccagcaacatgttaccaaagatggtcaataagtttctggacagcacgctccataaggtcctgccaggattgatgtgtcctgcgatagacgccgtactcgtctatgtcaacagaaaatggaccaatctcagcgaccccatgccagtggggcagatgggcaccgttaagtatgtgttgatgtctgctcccgcaactaccgccagttacattcagcttgacttctctccagtcgtgcagcagcagaaagggaaaaccataaaactggccgacgcaggtgaggctttgacctttcccgagggttatgccaaaggctcaagccagctcttactgccagcgacattcctgagcgccgaattggccctgctacagaagtccttccacgtcaatattcaagataccatgataggtgaactaccaccgcaaacaactaaaacgttggcaaggttcatcccagaggtggccgtggcttacccaaaatctaagccccttaccactcagatcaagataaaaaagcctcctaaagtgactatgaagacaggtaagtccttgctgcacctacactcaacgcttgaaatgtttgctgccaggtggcgcagcaaagctcctatgtctttattcctgctagaagtgcatttcaatctgaaagtacaatacagcgtccatgagaaccagcttcagatggccacttctcttgaccggcttctgtcactgtcccgcaaatcaagcagcataggcaactttaacgagcgcgagcttaccgggtttattacatcttatcttgaagaggcctatattccagtggtgaatgacgtcctccaggtggggttacctctgccagatttcctagccatgaactacaatctggccgagctggacatagtcgaaaacgccctcatgctggatctgaaattgggctag

SEQ ID NO: 8951 - DNA, 1323 bp, synthetic construct
  misc_feature 1..1323: note = source = /note="Description of Artificial Sequence: Synthetic coding sequence"
  source 1..1323: mol_type = other DNA
atgagcgcccggggccggtgggagggcggcggccggcgggcctgcaggggctctcttggactcgctcgagcccagggagccgagagagtaacctcaagcgagcagagacctgcaatggcctccttaggactcctcctactcctgctgctcacagctcttccccctttgtggagtagttctttgccaggcttagacacagcagagagcaaggccactatagcagatctgatcctatcagcactggagcgggcgactgtttttctggaacaaaggctccctgaaattaatctggatggaatggtgggcgtcagagtgttggaggagcagctcaagtctgtgcgggaaaaatgggcgcaagagcccttgcttcagcccctctccttgagggtcgggatgctaggggagaaactggaggcggcaattcagagatccctccattatctcaaacttagcgaccccaaataccttagggaatttcagttaacactacagccgggcttctggaagctcccgcatgcatggatacatactgatgcctctctagtttacccaaccttcggcccacaggatagcttcagtgaagaaagaagcgacgtgtgcctggttcaacttctcggtacgggaactgactctagcgaaccatgcggcctgagtgacttatgccgttctctgatgaccaaacctggttgcagtggatactgtctgagccatcagctgttatttttcctatgggccaggatgagaggatgcacgcagggcccactgcagcagtcccaggattatataaacctgttttgcgcgaacatgatggatctgaaccggcgagcagaagccattgggtacgcctaccccacccgtgacatctttatggagaatattatgttttgtggcatgggtggcttttctgatttctacaaactgagatggctagaggccattctatcttggcagaaacagcaggagggttgtttcggagagcccgacgcagaggacgaggagttatccaaggcgattcaataccagcagcacttttctcgccgcgtgaaacgtcgagagaaacagttcccagattctcgctcagtagcacaggctggcgttcagtggcgaaatctaggaagtttgcagccgctccctcccggtttcaagcagttttcttgcctgattctgcccagcagctgggactacagaagcgttccaccatatttggcaaacttctacatttttttagtagagactggtttccaccatgtcgcgcatgcgggtctcgagcttcttatcagccgagacccaccaacgagcggcagccagagtgtgggcctgtag

SEQ ID NO: 8952 - DNA, 708 bp, synthetic construct
  misc_feature 1..708: note = source = /note="Description of Artificial Sequence: Synthetic coding sequence"
  source 1..708: mol_type = other DNA
atgaagtacgtgttctacctgggcgtgctggccggcaccttcttcttcgctgacagcagtgtgcagaaggaagatcccgccccttatttggtttacttaaaatcccacttcaacccctgcgtaggtgtgctgattaaaccaagctgggtactggctccggcccattgttacctgcctaatctgaaggttatgctcggaaattttaaaagtcgcgttcgtgacggaaccgagcagaccattaatcctattcagattgtgaggtattggaattatagtcatagcgcacctcaagatgatctcatgttgatcaaactcgccaagcccgctatgctgaacccaaaggtacagcctctgacactggccaccaccaatgtacgtcccggtactgtgtgcctgctgtccgggctggattggtcccaggaaaatagcggtagacaccctgacctgaggcagaatttggaagctccagtcatgtctgatagggaatgccagaaaactgaacaagggaaatcccataggaactccctgtgtgttaagttcgtgaaagtcttctcacggatctttggcgaggtcgctgtggctaccgttatctgtaaggacaagctccaaggcatagaggtgggccactttatggggggggatgttggtatttatacgaacgtgtacaaatacgtgagctggatcgagaataccgctaaagataaatag

SEQ ID NO: 8953 - DNA, 426 bp, synthetic construct
  misc_feature 1..426: note = source = /note="Description of Artificial Sequence: Synthetic coding sequence"
  source 1..426: mol_type = other DNA
atgctgaagaagatcagcgtgggcgtggccggcgacctgaacaccgtgacgatgaagctcggttgcgtgctaatggcctgggcgctatacctctccctgggtgtactctgggtggcccagatgttgctcggggcttcatcctccgccgcaccgccaacactgaatcctgcacctcagaaaagtgcggctcctggcacggcccctgaggaagcgcccggcccattacctccaccccccactccatctagcgaggatcctggcttttcaagccctctggggatgccagaccctcacctgtatcaccaaatggggctcctgctgaagcacatgcaggacgtcagagtgctattaggacatttgctgatggagctgagggaactctcgggccaccggaagccgggaaccacaaaagccacagcagagtag

SEQ ID NO: 8954 - DNA, 2886 bp, synthetic construct
  misc_feature 1..2886: note = source = /note="Description of Artificial Sequence: Synthetic coding sequence"
  source 1..2886: mol_type = other DNA
atgctggccccccggggcgccgccgtgctgctgctgcacctggtgctccagagatggctggctgctggagcacaagccaccccccaagtcttcgatctgttaccgtcctcaagccagagactgaatcccggcgccctcctgcctgtcttaactgaccctgcccttaacgatctgtacgtaatttctacctttaaactgcagaccaagtcaagcgccaccatatttggcttatacagctcgacggacaattccaagtactttgagttcactgtcatggggcgtttaaacaaagccatactgaggtacttgaagaacgatgggaaggttcatctagttgtgtttaataacttacaactggcagacggtaggcgacataggattctgcttcggctctctaacctccagaggggcgcgggctctttggagctttaccttgattgtatccaagtggatagcgtgcacaatctgccaagggcttttgctggaccctcccagaagcccgagacaattgagcttagaacctttcagaggaagcctcaggacttccttgaggaacttaagctggtagtacgtgggagtcttttccaagttgcttcgctacaggattgttttctgcaacaatcagaacctctggctgccacaggaacaggcgactttaatcgtcagttcttgggccagatgactcagctgaaccagctcctcggggaagtgaaggacctcctgcgacaacaggttaaggaaacgtctttcctgcgcaacactatcgcggagtgccaggcctgcggacccctgaagtttcagagcccaacgccgtctactgtcgttccaccagcacctcccgcacccccaacacgcccgccaaggcgctgcgattcaaacccttgcttccgcggcgtccaatgtacagattctagggacggatttcagtgcggcccttgccctgaaggctacaccggaaatggcattacctgtatcgatgtggacgaatgcaaataccatccttgctaccctggagtacattgtattaacctgtctccaggctttcgctgtgatgcctgtccagtgggtttcacaggccctatggtgcaaggggtcggtatatcctttgccaagtcaaacaagcaggtttgcaccgacatcgacgaatgccggaatggtgcatgtgtgcctaacagcatctgcgtgaatactctcggctcctatcggtgcgggccttgcaagcccggttacacaggtgaccagatccgggggtgcaaggcagaaaggaattgcagaaatcctgagctcaacccatgcagtgtaaacgcgcagtgcatcgaggaacgccagggagatgtgacgtgtgtttgcggtgtggggtgggccggcgatggatatatatgcggcaaggacgtggatattgactcatacccggacgaggagcttccatgttccgcccggaactgcaagaaagataactgcaagtacgttcccaactcagggcaggaggacgctgatagggacgggattggggatgcttgtgatgaagatgcagatggcgacggtattcttaatgaacaagataactgcgtcttgatccacaacgtggatcagcgaaacagcgataaggatatcttcggcgatgcgtgtgataactgcctatctgtgttgaataacgatcagaaagatacagacggagatggcagaggggacgcttgtgatgatgacatggacggtgacggtattaagaacatcttggacaattgtcccaagtttccgaatcgggatcagcgagataaagatggcgacggagtcggtgatgcatgtgactcctgcccggacgtttctaaccctaatcaatcagacgtggataacgacctggtgggcgactcatgtgacacgaatcaggatagcgatggtgacgggcatcaggactctacggataactgccctacagttattaactcagcacagctggataccgacaaggatggaattggggacgagtgtgacgatgatgacgataatgacgggatcccggatctggtcccgccagggccagataactgcagactcgtgccaaatcccgcgcaggaagatagcaattcagacggggtgggagacatatgtgagtccgacttcgaccaagatcaggtgatcgatcggatcgatgtgtgcccggagaacgctgaggtgacattgaccgatttccgtgcgtaccaaacggttgtgctggatcctgaaggagacgcccaaatcgaccctaactgggtggtgctgaaccagggcatggaaatcgtgcagacaatgaacagcgaccctggtctggcggtgggatacacagcattcaatggtgtcgatttcgaagggacctttcacgtgaacacccagactgacgatgactacgccggtttcatctttggataccaggacagtagcagtttttatgtggttatgtggaaacagactgagcaaacttactggcaagcaacaccattcagagctgtcgccgagcccggcatccaacttaaagccgtcaagagcaaaaccggaccaggggagcacctgcgaaatagcctgtggcatactggagatacatccgaccaagtgcggctactgtggaaggactccaggaatgtggggtggaaagataaggtgagttaccgctggttcttgcaacatcgccctcaggtgggctatatccgcgtccggttctacgaagggtcagaactcgtggccgattctggagttaccatagacacaacaatgcgcggcggacgccttggagtgttttgtttctcacaggaaaatataatctggtctaatctgaaataccggtgcaatgatacgatacctgaggatttccaagagttccagacccaaaactttgaccgattcgacaattag

SEQ ID NO: 8955 - DNA, 300 bp, synthetic construct
  misc_feature 1..300: note = source = /note="Description of Artificial Sequence: Synthetic coding sequence"
  source 1..300: mol_type = other DNA
atggacaacgtgcagcccaagatcaagcaccggcccttctgcttcagcgtcaaaggccacgtcaaaatgttgcggctggatattattaactctttggtaaccactgttttcatgctgatcgtgtcagtcttggcgctcatacccgaaacaacgaccctgacggtgggtggaggagttttcgcgctggtgacagcggtgtgctgtctggccgacggggccctgatctataggaagctgctgttcaaccctagcggcccatatcagaaaaaacccgtgcatgagaagaaagaagtactctag

SEQ ID NO: 8956 - DNA, 408 bp, synthetic construct
  misc_feature 1..408: note = source = /note="Description of Artificial Sequence: Synthetic coding sequence"
  source 1..408: mol_type = other DNA
atgagcccccacctgaccgccctgctgggcctggtgctgtgcctggcgcagaccatacacacccaggaaggagcactcccaagacctagcatttccgccgaacctggaaccgtcatctcccctggttcacacgtgacttttatgtgtcgcggacccgtcggtgtccagactttccgactcgagagggaagatcgggccaaatataaggactcttacaatgtgtttcgccttgggccttctgagagtgaggccagattccacatcgatagcgtgtctgaagggaatgcagggctgtaccgttgtctgtactataaacctcccggatggtcagaacattcggatttcctggagctgctggtgaagggaacggtgcccggcaccgaagcaagcggattcgatgcgccatag

SEQ ID NO: 8957 - DNA, 231 bp, synthetic construct
  misc_feature 1..231: note = source = /note="Description of Artificial Sequence: Synthetic coding sequence"
  source 1..231: mol_type = other DNA
atgctgccctgcctggccctgctgctgctgatggagctgagcgtgtgcaccgtggcgggggacggtggggaggaacaaacactgtctacagaagcagagacttgggaaggcgctggccccagcatacagctacagctccaggaagtgaaaacgggcaaggcctctcagttctttgggcttatgggcaaacgggtgggcggtagagaagacgaagcccaggggagcgagtag

SEQ ID NO: 8958 - DNA, 684 bp, synthetic construct
  misc_feature 1..684: note = source = /note="Description of Artificial Sequence: Synthetic coding sequence"
  source 1..684: mol_type = other DNA
atgcggggccagggccggaaggagagcctgagcgacagccgggacttggatggctcgtacgaccaattgactgatagcgtggacgatgagttcgagctgagcaccgtctgtcacagaccggaaggcctcgaacagctccaagaacagacaaagtttaccagaaaagagttgcaggtactgtatcgggggtttaaaaatcctggcgcgctgtctttccaggaatgcccatccggaatcgtcaacgaagaaaacttcaagcagatctattcgcagttctttccacagggagatagttccacttacgcaacattcctttttaatgcatttgataccaatcacgacggttcagtctcatttgaagacttcgtcgccggtctgtctgttatcctgcgcggcaccgtggacgatcgtctgaactgggcatttaacttgtatgaccttaacaaggacgggtgcattacaaaagaagaaatgctcgatatcatgaagtctatctacgacatgatgggaaaatacacgtaccccgctctccgagaagaggctccacgagagcacgtggaatcgtttttccagaagatggaccggaataaggacggcgtcgttacaatagaggaattcatcgaaagttgtcagaaggatgaaaacatcatgaggtcgatgcagttgttcgacaatgtgatatag

SEQ ID NO: 8959 - DNA, 876 bp, synthetic construct
  misc_feature 1..876: note = source = /note="Description of Artificial Sequence: Synthetic coding sequence"
  source 1..876: mol_type = other DNA
atgatgagcgccaccggccccggccggaagatgggcagccggggccagggcctgctgttggcctactgtttactcctcgcttttgcatctggcctagtcttaagccgcgtgccccacgtccagggcgagcagcaggagtgggagggcacggaagagttgccctctccaccagatcacgcggaacgagccgaagaacaacatgaaaaatatagacctagccaagatcaggggctcccagcatcacgttgcctgcggtgttgtgacccaggcacatccatgtaccctgctaccgcagtgccccagattaatattacgatcctgaagggagaaaaaggcgacaggggtgaccggggactgcaggggaagtacgggaagaccggatccgctggtgcacggggccatacggggcccaagggtcagaaggggtcaatgggcgcacctggagagcgatgcaagtcacattatgctgccttcagcgtcggcaggaaaaaaccaatgcacagtaaccactactatcagactgtcattttcgatacagaattcgtcaatctgtacgaccacttcaacatgttcacaggtaaattttattgctacgtacccggcctgtattttttctcactgaacgtccacacctggaaccaaaaagagacctacctacacatcatgaagaatgaagaggaagttgttatcttatttgcacaggtgggcgatcgttccataatgcaaagccagtcactgatgctggagctgcgggagcaggaccaggtgtgggtccggctatacaaaggggagcgagaaaacgctatctttagcgaggaactggacacgtatattaccttcagtggatacctagtcaaacacgctacagagccatag

SEQ ID NO: 8960 - DNA, 213 bp, synthetic construct
  misc_feature 1..213: note = source = /note="Description of Artificial Sequence: Synthetic coding sequence"
  source 1..213: mol_type = other DNA
atggagcggggcgccggcgccaagctgctgcccctgctgctgctgctgagggcaacaggtttcacatgtgcccagactgatgggcgcaatgggtacaccgcggttattgaagtgacttctggaggaccatggggggattgggcttggcctgagatgtgcccagacggctttttcgcttccgggttctcgctcaaattaggtcgcatggaatag

SEQ ID NO: 8961 - DNA, 402 bp, synthetic construct
  misc_feature 1..402: note = source = /note="Description of Artificial Sequence: Synthetic coding sequence"
  source 1..402: mol_type = other DNA
atgggcagcagcggcctgctgagcctgctggtgctgttcgtgctgttggctaacgtacagggcccagggctgacagattggctattcccccggagatgcccaaagatccgggaggagtgcgaattccaggaaagagatgtgtgtaccaaggatcgtcagtgtcaggataacaaaaaatgttgcgtgttcagctgtggaaagaaatgcctggacctcaagcaggacgtgtgtgagatgcctaaggaaacagggccttgcttggcctatttcctgcactggtggtatgacaaaaaagataatacttgctctatgtttgtctatggtggttgtcaagggaataataacaactttcaatcgaaggccaactgcctgaacacatgcaagaataagcggtttccatag

SEQ ID NO: 8962 - DNA, 771 bp, synthetic construct
  misc_feature 1..771: note = source = /note="Description of Artificial Sequence: Synthetic coding sequence"
  source 1..771: mol_type = other DNA
atgttccagaccggcggcctgatcgtgttctacggcctgctggcccagacaatggctcagttcggtgggctgccagtccccttggatcagactctgccgcttaatgtcaaccccgccttgcctctgtcccctaccggcctcgccgggagcctgactaatgctctgtctaatggattgctgtccggaggacttcttggcatcctagaaaacctacctctcttggatattctgaagccaggcggtgggacatcggggggactgctgggcggtctcctcggtaaggtgactagtgtgatacccgggctcaacaatattatcgacattaaagtaacggacccgcaactgcttgagctgggattagtgcaatcccccgatgggcaccgcctgtatgttacaattcctctgggtatcaagttgcaggtcaatactcctttggttggcgcttctctgcttcgactagcggtgaagctggacatcaccgctgagatcttagccgttcgcgacaagcaagaacggatccacctagtgctgggcgattgcacacattctcctggatccctgcagatcagtttgctggacggcttgggacctctgcctatacagggccttttggattcacttacaggaattcttaataaagtgctccctgaactggtacagggtaatgtctgccccctggtgaacgaggtgcttagaggtctggatatcacactcgtccacgacattgtaaatatgctcatccatggtttacagttcgttataaaagtctag

SEQ ID NO: 8963 - DNA, 1386 bp, synthetic construct
  misc_feature 1..1386: note = source = /note="Description of Artificial Sequence: Synthetic coding sequence"
  source 1..1386: mol_type = other DNA
atgagcctggacatccagagcctggacatccagtgcgaggagctgagtgatgcacgctgggcagaactcttgcctttgctacagcagtgtcaggtggtgagattggacgattgcgggctgaccgaggctcggtgcaaagatattagctcggccctcagagtgaatcctgcactggctgagttgaatttgcgatctaacgaactgggggacgtaggcgtacactgtgtgttgcagggtttgcagaccccttcttgcaagatccagaaactgtccctgcagaactgctgcctgaccggcgctggctgtggcgtgctgtcttccacgcttaggaccttgcctactctgcaggaacttcacctcagcgataacttactgggggatgcggggctgcagctgttatgcgaggggctcttggatccacagtgccgcctggaaaagctgcaactcgaatattgttcgctgagcgcagcatcttgcgaacccctggcgagtgtgctccgagcgaaaccagactttaaggagcttaccgtgtcaaataacgatattaatgaggccggggtacgcgtcttgtgtcagggcctcaaggacagcccttgtcagctcgaggcattgaaactggagtcttgcggagttacaagcgataattgtcgagatctttgcgggattgtagcctcgaaggcttccttgcgagaactggctttgggtagcaacaagcttggggacgtcggcatggctgaactgtgcccaggcctcttacacccttcaagccgcctccgaaccctgtggatctgggagtgcggcatcacggctaaaggctgcggggatctttgcagagtgctgcgtgctaaggaatccctcaaagagttgagcctggctggaaacgaactgggagacgagggggctcgcttgctgtgcgaaacattgctggagcccggatgccagctggaaagtctatgggtcaaatcttgtagtttcactgctgcttgttgcagtcattttagcagcgtgttagcccagaatagattccttctcgagctacagatatcaaataacagacttgaggacgctggagtgagagaattgtgccaggggctgggacagccaggaagcgtgttaagggtgctgtggctggccgattgtgatgtgagtgacagttcttgttcaagcttggcagccactctcctggctaaccactcccttcgtgaactggacctttcaaacaattgtctgggcgacgctggcattctgcagctagtcgaatccgtgagacagcccggatgccttctggagcagcttgtcctctacgatatatactggtccgaagagatggaagatcggttacaggccctggagaaagataaaccttccctgcgggtaatcagctag

SEQ ID NO: 8964 - DNA, 534 bp, synthetic construct
  misc_feature 1..534: note = source = /note="Description of Artificial Sequence: Synthetic coding sequence"
  source 1..534: mol_type = other DNA
atgcggctgctgatcctgacctgcctggtggccgtggccctggccaggccaaaactccccttgcggtacccagagcgactccaaaatcctagcgagagctctgagccaattcccctcgaatcccgagaggaatatatgaatggtatgaacaggcagcgcaatattcttagggaaaaacagactgacgaaattaaaaactgcgttgtggcagagccagagaaaatggagtctagtattagctcaagctccgaggaaatgtctctctctaagtgcgctgagcagttctgccgactcaacgaatacaaccagcttcagctgcaaaaaatgtccaagcaggaacagatccgcaggatgaatgaaaacagccacgtgcaggtgccttttcagcagctaaatcagctcgcagcctatccttatgccgtttggtattatccacagatcatgcaatacgtgcccttcccccctttctccgacatctccaaccctaccgcgcacgaaaattacgaaaaaaataatgtgatgctgcagtggtag

SEQ ID NO: 8965 - DNA, 3054 bp, synthetic construct
  misc_feature 1..3054: note = source = /note="Description of Artificial Sequence: Synthetic coding sequence"
  source 1..3054: mol_type = other DNA
atggacctgatccggggcgtgctgctgcggctgctgctgctggcctcatcgctgggaccgggtgcggtttctctgcgagctgccatcagaaagccaggcaaagtgggccccccactcgacatcaagttgggggctctaaactgtaccgccttttcaatccagtggaagatgcccagacacccaggatcccctatactcggctataccgtcttttattctgaggttggcgctgataagtccctgcaagaacagctgcactccgtgcccctgagcagggacattcctaccacagaagaggtgattggcgacttgaaaccaggaacagagtaccgtgttagcatcgccgcatattctcaggcaggtaaaggacgcctctcttccccacgccacgtaaccaccttgtcacaagacagttgcttgcctcctgctgcacctcagcagccccacgttattgtggtgtccgacagtgaggtggccctcagttggaagccgggggcctctgagggctccgcaccaatacagtactatagtgtcgagtttatcagacctgatttcgataagaagtggacaagtattcatgagcggatccagatggactcaatggtgattaaggggctggaccccgacacgaactaccagtttgccgtgcgtgcgatgaattcacatggacctagccccaggagttggccctccgacatcatccggacattgtgccctgaggaggcgggcagcgggcgttacggcccccggtatatcacagatatgggcgccggcgaggatgatgaagggttcgaagacgacctcgacctggacatatcttttgaggaggttaagcctctgcctgccacaaaaggtggcaataagaagttcttggttgagagcaaaaagatgtctatttcgaatcctaaaacaatttcacgcttaatccctccaacgagtgccagcctgcccgtgaccaccgtcgcgcctcagcccatccctatccagagaaaaggcaagaatggggtggccataatgtcccgcctgtttgatatgccctgtgatgaaaccctgtgttccgccgattctttttgcgttaacgattacacatggggaggatcccgatgtcagtgtactttgggaaaagggggggaaagctgtagcgaggatattgtgatccagtaccctcagttcttcgggcacagctacgtcactttcgagcctttaaaaaattcctatcaggcttttcagatcactttggaatttcgggcagaggccgaagatggcctgctcctgtattgtggcgaaaatgagcatggtaggggggacttcatgtctctggcgatcatacgccggtctttgcagttcaggttcaattgcggcaccggagttgctattattgtcagcgagactaagattaagctgggtgggtggcacactgttatgctctatcgggacggtctgaatggactgctccaactgaataatggaacacccgtgacggggcagtcccaggggcaatatagtaagatcactttccggacccccctttatctgggaggtgccccaagcgcctattggttagtgcgggcgacagggaccaatcgcggattccagggttgtgtgcagtcactggctgtcaatgggaggcgaatagatatgagaccttggcctctgggcaaggcactgtccggagctgacgtcggcgaatgctcgtctgggatctgcgacgaagccagttgcattcacggggggacttgtacagcaatcaaagccgacagctatatttgtttatgtcccctcggcttcaagggccggcattgtgaggatgcattcaccctaaccattcctcagttccgcgagtctcttagaagctacgcagcgactccctggccccttgaaccgcagcattacttgtccttcatggaatttgaaattaccttccgacccgactccggcgacggcgttctgctgtactcctatgacaccgggagcaaggattttctttctatcaacttggcgggcggccatgtggagtttcgattcgattgcggttccggaacaggcgttttacgctcagaggaccctctcacactaggcaactggcacgaactgcgtgtcagcaggaccgcaaagaatggcattttacaagtggataagcagaaaatagtggaagggatggctgaagggggcttcacccaaataaagtgtaatactgacatctttatcgggggtgtccctaactacgatgatgtaaagaagaattctggcgttctgaagccgttttctggcagtattcagaaaatcatactcaatgatcgcactatccacgtcaagcatgactttaccagcggagttaacgtggagaacgcggctcacccatgcgtgcgcgctccgtgcgcccatggggggtcctgtcggccccggaaggagggctatgactgcgactgccccctggggtttgaggggctccattgtcaaaaggagtgtggtaactactgtctcaacaccattattgaagccattgagatccctcaatttattgggcgaagctatctcacctatgacaaccctgatattctgaagcgtgtttccggctcacggagcaacgtcttcatgaggtttaaaacaaccgccaaagacggactgctgttatggcgtggagattctcctatgagacccaactctgatttcattagtttgggactgcgagacggagcacttgtttttagctacaacctcggctccggagtagcttctataatggtgaatgggtctttcaatgacggcagatggcaccgagtaaaagcagtcagggatggccagtctgggaagattaccgtagatgactacggggccaggaccggaaaatccccagggatgatgcgacagctgaacatcaatggcgcgctctacgtcgggggcatgaaagagattgccttgcacaccaaccggcagtacatgcgaggactggtaggatgtattagccacttcacactgagcaccgattatcatatcagtcttgtagaagatgccgtagacgggaaaaacattaatacttgcggggcaaagtag

SEQ ID NO: 8966 - DNA, 1893 bp, synthetic construct
  misc_feature 1..1893: note = source = /note="Description of Artificial Sequence: Synthetic coding sequence"
  source 1..1893: mol_type = other DNA
atgcagcaggacggcctgggcgtgggcacccggaacggcagcggcaaagggcgctctgttcatccaagctggccgtggtgcgcaccaagacccctaagatattttgggcgggatgcacgagcccgcagagcacagacagctgcgatggcgctgttggccggcgggctgtccagaggactcgggagtcaccccgcggctgcaggccgcgatgccgttgtctttgtctggctgctgctttccacctggtgcactgctcctgctagagccatccaggtgacagttagtaatccgtatcatgtagttatccttttccagcccgtgaccctcccttgtacctatcagatgacctctacccctacccagcccattgtcatatggaagtacaagtctttttgcagagatcggatcgcagacgctttttcacccgcctccgttgacaatcagttgaatgcacaattggccgccgggaatccaggatataatccctacgttgaatgccaggactcagttcgaacagtgcgcgtggtggcgaccaagcagggtaacgcagtcactctgggcgactattatcaaggaagacggatcaccattaccggcaatgccgacctgaccttcgatcagactgcctggggagacagtggtgtatattattgctccgttgtgagcgctcaggacctccaggggaacaacgaggcatatgccgagttgattgtactagactggctatttgttgtcgtggtgtgcctggccgcttttttgatcttcctgctgttgggcatatgctggtgtcagtgttgtccgcacacctgttgctgttacgtgcgatgtccttgctgccctgataaatgttgttgtccggaggccctctacgccgctgggaaagctgctaccagcggtgtgcccagcatttatgcaccatccacttatgcgcacttgagtccggccaaaaccccacccccccccgctatgatccctatgggcccggcttacaatggatatcctggcgggtatcctggagacgtcgatcggagtagctccgcaggagggcaaggttcctatgtgcccctcctgagggataccgattcttcagttgcgagcgaagtgcgcagtggctacagaatacaggcaagtcagcaggacgactctatgagagtcctgtactatatggaaaaggaattggcgaattttgatcccagccggcccggccctccgtcaggccgcgtggagcgggctatgtcagaggtgaccagccttcacgaggacgactggaggagtcggccaagccgcggccccgccttaacaccgatcagagatgaagagtggggcggtcactctcctaggtcaccccgaggttgggaccaggaacctgcccgagagcaagccggtgggggttggcgggccaggagaccacgagctaggagcgtggatgcattggatgaccttactcccccttccacggccgaatcagggtcacggtctcctacgtccaatggtggacggtccagagcatacatgccgccaaggtctcgttcgcgggacgacctgtacgaccaggacgatagccgggattttccacgtagtcgggacccacactatgacgatttcagaagccgcgaacgtcctccagccgatccacgctctcaccatcaccgcacaagagacccccgagataatggctcacggagtggggacctaccatacgatggacgactcctggaagaggccgtgagaaaaaagggaagcgaggaacgcagacggccccataaagaggaagaggaggaggcttactatccgcctgccccacccccctacagcgaaacagacagtcaagctagccgggagcggcgactaaagaaaaacttggcacttagcagggagtccttggtcgtctag

SEQ ID NO: 8967 - DNA, 750 bp, synthetic construct
  misc_feature 1..750: note = source = /note="Description of Artificial Sequence: Synthetic coding sequence"
  source 1..750: mol_type = other DNA
atgctgcagctgtggaagctggtgctgctgtgcggcgtgctgaccgggacttcagagtcacttctggacaacctgggtaacgacctgagtaatgtggtagacaaactcgaaccagtcctgcatgaaggccttgagacagttgacaacactttgaaaggaatcctggaaaagctcaaggtggatctaggggtgctgcagaaatccagcgcctggcaattggccaagcagaaggcgcaggaggcggaaaagttgttgaacaatgtgatcagcaaactgcttccaaccaatactgacatctttggcttgaagatttctaactcactcatcctcgatgtgaaggcagagcccatcgatgatgggaagggcctgaacttgtctttccccgtgaccgccaacgtgactgtcgccggccccattattggtcagataattaaccttaaagcttctctcgacctgctgaccgccgtcaccattgaaaccgacccccaaactcaccagcctgtagccgtgctgggcgaatgtgcctcagatccaacgagcattagcctctctctcctagataaacattcacagattataaataagttcgtcaactctgtcatcaatacactgaagtcaaccgttagtagtctactccaaaaggagatatgtcctttgatacggatctttattcattctctggacgtcaatgtcattcagcaagtggtggataatccccaacataagacacagctccagacgcttatctag

SEQ ID NO: 8968 - DNA, 3057 bp, synthetic construct
  misc_feature 1..3057: note = source = /note="Description of Artificial Sequence: Synthetic coding sequence"
  source 1..3057: mol_type = other DNA
atggtgagccacttcatgggcagcctgagcgtgctgtgcttcctgctgcttctcgggtttcagttcgtctgcccacaaccatcaactcagcaccgcaaggttcctcagagaatggccgctgagggcgctcctgaagacgacggggggggcggggccccaggtgtgtggggcgcctggggaccttggagtgcctgctcccggtcctgtagcggcggagtgatggagcagacccggccctgtctgccccggagctatcgtcttagaggcggccagaggcccggcgcacccgctagagcctttgccgatcacgtcgtgtctgcggttaggacatccgtccctctccaccggagtcgggatgagacccccgccctggctggcactgacgctagtcgtcaaggacccactgtcctaagggggagtcggcatccccaaccacagggactggaggtcaccggtgacaggcggtcacgtactaggggaacaatcggcccagggaagtatggttatggaaaagctccttacatcctacccctccagacggacacagcacacacccctcaaaggttacgccgccagaaactgagcagccgacactctagatcccagggggcctcaagcgcgaggcatggatatagctcccctgcacaccaggtgccacagcacggaccgctgtaccagagcgactccggtcctcgttccggactgcaggccgccgaagctccaatctatcagctacctttgacacacgatcagggttaccctgccgcgagcagtctgttccactctcctgagacgtccaacaaccacggcgtggggacgcatggcgccactcagtcattcagccagccagccagaagcacagcaatcagctgcatcggcgcctaccggcagtacaaattgtgcaatacaaacgtgtgccccgaatcctcacgcagcatccgcgaggtccagtgtgcttcttataacaacaaaccttttatgggccgtttttacgaatgggagccgtttgcggaggttaagggcaaccggaaatgtgagttaaattgccaggctatgggataccgattctatgtccgccaggcagagaaggttatcgatgggactccatgtgaccaaaatggaactgccatctgcgtgagtgggcagtgcaagtccatcgggtgtgatgactacctgggatctgacaaggtcgttgataaatgcggtgtctgtggtggggacaacactggctgccaggtggtctccggcgtctttaaacatgcactgacttctcttggctaccaccgcgtagtcgagattcccgaaggagctacaaagatcaatatcaccgagatgtacaagtccaataattacctcgctcttaggagtcgaagtggaaggtcaatcattaacggaaattgggctattgatcgccccgggaagtatgaggggggagggaccatgttcacctacaagcgcccaaatgagattagctcaacggccggtgagagcttcctagcggaaggaccaactaatgagattttggacgtctacatgattcatcagcaacccaaccctggcgttcattacgaatacgtaatcatgggcacgaatgcaatcagccctcaggtcccccctcatcgcagacccggagagccattcaacggacagatggtcacggaggggcggagtcaggaggaaggggaacagaagggaaggaatgaggaaaaagaggatctgcgcggagaggccccggagatgttcacaagcgagagtgcacagacttttccagtgcgtcatccagatcgcttcagtcctcatcgacccgataatcttgtaccccccgccccacagccacctagacgtagtcgggaccacaactggaaacaactggggacaaccgaatgctcaacaacttgcggcaaaggaagtcagtaccccatattcaggtgcgtgcatcggagcacccatgaggaggcacctgagagctactgcgacagcagcatgaaacccacacctgaagaggaaccttgtaatatttttccttgcccggctttctgggatatcggagaatggagcgagtgttccaagacatgtgggcttggaatgcagcaccggcaggtcttgtgccgtcaagtgtacgcaaatagaagcttgacagtgcaaccctataggtgtcagcacctggagaagccagaaactactagcacctgtcagctgaagatatgcagcgaatggcagatacggacagactggacttcttgcagcgtgccatgtggagttggccagagaacccgcgatgtgaagtgtgtaagtaatatcggagatgtggtggatgacgaagaatgtaacatgaaactgcgtccaaacgacatcgaaaattgcgatatgggaccttgtgcaaaaagctggtttctcaccgagtggtctgagagatgtagtgcagagtgcggggcaggcgtgaggacaaggtccgttgtttgtatgaccaaccatgtgtccagtctgccattggaaggctgtggtaacaatagacccgctgaagctactccctgcgacaacggcccatgtacgggaaaagtggaatggtttgccggaagttggagccagtgctctattgagtgcggcagcgggacccaacagagagaggttatctgcgtccgcaagaatgccgacacatttgaagtgctcgacccatctgagtgctctttcttggagaaacccccttcccaacaaagctgccatctaaaaccctgcggggctaaatggttctcaaccgaatggtccatgtgctctaaaagttgccaggggggatttcgcgtgagagaggtccggtgtctttctgatgacatgactctctccaacctctgcgatccccaactcaaaccagaggaacgggaatcctgcaatccccaagactgtgtgcctgaggtggacgagaattgtaaagataagtactacaattgcaatgtggtggttcaggcgcgactgtgtgtctataattattataagaccgcctgttgtgcgagctgtactcgcgttgccaatagacagacaggatttcttggcagccgttag

SEQ ID NO: 8969 - DNA, 1311 bp, synthetic construct
  misc_feature 1..1311: note = source = /note="Description of Artificial Sequence: Synthetic coding sequence"
  source 1..1311: mol_type = other DNA
atgcagggcacccccggcggcggcacccggcccggccccagccccgtggataggcgcacactgcttgtcttctcctttattctcgccgcagcccttggacagatgaatttcactggagaccaggtcctacgcgtattagctaaggatgaaaaacagctgtctcttctaggtgacctggaaggcttgaaaccccagaaagtcgacttctggcgaggcccagctagaccaagccttcctgttgatatgcgagtgcccttctccgaactcaaggatatcaaggcctatttagagtctcacggtttggcttacagtatcatgattaaagatatccaggtcctacttgatgaggaaagacaagctatggccaagtctaggcggctcgaaagatccacgaattcattcagctactcttcttatcataccctggaggagatttattcttggatcgacaattttgtgatggagcatagtgatattgtgtccaagattcagattggcaacagctttgaaaaccagtctatccttgtacttaaattttccacgggcggatcccgccaccctgctatctggatcgacactggaatccacagtcgtgagtggattacacacgctaccggcatttggaccgccaacaagatcgtgtcagattacggtaaagatagagtcctgactgatattcttaatgctatggacatttttattgagctagttaccaatccggacggctttgcctttacccatagcatgaaccggctgtggcgtaagaacaagtcaattcgtcccggaatcttctgcattggcgtcgacctaaaccgcaactggaaatccgggtttggcggtaatggcagcaattccaatccgtgtagcgaaacatatcatggtccgtcaccacagagcgaacctgaggtcgcagctatcgtcaatttcattacagcccatggcaatttcaaggcactgatatccatacactcatacagccagatgttgatgtacccatacgggcgactgctggagcccgtaagcaatcagagagaactgtacgacctcgctaaggatgctgtggaggccctgtataaagtccacggaatagagtacattttcgggtcaatatcaaccactctatatgtggcctccggcatcactgtggactgggcttatgattctgggataaagtatgcgttcagtttcgagcttcgggatacaggccaatacggattcctgcttcctgctacacagatcatcccaaccgcccaggagacgtggatggctttgcgcaccatcatggagcatacactgaaccatccgtactag

SEQ ID NO: 8970 - DNA, 492 bp, synthetic construct
  misc_feature 1..492: note = source = /note="Description of Artificial Sequence: Synthetic coding sequence"
  source 1..492: mol_type = other DNA
atgttccagggcctgctgctgctgctgctgctgagcatgggcggcacttgggctagcaaggagcctctccgccctagatgcaggcccattaacgccactcttgctgtggaaaaagagggatgtcccgtatgcattacggtgaatacgaccatctgcgccggatactgtcctacgatgacaagagttctgcagggggtgctgccagccctcccccaggttgtgtgcaactatcgagacgtgcgcttcgaatccataaggcttcccggctgcccccgcggcgttaatccagtcgtcagctatgctgtcgctctgtcctgtcagtgtgcactgtgtcggcggagcaccactgattgtggaggcccaaaggaccacccactgacttgtgatgacccacgatttcaggatagcagctctagcaaagccccccccccatctcttccaagccccagccgactacctggccctagcgatacaccaattttacctcagtag

SEQ ID NO: 8971 - DNA, 213 bp, synthetic construct
  misc_feature 1..213: note = source = /note="Description of Artificial Sequence: Synthetic coding sequence"
  source 1..213: mol_type = other DNA
atgcccggcgccatgaagatcttcgtgttcatcctggccgccctgatcctgttagcgcagattttccaagcacgcacagctattcaccgtgcccttatctcaaaaagaatggaaggacactgtgaggcagagtgcctaacgttcgaggtgaagattggagggtgtagggccgagctggcaccattctgctgcaaaaaccggaagaaacactag

SEQ ID NO: 8972 - DNA, 1098 bp, synthetic construct
  misc_feature 1..1098: note = source = /note="Description of Artificial Sequence: Synthetic coding sequence"
  source 1..1098: mol_type = other DNA
atgtggctgctgctgaccatggccagcctgatcagcgtgctgggcacaactcacggtttatttgggaagttacatcccggatcccccgaggttacgatgaatatatcacagatgattacatattggggctaccctaacgaggaatacgaggtggtcactgaggacgggtacatactggaggttaatagaattccttatggtaaaaaaaatagtggaaatactgatgcaggctacgatgtgtggttgggtaactccagaggaaacacgtgggcgcgtaggaacctatactattccccagattccgtggaattctgggctttctccttcgacgaaatggctaaatacgacctgccagcgacaatagatttcatcgtcaagaaaaccggccagaagcaactgcattacgtcggtcacagccaggggacaaccattgggtttattgcatttagtaccaatccatctttagctaaaaggatcaagactttctatgctttagcacccgtagcaaccgtgaaatatacaaaaagcctgattaacaagctgcgttttgttcctcagagtttgtttaagttcatattcggcgacaaaattttctatccacataacttctttgatcagtttctggccacagaagtttgcagtcgagagatgctgaatctactgtgttccaacgcattgtttattatttgcggctttgatagtaagaacttcaacactagtcggctagacgtgtacctgtcccacaaccccgccggaaccagtgtgcagaatatgtttcactggacccaggcagtcaaatctggaaagtttcaggcctacgactgggggagtcctgtgcagaatcgcatgcactatgaccagagtcagcctccctactataatgtgacagccatgaacgttccaatcgccgtgtggaacggcgggaaggatttactggccgatccacaggacgtgggtctcttgttaccaaagctccccaatctcatctaccataaggagatccccttttataatcatctggattttatctgggccatggatgccccgcaggaggtgtataacgatattgtcagcatgattagcgaggacaaaaaatag

SEQ ID NO: 8973 - DNA, 2535 bp, synthetic construct
  misc_feature 1..2535: note = source = /note="Description of Artificial Sequence: Synthetic coding sequence"
  source 1..2535: mol_type = other DNA
atgggccccggcgcccccttcgcccgggtgggctggcccctgcccctactcgttgtgatggcagcaggagtcgctcctgtgtgggcgtcccattctccgcaccttccacggcctcacagtagggtgcccccacatccctctagcgaaagacgcgccgtgtacataggggcactgttccccatgagtggagggtggcccggtggacaagcttgtcagcccgcagtcgaaatggcgctggaagatgttaactcacgcagagacatcctccctgattacgagcttaaactgattcatcacgattctaaatgcgaccctggccaggcaaccaaatacttgtacgagcttctgtacaacgatcccattaagattattcttatgccgggttgcagttccgtgagcaccctcgtggccgaggcagcccgcatgtggaacctcatagtgttgagctatggttctagttctccggccctgtccaatcggcaacgcttccccacattcttccgcacacacccctctgcaacactgcataatcctactcgcgttaaattgttcgaaaagtggggctggaaaaaaatagccacaatccagcagacaacagaggtgttcaccagtacgctggacgacctggaggagagggtgaaagaagccggaatagagattacattcagacagtcattcttctcggatcccgccgtcccagtcaagaatctgaagcgccaggacgcccgtatcattgtcgggcttttttatgagacagaagctcgcaaggtattttgtgaagtgtataaggagagactttttggcaaaaagtatgtgtggtttctgatcgggtggtatgccgacaattggttcaaaatatacgacccaagtattaactgcaccgttgatgaaatgacggaagccgttgagggccatattacgactgagattgttatgctcaatcccgcaaatactagaagcattagcaacatgacaagtcaggaattcgtcgagaaactgacaaagcgcctgaaacgccacccggaggaaacaggggggtttcaggaggccccactagcttacgatgctatttgggccctggctttagctctcaataaaacttcagggggcggtggaagatccggagtccgcctggaagacttcaattacaataatcagactatcacagatcagatatatagggcaatgaacagcagcagcttcgaaggagtgagtggacacgttgtcttcgacgcgtctggcagcaggatggcatggactctaattgagcaactccagggaggatcatataagaagattggttactatgactcgaccaaggatgacctatcttggtccaagacagacaagtggatcggcggcagcccgccggccgaccagacccttgtgattaagaccttccggtttctcagccagaaattgttcatatccgtgtccgttcttagtagtttggggattgtcctggccgtagtgtgtctgtcttttaacatctacaacagccacgtgcggtacatccagaatagccagccaaatttgaataacttaactgctgtaggctgctctctggccctcgccgccgtgtttccgctgggcttagacggctaccacatcggtagaaaccagttcccatttgtgtgtcaggctcgtctgtggctgttgggtctggggttctctctggggtacggctccatgtttaccaagatttggtgggtgcatactgtctttacgaaaaaggaggaaaagaaagagtggcgcaaaactctggagccctggaagctctatgctacagtgggcctactggtgggaatggacgtgctgaccttggcaatatggcagatcgtagatcctcttcacaggacaatcgaaacgtttgcaaaggaggagcctaaggaggatatcgacgttagtattctgcctcaactggagcattgctccagccgcaagatgaacacctggctcggaatcttctatggctataagggactactgctgcttctgggcatctttttagcctacgagaccaaatcagtgagtaccgagaagatcaacgatcatagggcagtaggtatggcaatctacaacgttgcggtgctctgtctgattactgctcctgtgaccatgatcctgtctagccagcaggatgctgcgtttgcctttgccagtttggccattgtgtttagctcctatatcacgctagtcgtcctgtttgtgccgaaaatgaggcgactgataacccgaggcgagtggcagtctgaagctcaggacaccatgaaaaccgggtctagcactaacaacaacgaggaagagaaatcaagacttctggaaaaagaaaatagggagctggaaaaaatcatagctgagaaggaggagcgcgtaagcgagttgaggcaccaactgcaaagtcggcagcagctgcggtcgaggcgacacccccctacgcctcctgaacccagcggtgggctgcctcgagggccaccggaacccccggatcggctgtcatgtgacggctcgagggtccacctcctgtacaagtag

SEQ ID NO: 8974 - DNA, 1020 bp, synthetic construct
  misc_feature 1..1020: note = source = /note="Description of Artificial Sequence: Synthetic coding sequence"
  source 1..1020: mol_type = other DNA
atggtgagcaagagccggtggaagctgctggccatgctggccctggttctcgtcgtaatggtttggtattcaatcagcagagaagaccggtacatcgaactgttttactttcccatcccggagaagaaggaaccttgtctccagggggaggccgagagcaaggcatcgaaactgttcggaaagttgagcccactatgctcatactcccgggaccagccaatcttcttaagattggaggattatttctgggttaagacaccctctgcatacgagttaccttatggaacaaagggtagcgaggacctgttgctaagagtgttggcaataacatcgtctagtattcctaagaacatccagagtctgcgttgtagaaggtgcgtggtggtcggcaatgggcaccggttgcgcaattccagcctgggagacgccatcaacaaatacgatgtggtgatccgcttaaataacgcgcctgtggccggctatgaaggggacgtaggatctaagacaaccatgaggttgttctaccctgagagcgcccattttgacccgaaagtggagaataatcctgacacccttctggtgctggtcgctttcaaggccatggacttccactggatcgagaccattttatcagataaaaagagagtgcggaaggggttttggaaacagcctccgcttatatgggacgttaaccccaagcagattagaatactcaacccctttttcatggaaatcgcagccgacaagctgttatcactgcccatgcagcagcctcgcaaaattaagcagaagcctaccaccggcctgctagccattactctggcgctgcacctttgtgatctcgtgcatatcgcggggtttggctatccagatgcatacaataagaaacagaccatccattattacgagcagatcactttaaagtctatggctggcagcgggcataacgtttcacaagaagccctcgctattaagagaatgctggagatgggcgccattaaaaatttgacgtccttctag

SEQ ID NO: 8975 - DNA, 1386 bp, synthetic construct
  misc_feature 1..1386: note = source = /note="Description of Artificial Sequence: Synthetic coding sequence"
  source 1..1386: mol_type = other DNA
atgagcctggacatccagagcctggacatccagtgcgaggagctgtcagacgctcgctgggctgagctccttccactgctccagcagtgtcaggtcgtgcggttagatgactgcgggctgaccgaggctagatgcaaggacatttcctctgccctgcgtgttaacccagctttggccgaactaaatctgagaagtaatgagctaggggatgtgggcgtgcactgtgtgctgcagggcctgcaaacaccgagttgtaagatccaaaaattgtccctccagaactgctgcttgaccggggccggctgcggcgtcttatcctctactctgcgaactctgccaaccctgcaagaactgcatctcagcgacaatctcctgggggacgccggactgcagctgctgtgtgaagggctgctggaccctcaatgtaggttagaaaaactccaactcgaatattgttccttgagtgccgcgagctgtgaacccctggcatccgtacttagagcaaagccggactttaaagagttgaccgtaagcaacaacgatataaacgaggctggcgtgagagttctttgtcaaggattgaaagattcaccgtgccagctggaagcattgaagcttgaatcctgtggggtaacctcggacaattgtagggacctatgtgggatagtggcctctaaagcgagtttacgtgaattggctctgggttccaataaattaggagatgtgggaatggcagagctgtgccctggcctactgcacccctcctctagacttaggaccctttggatctgggagtgcggaattacagctaaagggtgtggcgacttatgtcgcgttctgagggccaaggagtcgctgaaagaattgagcttagctggtaatgagctgggggacgaaggggcccggttactgtgtgagaccctacttgagcccggatgtcagctggagtcactttgggtgaagtcttgcagtttcacagcggcctgctgctcccatttttcctcagtgctggcccagaacagatttctgctcgagctgcagatcagcaacaaccggcttgaggatgccggggtacgggaactgtgccaaggcctcggtcaaccaggctccgttttgagggtcctttggctggcagactgcgacgttagtgactcatcctgttccagcctcgccgcgaccctactagccaaccacagcctgagagagctggatctctccaataactgccttggtgatgccggaatactgcagctcgttgaatccgttcgccagcccggctgtctgctggaacagctggttctctacgacatttattggtcagaggagatggaggatcgcctgcaggccctggagaaggataaacccagcctacgcgttatcagctag

SEQ ID NO: 8976 - DNA, 1695 bp, synthetic construct
  misc_feature 1..1695: note = source = /note="Description of Artificial Sequence: Synthetic coding sequence"
  source 1..1695: mol_type = other DNA
atggcccccaagaagctgagctgcctgcggagcctgctgctgcccttgtccctgaccctcctgctcccccaggccgatacccggtcatttgttgttgacagagggcacgaccgctttctactggacggggcaccttttcggtatgtcagcggatctctgcactactttcgcgtcccaagagtcctctgggccgatcgcctgttgaagatgcgttggtctggactgaacgccattcagttctatgtgccctggaattatcacgagccacagcccggcgtgtacaattttaacggaagtcgggacctcattgcattcttgaatgaagctgccctggccaatctgctagtgatcctccggccaggtccctacatctgcgccgagtgggaaatgggtggcttaccttcttggctgctgagaaaacccgaaatccatttgaggactagtgaccccgcggacaatatgacgaagatctttacccttctccggaaatatgagccccacggccctctggtcaatagcgaatattataccggctggctagattactgggggcagaaccactcgacccgcagcgtctctgccgtgacaaaagggctggaaaacatgctgaagcttggtgcttccgtaaacatgtacatgttccatggcgggaccaattttggatattggaacggtgcggacaaaaaggggagatttttgccgattactaccagctacgactatgacgcgcccatcagcgaagccggggacccgactccaaagctgttcgcacttcgggacgtgatctccaaatttcaggaagttccccttggaccactgcccccccctagcccaaagatgatgctgggacctgttactcttcacttggtgggacatctgcttgctttcctagatctactgtgcccccgagggcctatccacagtattctgcctatgacatttgaagccgtgaagcaggaccacggattcatgttgtacagaacgtacatgacacacactatttttgagccgactccgttttgggtccctaacaatggcgtgcacgacagggcttatgtgatggttgacggagtgtttcagggggtagttgaacgcaacatgagggacaagttgtttctcacagggaaactcggtagtaagctggacattctcgtcgaaaatatgggccgactaagtttcggctctaacagcagcgacttcaaaggtctgctgaaaccaccaatcctgggccaaaccattctgacacagtggatgatgttccctcttaagatcgacaatctggtgaagtggtggttccctctacaattgccaaaatggccgtatccacaggcaccctcaggtccaactttttatagtaagacttttcctatccttggctctgtcggggatactttcctctatctgcccggctggaccaaggggcaggtctggattaatggtttcaatcttggccggtactggaccaagcagggcccccagcaaaccctttatgttcccagatttcttctgttcccgcgaggtgctcttaacaaaattacactgctggagctggaagatgttcccctgcaaccacaggttcaatttctcgacaagccaattctgaattcaactagtactctgcatcgcacccacatcaattctctgagtgccgacacgctttcagcttccgagcccatggagctgagcggacactag

SEQ ID NO: 8977 - DNA, 1317 bp, synthetic construct
  misc_feature 1..1317: note = source = /note="Description of Artificial Sequence: Synthetic coding sequence"
  source 1..1317: mol_type = other DNA
atgatgtacgcccccgtggagttcagcgaggccgagttcagccgggccgagtatcagcggaagcagcagttttgggactccgtcagattggccctctttactctggccattgtcgccataattggcatcgccatcggaattgtgacccattttgtcgtggaggacgacaagtctttctactacctcgcatcctttaaggtgaccaatatcaagtataaggaaaattatggaattaggtcttcgcgtgagttcattgagaggtcgcaccagattgaacgaatgatgtcacggatcttccggcattcttctgtcggcggacgttttatcaagagccatgtcatcaaactgtccccggatgagcagggcgtggacatccttattgttctgatctttcggtatccatctaccgactctgccgagcagatcaagaaaaagatcgagaaggcgctgtaccagtctctcaagaccaagcagctgagcctcacaatcaataagccaagttttcggttaaccccgattgacagcaaaaagatgaggaatttgctgaactcccggtgtggaattcggatgacatcttctaacatgccactgccggcttcctccagcactcagagaatcgtacagggtagagagaccgccatggagggcgagtggccgtggcaggctagtcttcaacttataggctctggccaccagtgcggggcctctcttatcagtaacacatggctcctaactgccgcccactgcttctggaaaaataaagacccgactcagtggatcgcaacttttggggcgacaatcactcctccagccgtcaagcgcaatgttcgtaaaatcatcttgcatgagaattaccacagagagacaaatgagaatgacattgcattggttcagctcagtaccggagtcgaattctccaacatcgtgcaaagggtctgcttgcctgactctagtatcaaattgcccccaaagacatccgttttcgtcactggcttcggctcaatcgtcgacgacgggcctatccagaatacactgcggcaagcccgggttgagaccatatcgaccgacgtttgcaatagaaaggatgtgtacgatgggctgatcacccctggcatgctatgcgccggttttatggagggcaaaatagacgcttgcaaaggtgattcaggagggcctttagtgtatgacaaccatgacatatggtacatcgtgggtattgtatcttgggggcagtcttgcgctttgccgaaaaaacccggagtctatacacgtgtaactaaatacagagattggatcgcatcaaaaactggcatgtag

SEQ ID NO: 8978 - DNA, 4392 bp, synthetic construct
  misc_feature 1..4392: note = source = /note="Description of Artificial Sequence: Synthetic coding sequence"
  source 1..4392: mol_type = other DNA
atggagccccggctgttctgctggaccaccctgttcctgctggccggatggtgcctgcccggcttgccttgccccagtcgatgcctgtgtttcaagtccaccgtacgatgtatgcatttaatgctggatcacattccgcaggtcccacaacagaccactgtattggacttaaggttcaaccgtattcgggagatccctggctcggcctttaagaagctgaagaaccttaatacactgttgctcaataacaatcacatacggaaaatcagtcggaatgccttcgaggggttagagaacctgctctacctgtacctgtataagaacgagatccacgcgcttgacaaacaaacattcaaggggctaatcagcctggagcacctgtatatccactttaatcagctcgaaatgttgcagcctgagacctttggtgacctgttaaggttagagagactttttctgcacaacaacaaattatcaaaaattccagccgggtcattttcaaatctggatagtctgaagcgcctgcgcctggacagcaatgccttggtctgcgattgcgacctgatgtggctaggggagttactgcagggatttgcacagcatgggcacactcaagctgcagccacttgtgagtatcccaggcggctgcacggacgcgctgtggcctcggtcacagtggaggagttcaactgtcaatctcctaggatcacgttcgagccacaggacgtggaggtgccatcgggaaacacagtttactttacttgccgggcagagggcaatcccaagcccgagatcatttggatccataataaccactcattggacttggaggacgatactagactgaacgttttcgacgacggcacattgatgatccgcaatacaagggaatccgaccaaggggtgtaccagtgtatggccagaaactctgccggagaagcaaagacccagagtgcaatgctccggtacagctccctgccggcaaaaccatcttttgttatacaacctcaggataccgaggttctgatcggcactagtaccaccctagaatgtatggccacggggcacccccaccccctgatcacctggactcgggacaatggactcgaacttgacggctccagacacgtggctaccagttccggactctatttacagaacatcacgcagagagatcatggtcgcttcacatgtcacgctaataatagccacggaaccgttcaagcagctgctaatatcatcgtgcaggctccacctcagtttacagtcacacccaaagaccaggtggtgctcgaagaacacgccgttgagtggctttgcgaggctgatggcaacccacccccagtgatcgtatggacaaaaactgggggccagcttcccgtggaagggcagcacaccgtgctttcttctgggacgctgagaatagacagagctgctcaacatgatcaggggcagtacgaatgtcaagccgtctcatccctgggcgtcaaaaaagtctctgttcaactaacggtcaaacccaaagctctggccgtgtttacacaactgccacaggacactagtgtggaggttggcaagaacattaatatatcttgccatgcacagggggaaccccagccaatcattacatggaacaaagagggggtgcaaatcaccgaatctggcaaattccatgtggatgatgaaggcacattgaccatttatgacgccggattccccgaccaagggcgttacgaatgcgttgctcggaactccttcggcctggcggttactaatatgttcctgaccgttaccgcgatacagggccggcaggctggcgatgatttcgtggaatcaagcattctggacgcggtccagagggtggactctgcaatcaactctacaaggaggcacctgttctctcagaagccgcatacaagcagcgatctgcttgcacagtttcactatccaagagaccccctgatagtggaaatggctcgagctggcgaaatattcgagcatacactgcagttaattcgggagcgggtgaagcagggactcacagtggacctggaggggaaagagtttaggtacaatgaccttgtgagcccaaggagcctaagcctaattgcgaacctgtcaggctgtactgctaggcgccccctgcccaattgctcgaatagatgcttccacgcaaagtacagggcccacgacggcacctgcaataacctccaacagccaacctggggggccgcactgacagccttcgctcggctcctccagcctgcctaccgggacgggatacgggccccccgtggtctgggcctgccggtcggtagccgtcagccacttccacccccccgattagtagctaccgtttgggcccgtgcggccgctgttactccagaccacagctatactaggatgcttatgcattggggttggtttctcgagcacgacctcgatcacaccgtacctgcgctctcaactgccaggttcagcgacggccgcccttgctcaagcgtttgtactaatgatcccccgtgttttcctatgaacacccgacacgctgatcctcgcgggacccatgcaccttgcatgctgttcgcaagatcctcacctgcgtgcgcaagcggtagaccgtctgcgacggtggactctgtctacgcacgggagcagataaatcagcagaccgcttacattgatggttccaatgtttacggttcctccgagcgggagtcccaggccctgagggacccctctgtaccccggggtctgctgaagactggtttcccatggcccccttcggggaagccacttctgccattctcgactggccctcccacagagtgcgccagacaagaacaggaatctccatgtttccttgccggcgatcacagggctaacgaacatctggccctagcagcgatgcataccctatggttcagagaacataataggatggcaacagagctgtccgctctgaaccctcactgggagggcaataccgtatatcaggaagcacgtaaaattgtgggtgcagaattgcagcacatcacatattcgcattggttacccaaagttctgggggacccaggtacacgaatgctgcggggatacagaggctacaatcccaacgtgaatgcaggtatcatcaattccttcgctacggctgcttttagatttggacacacactgattaacccgatactatatcggctgaacgctaccctgggcgagatcagtgagggacaccttccatttcataaagccctgttctcaccctcacgcataattaaggaaggaggtatagaccccgtgctgcgcggcctgtttggcgtagctgcaaaatggagggcccctagctacttactatcccctgagttgactcaacgactcttcagtgcagcatattccgctgcggtcgattcggccgcaacaatcatccagcgcggtcgggatcacgggatccctccctatgtcgatttcagggttttttgtaatcttactagtgtgaagaacttcgaagatttgcagaacgagattaaggatagcgaaattcgccagaagttgcgtaagctttatgggtcccccggggacattgatctttggcctgctcttatggtcgaggatctgatcccggggacccgagtcggaccaactctgatgtgcctgtttgtaacacaattccagcggctgcgcgacggcgaccggttctggtatgaaaaccccggagtcttcacacctgcacagctgacacagctgaaacaagcatccctgagcagggtgctgtgcgataacggagattccattcagcaggtgcaggctgatgtgtttgtgaaggccgagtacccgcaggactacctgaattgctcagagattcctaaggtcgatctgagagtttggcaggactgctgtgccgattgccgcagtaggggacaatttagggccgttactcaggagtcgcagaaaaagaggagtgcccagtactcttacccggtcgataaggacatggaattgagtcacctgagatctcgtcagcaagacaaaatctatgtgggagaggatgcccgcaatgtcaccgtattggctaagactaaattctcccaagatttttcaaccttcgcagcagaaattcaggaaacaattaccgctttgcgggagcaaataaacaaactggaagcaagacttcgtcaggccggctgtaccgacgtcagaggcgtgccaaggaaggccgaggagagatggatgaaagaagactgtacccactgtatctgtgagagtgggcaggtgacctgcgtggtcgagatctgcccaccggcaccatgcccgagcccggagctggtgaaagggacttgctgccctgtatgtcgcgataggggtatgccatctgatagtccagagaaaaggtag

SEQ ID NO: 8979 - DNA, 1206 bp, synthetic construct
  misc_feature 1..1206: note = source = /note="Description of Artificial Sequence: Synthetic coding sequence"
  source 1..1206: mol_type = other DNA
atgggcctgaaggccctgtgcctgggcctgctgtgcgtgctgttcgtttctcatttctatactcccatgcctgataacatcgaggagagctggaaaatcatggccctagatgcgattgcaaagacgtgtacgtttacagccatgtgcttcgagaatatgagaattatgcgctacgaagagttcatatcgatgatattccgcctcgactacacgcagcccctgtctgacgagtacattactgtgacagatactaccttcgtagacatcccagtgcggctgtacctgcctaaacgcaaatctgagacccgcaggagggccgtaatttatttccacggcggggggttttgcttcggttcgagcaaacagcgcgcattcgacttcctgaatcgttggacagccaatacacttgatgctgtagttgtcggtgtggactatcgtctggcaccccagcaccacttccccgctcagttcgaggatggcctggccgccgtgaaattcttcttacttgagaaaattctcactaagtacggggttgatccgaccaggatctgtatcgccggagactcttcaggaggcaacctggcaaccgccgtaacacaacaagttcagaacgatgcagagattaagcacaagatcaagatgcaagtcctcctgtatccggggttacagatcacagattcttatctaccttctcaccgagaaaatgagcacggcatcgtcctgacaagggacgtggctattaagctggtttctttatacttcaccaaggatgaagcccttccctgggccatgcgccgcaatcagcacatgccacttgagtccagacacctgtttaaattcgtgaactggtcgatccttctcccggagaaatatcgtaaggattacgtgtacaccgagccaatcctagggggcctgtcctactccttaccaggcttgacagactcaagggcccttcctctcctggcgaacgattcccagctacagaacctcccacttacttatattcttacatgtcagcatgatctgctgcgggatgatggtctcatgtatgtgacacgacttaggaatgtgggtgtacaagtggtccacgaacatattgaagatgggatccatggcgcgctctcattcatgacttccccattttacctcagattgggtctacgaatacgggacatgtatgtcagctggctcgacaaaaatctgtag

SEQ ID NO: 8980 - DNA, 264 bp, synthetic construct
  misc_feature 1..264: note = source = /note="Description of Artificial Sequence: Synthetic coding sequence"
  source 1..264: mol_type = other DNA
atggtgagcctgatgaagctgtggatccccatgctgatgaccttcttctgtacagtcctcctgagcgtcctgggcgaaatgcgaaaaaagcgctatgaccgcaaggagttgctactcgaagaatgttggggtaagccaaatgtgaaggagtgcacgaacaaatgttctaaggcctttcggtgcaaagataaaaattatacctgctgctggacctactgtgggaacatctgctggatcaatgtcgagacaagcggcgattactag

SEQ ID NO: 8981 - DNA, 813 bp, synthetic construct
  misc_feature 1..813: note = source = /note="Description of Artificial Sequence: Synthetic coding sequence"
  source 1..813: mol_type = other DNA
atgcggggccagggccggaaggagagcctgagcgacagccgggacctggacggttcatatgaccagctgactgggcacccccccggacccactaaaaaggctcttaaacagagattcctgaaactgctgccctgctgcggccctcaggcactgcccagcgtcagcgaaactcttgccgcccccgcgagcctcagaccccacagaccgcgtttgttagaccctgattccgtcgacgatgaattcgagctgtcaaccgtctgtcacagacctgaggggctggaacagctgcaagaacagacaaagttcacacgcaaggaactgcaggtactgtaccggggattcaagaacgaatgtccatcgggaatcgtgaacgaggaaaattttaaacagatctatagccagttctttccgcaaggcgattcctccacctacgccacttttctttttaacgcatttgatacaaaccacgacggctctgtaagtttcgaggattttgtcgcaggtttgagtgtcattttgcgaggaaccgtagacgataggttaaattgggctttcaacctctacgacctgaacaaggatgggtgcatcaccaaggaagaaatgttggatattatgaaatctatttacgacatgatgggaaagtacacctaccccgccctcagggaggaagctccaagggagcatgtcgagagtttctttcaaaaaatggaccgcaacaaggatggcgttgtcacaattgaggaatttattgaaagctgccagaaagacgaaaacatcatgcgatccatgcagttgttcgacaacgtcatctag

SEQ ID NO: 8982 - DNA, 819 bp, synthetic construct
  misc_feature 1..819: note = source = /note="Description of Artificial Sequence: Synthetic coding sequence"
  source 1..819: mol_type = other DNA
atgcacctgcggctgatcagctggctgttcatcatcctgaacttcatggagtacatcggttcccagaatgcctctcgcggacgacgacaacggcggatgcaccccaatgtctcccagggttgccaaggcggatgcgctacctgcagcgactacaacggttgcctgtcttgcaagccacgtctgttctttgctcttgagaggatcggtatgaagcagattggggtatgcctaagctcttgcccctcgggctattacggtacacgataccccgacattaataagtgtacgaaatgtaaggctgattgcgacacgtgttttaacaagaacttctgcactaaatgcaagagcggcttctacctccatctaggaaagtgtttggataattgtcctgaagggctggaagccaataaccataccatggagtgcgtgagcattgtgcattgtgaagtttccgagtggaacccttggtctccatgcacaaaaaagggaaaaacttgcggctttaaacgggggactgagacacgggttagagaaatcatccagcatccgtctgcgaaagggaacctttgccctccaactaacgagactcgtaaatgcacggttcagaggaagaagtgccagaagggcgagagaggaaaaaagggaagagaacgaaagaggaaaaagcccaacaagggagagtctaaagaagccattcctgattcgaaatccctcgaaagtagtaaagagattcccgagcaacgagaaaataagcaacaacagaagaaacggaaggtccaggacaaacagaaatcggtttctgtgtccaccgtccattag

SEQ ID NO: 8983 - DNA, 294 bp, synthetic construct
  misc_feature 1..294: note = source = /note="Description of Artificial Sequence: Synthetic coding sequence"
  source 1..294: mol_type = other DNA
atggccaagagcttccccgtgttcagcctgctgagcttcatcctgatccatctggttctttcaagcgtaagcgggccgcgtcattggtggccgccacgtggaatcatcaaagtgaaatgtccttacgagaaggtgaacttatcctggtacaatggaactgtaaacccttgtcccggcttgtaccagcctatctgcgggacgaacttcatcacatacgataatccatgcattctgtgtgtggaatccttgaaatcacatggaaggataagattctaccatgacgggaagtgctag

SEQ ID NO: 8984 - DNA, 726 bp, synthetic construct
  misc_feature 1..726: note = source = /note="Description of Artificial Sequence: Synthetic coding sequence"
  source 1..726: mol_type = other DNA
atgtggaccgtgcggaccgagggcggccacttccccctgcacagccccacattttcctggagaaacgtggcctttctgctgcttctttcactggctttggaatggacttctgccatgctaactaagaagattaagcataaacccggtctatgccctaaggaaaggctcacctgtacaacagaattgcctgacagctgcaatacagactttgactgcaaagagtatcagaagtgttgttttttcgcttgtcagaaaaagtgcatggaccccttccaggagccttgcatgctgcctgtaaggcacggaaactgtaaccatgaggcccagagatggcacttcgatttcaagaattaccgttgtacacccttcaagtaccgcggctgtgaaggcaatgcgaacaattttttgaatgaagacgcatgtagaactgcgtgcatgctgatcgtcaaggatggacagtgccccctcttcccattcactgaaagaaaagagtgtccaccatcctgccatagcgacattgattgtccccagacagataagtgctgtgaaagtcggtgtggattcgtgtgcgcccgggcatggactgtcaagaaggggttttgcccccgcaagcccttgctttgcaccaagattgacaagccaaagtgcctgcaggacgaggagtgccccctcgtggagaagtgttgtagccattgtggtctgaaatgtatggacccgagacggtag

SEQ ID NO: 8985 - DNA, 1827 bp, synthetic construct
  misc_feature 1..1827: note = source = /note="Description of Artificial Sequence: Synthetic coding sequence"
  source 1..1827: mol_type = other DNA
atggcccgggcccgggccggcgccctgctggccctgtgggtgctgggcgctgctgcccacccgcagtgcctggactttagacctccctttcgccccacgcagcccctgcgtctgtgcgctcagtattctgactttggctgctgtgacgagggccgtgatgccgagttgacccgaagattttgggcactggccagtcgtgtggacgcagcagagtgggccgcatgtgcggggtatgcccgggaccttctttgccaggaatgcagtccttacgctgctcatctctacgacgccgaagacccatttaccccccttagaaccgtgccagggttatgtcaagactattgccttgacatgtggcacaagtgtagaggattgtttcgtcatctgtctacagaccaggaattatgggcactcgagggtaacctggctcgtttctgcagatacctgtccctggatgacacggattactgctttccatatctgctcgttaacaagaacctaaactctaacctgggccacgtggtggctgatgctaaagggtgtctgcaactgtgcctagaggaggtagccaacggtctgagaaatccagtggccatggtacacgcccgtgacggaactcatagattctttgtggcagaacaagtggggctagtctgggcataccttccggatagaagtcgcttaggaaaacccttcctaaacattagcagagtcgttttgacgtctccctgggaaggcgacgaaaggggtttcctgggcattgcgttccacccttctttccagcacaaccgccggctgtacgtttactatagcgttgggattcggtcttctgagtggatcagaatttcagaatttcgggtcagtgaggatgatgaaaacgccgttgaccattcgtccgaacgcattattctggaggtgaaggagccagcctccaatcacaatgggggacagttgctctttggagatgacggttacttatacatctttaccggcgacggcggcatggccggggaccccttcggtacattcgggaatgcccagaacaaatcagccctgctgggtaaagtgctacggatcgacgtggatcgcaaggaaaggggcctcccctatgggatcccccccgacaaccccttcgtgggcgaccccgcagcccagccagaggtttacgctctaggagttaggaacatgtggagatgttcctttgatcgcggagatccaagctccggaaccggccgcggccggttgttttgcggagacgtcgggcagaataagtttgaagaggtagacgtagtggagagagggggcaattacggatggcgggccagggagggattcgaatgttacgataggtccctgtgtgccaatacctccctgaatgatctgctgcccatattcgcttaccctcataccgtggggaaatccgtcaccggaggctatgtgtataggggttgcgagtatccaaacctcaacggactctacatctttggggactttatgagtggacggctgatgtccctacaggagaatccgggcaccggccaatggcaatatagcgaaatatgtatgggccacggccagacttgcgagtttccaggcctgattaacaattattatccatacattatctcctttggggaagacgaggccggcgagctatacttcatgagcacaggcgagccctctgctaccgctcctcggggagtggtgtacaaaattattgacgcatcttcatgtaaggctagatcagctatgccaggatacgtccccgctccttccgtgtgctcaagcctgacatcgcagccattcattcttcagtggtggaagtag

SEQ ID NO: 8986 - DNA, 351 bp, synthetic construct
  misc_feature 1..351: note = source = /note="Description of Artificial Sequence: Synthetic coding sequence"
  source 1..351: mol_type = other DNA
atggccccccccagcgtgcccctggtgctgctgctggtgctgctgctgagcctggccgaaacacccgcatctgcccccgcacatcggggacgtgggggctggacccttaatagcgctgggtatctgctgggcccagttcttcatttgccgcagatgggggatcaggatggtaaaagagaaaccgctctggaaatcctggatctttggaaggccatcgacggtttgccgtattcacatccaccccagccctcaaaaagaaatgtgatggaaacatttgccaagcccgaaatcggagatctggggatgctcagtatgaagatcccaaaagaggaagacgttctcaagtcatag

SEQ ID NO: 8987 - DNA, 3618 bp, synthetic construct
  misc_feature 1..3618: note = source = /note="Description of Artificial Sequence: Synthetic coding sequence"
  source 1..3618: mol_type = other DNA
atgcggaagccccggcggaagagccggcagaacgccgagggccggcggtctccgagcccatactccctgaagtgcagccccaccagggagactttaacctacgcccaggctcagagaatcgtcgaagtcgatatcgacggccggcttcacaggatcagtatttacgaccccctgaagatcattaccgaagatgagttgaccgcacaggatattaccgaatgtaactctaataaggaaaatagtgaacagccacagtttcctggtaaaagcaagaaaccaagttccaaaggaaaaaagaaggagagctgctccaaacacgccagtggcacctccttccatttgccccagccaagttttcgtatggtggactcaggcatccagccagaagcccccccacttcctgccgcctattacaggtatatcgaaaaacccccggaggatctggacgctgaggtggagtatgacatggacgaggaggacctagcttggctcgatatggttaatgagaaacgacgagtcgatggtcacagcctggtaagcgccgacacctttgaactgctcgttgaccgattggagaaggagtcatacctggagtcaagatcatccggggctcaacagtctttaatcgatgaagatgctttctgctgtgtgtgtttggacgacgagtgtcacaactccaatgttattctgttttgcgacatctgcaacctcgccgtccaccaggaatgttacggcgtaccttatatccccgaggggcagtggttgtgtaggtgttgccttcagagcccttcgcggccagtggactgtatattgtgccctaacaagggaggggcctttaaacagacctctgatgggcactgggcccatgtggtctgtgcgatctggattcccgaggtgtgctttgctaacacagtgtttctcgaacccatcgaggggatcgataacatccctcccgcccggtggaaactcacctgctatatatgcaagcagaaagggctcggcgctgccatccagtgtcataaggtaaattgttacacagcatttcacgtaacatgcgcacaaagggctggactctttatgaagatcgaacctatgagggagaccagcctgaacggcacaatcttcaccgttcgcaaaaccgcctactgcgaggcacacagtcctccaggtgcagcaaccgcccgccggaaaggcgattcacccaggagtatatccgagactggggatgaggagggtctgaaggaaggagatggcgaggaagaggaggaggaggaggtggaggaggaagagcaagaggctcagggcggggtcagcggttcccttaagggggttccaaaaaagagtaagatgagtttgaagcagaaaattaaaaaggaaccagaggaggcgggacaggacaccccctctacactcccaatgttggccgtgcctcagattccgagctacagactgaataagatatgctcagggctttcatttcagcgcaaaaatcagtttatgcagaggctccacaactactggctgctgaagagacaagcccgcaatggcgtgcccttaattcggaggctccactcccacctccagagccaaaggaacgccgaacagcgggagcaggacgaaaagacaagcgccgttaaagaggagctcaagtactggcagaaactgaggcatgatctcgaacgggctagattgttaatagaactgatccgcaagcgggagaagctgaaacgagagcaggttaaagtacagcaggcagccatggaactggagctgatgcctttcaacgtcttactgcgcaccaccttggacctgctgcaggaaaaggatccggcgcatattttcgcggagcccgtaaatttaagcgaagttccagattatctcgagtttatatctaagccaatggatttctctactatgcggaggaagctggagagccacctttataggactctggaggagttcgaagaagatttcaatttgatcgttacaaactgcatgaaatacaatgccaaagacacaatttttcatagggccgccgtcaggctccgagatctcggaggggccattctgcgccacgctagaaggcaggccgagaatatcggctacgaccccgagcgcggcacccacttgccagaatcccctaagctggaggacttctatagattttcatgggaagatgtggataatatattgattcccgagaacagggcacatctttctcctgaggttcagctgaaagagctcctggagaaactggatcttgtcagcgccatgaggagctccggcgcacgaacaagacgggtgaggctgctaagacgggaaatcaatgcattgaggcaaaagctcgcccagccaccccctcctcagccaccttccctgaacaaaactgtttccaacggtgagttgcctgcaggtcctcaaggggacgcagcagtactcgagcaagctctccaggaggagcctgaggatgacggagatcgcgatgattctaagcttccgcctcctccgacccttgagcctacgggtcccgctccttctctgagcgagcaggaaagtccacccgaacctcctacgctgaaacccattaatgactcaaagcccccctctaggttcttgaagccaagaaaggtagaagaggacgagctgcttgagaagagtcctttgcagttgggtaacgaaccactgcagcggctcctgtcagataatgggataaatcgcctgagcctgatggccccagatacacccgccgggacacctttgagcggtgtgggtcgaagaaccagcgttctgtttaaaaaggccaagaacggtgtgaagctgcagagatcaccagatcgcgtcttggaaaacggcgaggaccacggcgtcgctggatctccagccagtccagcttccatcgaggaagagcggcatagcaggaaacgcccaagatcccggagctgtagcgagtctgaaggtgagcgctctccacagcaggaggaagagacagggatgactaatggctttgggaagcataccgagagtggtagtgactccgagtgctcactcggattgtcaggtggactggcttttgaggcgtgttcaggactcactcctcctaagaggtctcggggcaaacctgctctgtcaagggtgccctttctggagggcgttaatggagactctgactacaacggatccggccgatctctgttgctgcctttcgaggacagaggtgatctggaacccctggaactggtgtgggccaagtgtaggggctacccttcatatccagctctcatcattgaccctaagatgcctcgggaaggattactacacaacggggttcctatcccagtgccccctcttgacgtgctgaagctgggcgaacagaagcaagctgaggcaggcgaaaagttgtttttggtattgttttttgacaataagcgaacttggcagtggctcccacgggacaaagtccttcctttgggcgtagaggacaccgtcgataaactaaaaatgctggaggggaggaagacgtccattaggaagtcagtgcaggtcgcctacgatagggccatgatccatctgagcagggtccgggggccacattctttcgttacatcctcctatctctag

SEQ ID NO: 8988 - DNA, 1977 bp, synthetic construct
  misc_feature 1..1977: note = source = /note="Description of Artificial Sequence: Synthetic coding sequence"
  source 1..1977: mol_type = other DNA
atgttcgtgagctacctgatcctgaccctgctgcacgtgcagaccgctgtcttagcgagacctgggggtgagagcataggctgcgatgactatctcgggtctgacaaggtcgtcgacaagtgcggcgtttgcggaggtgataataccggctgtcaggtcgtgtctggagtttttaagcacgcgctaacttcactggggtatcatcgggtcgtggagatacctgagggagccaccaaaatcaatatcaccgaaatgtacaagtccaacaactatctggctttgagaagtcggagcggtcggtctatcataaacggcaattgggctattgatcggcctggaaaatatgaggggggaggcacaatgttcacatataaacgacccaatgagatctcatccactgcaggcgaaagcttcctggcagaaggaccaacgaacgaaattttggatgtgtacatgatccatcagcagcccaatccaggggtccactacgagtatgtgatcatgggtaccaatgccatctccccacaggtcccccctcaccgacgacctggcgaaccgtttaatgggcagatggtgaccgaggggaggtcacaggaagagggtgagcagaagggccgtaacgaggaaaaggaagacctgcgcggagaagcacctgagatgttcacatccgaaagtgcccaaacattccctgtgaggcatcctgatcggtttagcccccatcgcccagacaacctggtgccacccgcgcctcagcctcctcggcgcagcagggatcacaactggaagcaactcgggacaaccgaatgctctacgacctgcggaaagggatcacaatacccaatttttcgttgcgtgcacagatctactcacgaagaggccccagaatcttactgtgactcatctatgaaacccacccccgaagaggagccctgcaatattttcccatgtccagctttttgggacattggggaatggagtgaatgttccaagacgtgtggcttaggtatgcagcacaggcaggtgctttgtcggcaggtatacgccaatcgatcattaaccgtgcagccctacaggtgccagcatctcgaaaagcctgaaactacttccacttgccagttaaaaatttgctccgagtggcagattaggactgattggacctcttgttcggtgccctgcggggtaggccagagaacaagagacgtaaagtgtgtgtccaatattggtgatgttgtcgacgatgaagagtgcaatatgaaattaagaccgaatgatatcgagaattgcgacatgggcccatgcgccaagtcttggttcctcacggagtggtctgaacggtgcagtgctgagtgcggggcgggcgtgcggacccgtagtgtggtgtgtatgactaatcatgtgagttccctgccactggaaggttgcgggaacaatcgacctgcggaggcgacaccttgtgacaacgggccttgcacagggaaagtcgagtggttcgcgggcagctggtcccagtgcagcattgagtgtgggagcggtactcagcagcgagaggtaatatgcgtccggaagaatgcagatacgttcgaggtgcttgacccatcggaatgctcttttctggagaaaccacctagtcaacagagttgtcacctcaaaccttgtggggcaaaatggttcagcaccgagtggtcaatgtgttctaaaagttgtcagggcggattccgcgtccgggaggtgcgctgcctaagtgacgacatgacactgtctaacctctgcgatccgcagttaaaaccggaagagcgcgaatcatgcaacccacaggactgcgttccggaggtcgatgagaactgcaaagataagtattacaactgcaatgtcgtggtccaggctcgtctatgcgtgtataactattacaagaccgcctgttgcgcttcgtgcacgcgggtcgcaaatcggcaaacggggtttcttggcagtcggtag

SEQ ID NO: 8989 - DNA, 708 bp, synthetic construct
  misc_feature 1..708: note = source = /note="Description of Artificial Sequence: Synthetic coding sequence"
  source 1..708: mol_type = other DNA
atgcggcccctggccggcggcctgctgaaggtggtgttcgtggtgtttgcctctctctgtgcgtggtatagtggctaccttctggctgagctgatccccgatgccccgctttcatcagccgcgtatagcattcggtcaattggtgaaagacctgtcctcaaggcaccagtgccaaaacgccaaaaatgtgatcactggacaccctgtcccagtgatacatacgcttatcgtttgttgtcaggcgggggccggtctaagtacgctaaaatctgcttcgaagacaacctgctcatgggcgagcaactaggaaatgtggcacgggggattaatattgcaatcgtgaactacgtgaccggcaacgtgactgcaaccagatgtttcgacatgtacgagggcgataattcgggacccatgacaaaattcatccagtctgccgctcccaaatccctactgtttatggtaacatacgatgatggctctaccaggctgaataatgacgccaagaacgccatcgaggctcttggatccaaggagatacgaaatatgaagttccggtcttcatgggtattcattgcagctaaaggactcgaactaccgtctgagattcagcgcgaaaaaattaaccatagtgacgctaagaataatcgctattcagggtggcccgccgagatccaaattgagggctgtatacccaaggagaggtcatag

SEQ ID NO: 8990 - DNA, 759 bp, synthetic construct
  misc_feature 1..759: note = source = /note="Description of Artificial Sequence: Synthetic coding sequence"
  source 1..759: mol_type = other DNA
atgcggggccagggccggaaggagagcctgagcgacagccgggaccttgacggctcatatgaccagcttacagggcaccccccagggcccaccaaaaaagccctgaagcagcggtttctcaagctgcttccatgttgtggaccgcaggctcttccctctgtctccgaaaactccgtggatgatgagtttgagctctcaaccgtgtgccacagacctgaagggttggagcaattgcaggagcagacgaaatttaccaggaaggagctgcaagtgttgtaccgcggcttcaagaacgagtgcccatccgggattgtcaacgaggagaattttaagcaaatttattcccaattctttcctcagggggatagcagcacctatgcaacttttctcttcaatgcctttgacactaatcacgacggctccgtgagtttcgaggatttcgttgctggcctcagtgtgatccttaggggcaccgtcgatgaccgcctgaactgggcttttaatctttacgatcttaacaaggatgggtgtatcaccaaggaagaaatgctcgatattatgaaatcaatttacgatatgatgggcaaatacacatacccggcccttcgtgaagaagctccccgagaacatgtggaatccttctttcagaaaatggaccgaaacaaagatggcgtggtcacaattgaggagttcatcgaatcatgccaaaaagatgagaatatcatgcgttccatgcagttgttcgacaatgtcatatag

SEQ ID NO: 8991 - DNA, 312 bp, synthetic construct
  misc_feature 1..312: note = source = /note="Description of Artificial Sequence: Synthetic coding sequence"
  source 1..312: mol_type = other DNA
atgagcggccggggcaagggcggcaagggcctgggcaagggcggcgctaaaagacatcgcaaggttcttcgcgacaacattcaggggattaccaaaccagcaatccgccgcttggcgcgacgaggaggcgtgaagcgcattagcggcctgatatatgaggagacgcggggtgtcctaaaggtgtttctggagaatgtgatacgtgatgctgttacttacaccgagcatgccaaaagaaagacggtcactgccatggacgtcgtgtacgccctgaagcgccagggtagaactctctacggattcggaggctag

SEQ ID NO: 8992 - DNA, 3120 bp, synthetic construct
  misc_feature 1..3120: note = source = /note="Description of Artificial Sequence: Synthetic coding sequence"
  source 1..3120: mol_type = other DNA
atggaggtgaccgccgtggccacccagggcggctacggcagcagcgactgggtgacttcatacctgctcatgtttagtgatggcgggcgtaattggaaacaatacagaagggaggaatcaatttggggatttcctggaaacacgaacgccgattcggtggttcattaccgactgcagccgcccttcgaggccagatttctgcggttcctccctttggcctggaaccccagaggccgcatcggtatgaggatcgaagtatacggatgtgcatacaagtcggaggtggtttacttcgatggccagtccgcactgctataccggcttgacaaaaagcccctcaagcccattcgcgacgtcatcagtcttaagtttaaggcgatgcagtccaatggtattttgttacatagagagggtcagcatggaaatcatattaccctggagctgataaagggtaagctggtgttttttttgaacagcggtaacgccaagttgccctccacaatcgcaccggtaacccttacccttgggtcccttctagacgaccagcactggcatagcgtgctaattgaactgttggatacacaagtgaatttcactgtcgataaacacacccatcacttccaggcaaagggtgactcttcttatctggacctgaattttgaaatatcttttggcggaattcctacgcccggccggagccgagctttcaggaggaagtctttccatggctgccttgagaatctctattacaatggcgtcgatgtgactgagctggcgaagaagcataagccccaaattttgatgatgggcaacgtgtccttttcctgtcctcaaccacagactgtgcctgtgacatttttgagctccagaagttatctggccctcccaggcaatagcggcgaagataaagtttccgtcacatttcagtttcggacgtggaaccgcgcgggccacctgctctttggcgaactgcggaggggctccggatcttttgtgctcttcttaaaagacggcaaattaaaactgagcctgttccagcctggacagtcacccaggaacgttaccgccggtgcagggcttaatgatggtcagtggcacagcgtgtctttttcagcgaagtggagtcatatgaacgtggttgtcgatgatgacacggctgtccagccgctggtggctgtgcttatagattccggagacacttattacttcggagggtgccttgacaactctagcggcagcggatgtaaatccccactggggggcttccagggatgtctgcgtctaatcacaatcggcgacaaagcagtcgaccccatactcgtccagcagggcgcattaggaagttttagggatctacaaatcgactcctgcggcattactgataggtgtctcccatcctattgtgaacatggaggagagtgcagccagtcctgggacacattctcctgcgactgtctgggtaccgggtatactggggagacctgccactcaagtctgtatgaacagtcttgtgaggcccacaagcataggggaaatccaagcggtctgtactacattgatgcggatgggtcaggaccacttggccccttcctcgtgtactgtaatatgacggctgatgctgcctggactgtcgtgcaacatggtggaccggacgccgtaactctgcgtggcgcacctagcggacatcctcgaagtgcagtgagtttcgcgtatgccgctggtgccgggcagctcagatctgctgtgaatctggccgagaggtgcgagcagcgactggctctccggtgcggtaccgcccggcgccccgactcgcgggacggaacccccttaagttggtgggtgggccgcacaaacgaaacccacactagctggggaggttctctgccagatgctcagaagtgtacctgtggactggagggtaattgtattgacagtcagtattactgcaactgtgacgccggtcgaaatgaatggacctctgacacaatcgtgctctctcaaaaggagcatctccctgtcacccagatcgttatgacagatgccggcagaccccattccgaagccgcttacacactcggccccttattatgccggggtgatcagagcttctggaatagtgcaagctttaatacggaaactagctacctgcatttccctgcgttccatggggagctcactgcagatgtttgtttcttcttcaagaccactgtgtcctcaggagtcttcatggaaaatctcggcatcacagattttattcgaattgagctcagggcacccactgaagtgactttcagcttcgatgtgggtaatgggccctgtgaggtcacagtgcagtctcccacaccatttaacgacaatcagtggcaccatgtgcgggccgagcgcaacgtaaagggcgcttccctgcaggtggaccaactccctcaaaagatgcagccggctcccgctgatggccatgtccgcctccagctgaattctcagcttttcataggtggtaccgcgacccgccaacgcgggtttctgggttgcatcagatctctgcagctcaatggggtagcgctagacttagaggaacgtgcaacggtcactcccggtgttgaaccaggctgcgccggacattgttccacatacggccatctatgccggaacggcgggcggtgccgtgaaaaacgaagaggggtcacctgcgactgcgcgttctccgcttacgatgggccattctgcagcaacgaaatcagcgcttacttcgcaacaggctcatcaatgacctaccacttccaggagcactacactctgtccgagaatagcagcagtctggtgagttccctccatcgcgatgtgacattgactagagagatgataactctgagctttcggactacccgcacgcctagcctcttactatacgtgagctccttttacgaagaatacttgtccgtgatactggccaacaatggctccctgcagatcaggtataaactggatcgccaccagaaccccgacgcgttcactttcgacttcaaaaatatggcagatggacaactgcaccaggtgaagatcaacagggaggaggctgtcgttatggtcgaggtgatcccacagatgcagaaatctaattag

SEQ ID NO: 8993 - DNA, 1257 bp, synthetic construct
  misc_feature 1..1257: note = source = /note="Description of Artificial Sequence: Synthetic coding sequence"
  source 1..1257: mol_type = other DNA
atgcggagcctgctgctgctgagcgccttctgcctgctggaggccgccctggcagccgaagtcaaaaagcccgcagctgccgcggcccccgggaccgccgaaaagcttagtccaaaggctgctacactcgccgagcggagcgctgggctcgccttctccctctatcaggctatggctaaagaccaggctgtcgagaatatcctcgtaagtcccgtggtcgtcgcttcctcactaggtctggtttctttggggggcaaggccactacggcgtctcaggctaaagccgtgctctccgctgaacaactgcgcgacgaggaagtccacgccggcctcggcgagctgttgcgaagtctgtcgaatagcactgccaggaacgtgacatggaaacttggctcacgactgtatggaccctcctctgtgtcttttgcagacgattttgtgcggagctctaaacagcactacaattgtgagcactctaaaataaatttcagggacaagcggtcagccctgcagtccattaacgagtgggcagctcagacaaccgacgggaaactcccagaggtgacaaaggatgtggaacgcacagacggcgccctgctggtgaacgctatgttctttaaaccgcactgggatgagaagttccatcacaagatggtcgataataggggatttatggtgaccagaagctatactgttggtgtgatgatgatgcatagaaccggactgtacaattactatgacgacgagaaggagaaactgcagatcgtggaaatgcctctcgcccacaagctctcttcgctaataatcctcatgcctcaccacgttgaacctctggaacggctggaaaagctgttgactaaggagcaattaaaaatctggatggggaagatgcagaagaaagctgtcgccatctctttgcccaaaggcgtggtcgaggtgacccacgacctacaaaagcatctcgcaggattgggcctgacggaggccattgacaaaaacaaggctgatctcagccgcatgtcaggcaaaaaggacttgtacctagcttctgtgtttcatgcaactgcattcgagctcgataccgacggaaaccctttcgatcaggacatctacggacgtgaagagctccgttctccgaaactgttttatgccgatcacccattcatctttttggttagggacactcaatcaggttctttgctgtttattggcagactggtgagaccaaagggggataagatgagagatgaactgtag

SEQ ID NO: 8994 - DNA, 378 bp, synthetic construct
  misc_feature 1..378: note = source = /note="Description of Artificial Sequence: Synthetic coding sequence"
  source 1..378: mol_type = other DNA
atgcagctgctgaaggccctgtgggccctggccggcgccgccctgtgctgttttctagtactcgtgatacatgcccagttcttaaaagagggccagcttgctgccggcacgtgcgaaatcgtgaccttggaccgcgactcctctcaacctaggcggacaatcgccagacagacagcccgttgcgcctgtaggaaaggccaaatagcggggaccactagagcccgcccagcttgcgttgacgcccgcatcataaagactaagcaatggtgcgacatgctgccatgcttagaaggagagggctgcgacctcctgatcaataggagtgggtggacatgcacacaaccagggggcaggatcaaaacaactactgtgtcttag

SEQ ID NO: 8995 - DNA, 5859 bp, synthetic construct
  misc_feature 1..5859: note = source = /note="Description of Artificial Sequence: Synthetic coding sequence"
  source 1..5859: mol_type = other DNA
atgcccgccctgggccccgccctgctgcaggccctgtgggccggctgggtgctgactctccagccactgccaccaactgcttttacccccaatggaacttatctgcagcatttagctagggatccgacaagcgggacactgtatctcggggcgacaaacttcctgtttcagctctccccggggctgcagctggaagccaccgtcagtaccggccctgttctagactctcgcgactgcctacccccagtgatgccagatgagtgtcctcaggcccagcccacgaacaatccgaaccagctgctgctggtcagccccggcgctctcgtggtctgtggcagcgttcaccagggggtgtgtgagcaacgacgacttggccagttggaacagctcctgctgcggccagagcgtccaggggacactcaatatgtggctgccaatgatcccgcagtgagcaccgtgggtttagtggcccagggcttggccggcgagccgctcttatttgtgggtaggggctatacatctcgcggcgtgggcggaggcatccctcccattactactcgtgcactgtggcctccagacccgcaggctgccttcagttatgaagagacagccaaactggcggttggaagattgtccgagtactcgcaccactttgtttcagcatttgctagaggggccagtgcttactttctatttctcagacgcgacctccaggcacaatctagggccttcagggcctatgtctcgagagtctgcctgcgcgaccagcactactactcctacgttgaactaccattagcctgcgagggcggcaggtatggcctgattcaggccgcagcagtggctaccagtcgggaggttgcccatggcgaagtgctatttgcggcattcagctctgctgcaccgcctaccgtcggacgcccaccatccgctgctgctggagcctcgggggcaagcgccctttgtgcttttccacttgatgaggttgatagactggcaaatcgtacgagagacgcatgctatacgagagagggaagggctgaggatgggaccgaggtagcctacatagagtatgacgtgaattcagactgcgcccagcttcctgtcgatactttggatgcatacccctgtggcagcgatcacactccgtccccaatggcgagccgcgttcctctggaggccacgcccatactggagtggcctggcatccagctcaccgccgtcgcagtcacaatggaagacggacacacaatcgctttcttaggcgattcgcaggggcagctgcaccgcgtttacctagggccgggtagcgacggtcatccctattctacgcaatcgatccagcaaggctcagcagtgtcccgcgacctgaccttcgacgggacgtttgaacatttgtatgtcatgactcagtcaaccctgcttaaggtgcccgttgcatcctgcgcccagcacctggattgcgcatcttgccttgcccatagagacccttattgcggatggtgtgtactgctgggccgttgttcccgtagatccgaatgctctaggggacaggggccggagcagtggctgtggtccttccagcccgagctcggttgtctgcaagttgctgccatgagcccggcaaatatcagtagggaggagacccgggaggtcttcctgtccgtgcctgacctgccacccttatggccaggcgaatcttacagttgccacttcggcgagcatcagtctcccgcccttctgacggggagcggtgtcatgtgcccttcccctgacccaagtgaagcccccgtgctcccaaggggggccgactacgtatcagtatctgtcgaactgcgtttcggggcagtcgtaatcgctaaaaccagtctttccttctatgactgcgtggccgtgaccgaactgcggcctagcgcgcaatgtcaggcatgtgtaagcagcagatggggctgcaattggtgcgtgtggcagcatctatgcacacacaaggcttcttgcgacgcgggacccatggtggcatctcaccagagtcccctcgtgtccccagatcctccagcccgaggagatggagactctgccgaattagagggcccaccagcccctctcatcctcccaagctccctcgattaccagtacgacacgccaggattgtgggagctggaggaagcgactcttggagctagttcttgtccatgcgtggagtccgtgcaagggtcaacgctgatgcccgtgcacgttgagagggagattagattactgggacgtaatctgcatttgttccaggatggacccggagacaacgagtgcgtgatggaacttgaggggctcgaggtggttgtggaagcgagagtggaatgcgagcctccccctgacacacagtgtcacgtgacctgtcagcagcaccagctaagttacgaagctctccagccggaactccgggttggattatttctccggagagcaggcagattgcgtgtcgacagcgccgaaggactgcatgttgtattgtacgattgttcagttgggcatggggactgcagccggtgccagactgcaatgccacaatacgggtgcgtctggtgcgaaggggagcgaccccgttgtgtcactagagaagcctgcggcgaggcagaggcggtcgcgacccagtgccccgcccctcttatccatagcgtcgagcctttgaccgggcctgtagacggtggtacacgtgtgaccataaggggtagcaacctcggccagcatgtgcaggacgtgctgggtatggtgacagtggctggagtgccctgtgccgtagacgcccaggagtatgaagtctccagcagcttggtttgcatcaccggcgcctcaggggaagaggtcgccggagccacagccgtggaggtgcccgggagagggcgcggggtatctgagcacgacttcgcttatcaagacccaaaggtgcactccattttccctgctagaggaccccgcgccggcgggactcgcctcacactcaacggaagtaagctgctcactggacgccttgaggacattcgagtggtggtgggcgaccagccttgtcacttactgccggagcaacagtctgagcagctgcgctgtgagactagtcccaggccaactcctgctacgctgcccgtagcggtgtggttcggggcgactgaaagacgcctgcagcgagggcagtttaaatatactctagacccgaacataacctccgctggacctactaagagctttttgtccggtggtcgggaaatttgtgtgcgcgggcaaaatctggacgttgtgcaaacaccacgaatccgggtgactgttgtttccaggatgctgcagcctagccagggcttgggtaggagaagaagggttgtgcctgaaaccgcctgcagcctgggaccttcttgcagttcccagcagtttgaagagccatgccatgtgaacagtagtcaacttatcacgtgtaggaccccagcactgccaggcctgccagaagatccttgggtgagggtggagtttatcctggacaatttggtcttcgattttgcaacactcaaccccacacctttctcatatgaagcagatcctacgctgcagccattaaatcccgaggaccccactatgcctttcagacacaagcccggttccgtattctctgtggagggggaaaatttggaccttgccatgagcaaagaggaggtggtggccatgatcggggacgggccttgcgtcgtcaaaaccttgacaaggcaccacctgtattgcgagccacctgtggaacaacccctgcctagacatcatgccctgagagaagcaccagattccctccccgagtttaccgtgcagatgggtaatttgaggttctcactgggtcacgttcagtacgatggagaaagtccaggtgcctttccagtagccgcccaagtcgggttgggggtggggaccagcttactagccctcggggtgatcatcattgtgctcatgtacagacggaaatccaagcaggccttaagggattataagaaggtgcaaatccaactggagaacctggaaagcagcgtgcgcgatcgttgtaaaaaagagtttacggacttgatgacagagatgacggatctgacctccgaccttctcggatccggtattccatttctcgactataaggtgtacgccgagcgtatttttttcccgggccaccgggaatcccctctgcatagagacctcggggtgccggaaagccggcgtccaacggtcgagcagggccttggccagctgagcaatctgctgaatagtaagctttttttgactaaatttatccacaccctagaaagccagcgcacattctctgcaagggatagagcctacgtagcgagcttgttaacggtggcactccatggcaaactggagtatttcactgatatcctgcgtacgctgctaagcgatctagtggcccagtacgtggccaaaaacccaaaacttatgctgaggcgaactgagacagtagttgaaaaactactcactaattggatgagcatatgcctttatacttttgttagggattctgtgggggagccgctgtatatgctcttccgtggtataaaacaccaggtcgataagggcccagttgacagcgtgaccggaaaagcaaaatacacacttaatgacaacagactgctgcgtgaagatgtggagtatcggccgctgaccctgaacgcccttctcgctgttggccctggagcaggcgaagcgcagggtgtgcccgtgaaggtcctggattgtgacacgatttcgcaggcgaaggagaagatgctagatcagttgtataagggagttccacttacgcagcgacccgaccctcggaccctcgatgtggagtggagatccggagtggccggccatttaatacttagcgacgaagacgtgacgtccgaagttcaggggctttggcggaggctgaacaccctgcaacactacaaagtgccagacggtgctaccgtggcactggtgccctgccttaccaaacatgtgttgagggaaaaccaggattacgtgcctggagagcgcacaccaatgttggaagatgtagacgaaggaggcatacggccatggcatttggtgaagccatctgatgagccagagccacctagaccacgccggggatcactgcgcgggggcgagcgggaaagggcgaaggcaatcccagaaatatatttgacaagacttctgtcaatgaaaggaactctccagaagttcgttgatgacctgttccaggtgattctgtctaccagtcgccctgtacccctcgccgtcaaatatttttttgacctgttggatgagcaagcccagcagcacggcattagcgatcaagacaccatccatatttggaagacgaacagcctgccactgcgtttctggatcaacatcattaagaatccacagttcgtatttgatgtgcagacgtctgacaacatggatgctgtgctgctggtgatcgcccagactttcatggacgcctgcaccctagccgaccataagctgggacgggactcccccattaacaaactgctgtatgctcgtgacatcccaaggtacaagcgtatggtcgagcggtactacgcagacattcggcagactgtgcccgcatcagaccaggagatgaatagcgtactcgctgagctatcctggaattactccggcgatttgggagcccgggtcgctcttcatgagctgtacaagtacatcaacaaatattatgaccagatcattacagccctcgaagaggatggaactgcccaaaagatgcagctcggttatcgactccagcagatcgccgccgccgtagaaaacaaggtcaccgatctctag

SEQ ID NO: 8996 - DNA, 342 bp, synthetic construct
  misc_feature 1..342: note = source = /note="Description of Artificial Sequence: Synthetic coding sequence"
  source 1..342: mol_type = other DNA
atgctggtgctgttcctgctgggcaccgtgttcctgctgtgcccctactggggggagctacacgaccccataaaggccacggagatcatgtgttacgagtgcaaaaaatatcatctcggcctgtgctacggggtgatgacttcctgttcccttaagcacaagcagagctgtgctgtagagaatttctacattctgacccgtaagggccagagtatgtaccactattccaagctgagctgcatgacgagttgcgaggacattaactttctcggatttacgaaacgagtggaacttatctgctgtgaccacagcaactactgcaacctcccagagggcgtctag

SEQ ID NO: 8997 - DNA, 6408 bp, synthetic construct
  misc_feature 1..6408: note = source = /note="Description of Artificial Sequence: Synthetic coding sequence"
  source 1..6408: mol_type = other DNA
atgcccgccctgggccccgccctgctgcaggccctgtgggccggctgggtgctgaccctgcagccactgcctcctactgcgttcactcctaatggcacttatttacagcatctggccagggatccaacttcgggtacactatacctgggtgccaccaactttctgttccagttgagtcctgggttgcaactggaagccacagtctccaccggccctgtactggatagcagggactgtctgcctcccgtaatgcctgatgagtgtccccaggcacagccaaccaataatcctaaccagctgctactggtgtcccctggtgctcttgtggtttgcgggagtgtccaccagggagtctgtgagcagcgcaggttgggccaactcgagcagctcctattgcgccctgaaaggccgggtgacacacaatatgtggctgcgaatgaccccgctgttagtactgtgggactggtggctcagggcctcgccggggagccacttctctttgtggggcggggctatacatctagaggggtgggaggcggaatcccccccatcaccaccagagcgctgtggccccccgaccctcaagcggcattttcatatgaggaaacagctaaactggccgtgggccgactctctgagtattctcaccactttgtgagtgcttttgcacgcggagctagcgcatacttcctctttctgcggcgggatctgcaggcacagtctagggcctttcgggcttatgtgagcagggtctgccttcgggaccagcattactacagttacgtggagctaccacttgcttgtgagggtgggcggtacggcttgattcaggctgcagcagtggccacgtctcgcgaagtagcacacggcgaggtgctgtttgcagccttctcttccgctgctcctccaaccgtggggcgtccacctagcgcggcggccggcgcctccggtgcatccgcgctttgcgccttcccactagatgaagtggacaggcttgccaaccgcactcgcgacgcttgttacactcgggaaggcagggccgaggatggcacagaagtggcatatattgaatacgacgtgaacagtgactgcgctcagctcccagttgacactctcgacgcatacccatgcggatccgaccatacaccaagccctatggctagcagggtgcccctggaggctacccccatcctggagtggccaggaatacagctgacagcagttgcagtaaccatggaggacgggcacactatagcgttcctgggggactcgcagggacagttgcacagagtttacttggggcctggatccgatggccatccatattccacccaaagcatccagcaaggctctgccgtttcgcgcgacctgacgtttgacggaactttcgagcacctgtatgtcatgacccagtccaccctccttaaagtgcccgtggcgtcatgcgctcaacacctcgactgtgcatcatgccttgcgcacagagatccatactgtggctggtgcgtgctgctgggccgatgttcccgcagaagcgagtgctcccgcgggcaggggcccgagcagtggctctggtcattccaacccgagctgggatgtcttcaggtcgctgccatgagtcctgccaatattagcagggaagagaccagggaagtttttctctccgtgcccgatctgccacctttgtggccaggagagagctactcttgccatttcggggagcaccagagccccgccctgctgacaggatccggcgtgatgtgtccgtcccccgaccctagcgaggcccctgtgcttcctaggggcgccgactacgtgagtgtgagtgtggaactccggtttggagcggtcgttatcgctaaaacttccctgtctttctacgactgcgtcgctgttactgagttaaggccgtcagctcaatgccaggcctgtgtatcgtctagatggggttgcaactggtgcgtttggcagcatttatgcacgcacaaggcctcatgtgatgccggccctatggtggcaagtcaccagtctccactcgtgtcacctgacccgcctgcaagaggcggtcctagtcctagtccccccactgccccgaaagctttagccactcctgctccagatacacttccggtggaacctggcgctccttccactgcaacagctagcgacatttcccccggcgctagccccagcctgttgagtccctggggtccatgggccggtagcggcagtatcagtagcccagggtccacgggaagtcctctccatgaagagccctctccaccttctccgcagaacggccccgggaccgctgtgccagctccgactgactttaggccctccgccacccctgaggatctcctcgcctctcctctctcaccatcagaggtcgcggccgtgccacctgccgatcccggcccagaggcccttcaccccaccgtgccactggatctccctccagcaactgtgccagctaccacattccccggagccatggggtccgtgaaacctgccctcgactggcttacaagggaggggggagagctacccgaagccgatgaatggactggtggagatgcacccgcattctccacgtctaccctactgtccggcgacggtgattctgctgagctcgaggggcctccggctcccctgatactcccctcgagcttggactaccagtatgacacgcctggcctttgggagttggaggaggccacattaggggcgtcaagctgcccttgcgtcgagtcagtgcagggctcaaccttaatgccagtgcacgttgaacgggaaattcggctcttgggacgaaacctccatctctttcaggatgggccgggcgacaatgaatgcgtgatggagcttgaagggctagaggttgtcgtggaagcacgggtggaatgtgagcctccacctgacactcagtgccacgtcacctgccagcagcatcagctctcctatgaggcccttcagccagaacttagagttggactgttcctcaggcgcgctggacggctgcgggtggattcagcagaaggcctgcatgtggtgctctacgattgctcagttggacatggcgattgttctcggtgccagactgcgatgcctcagtacggatgtgtctggtgtgagggggaacgcccacggtgcgtaactagagaggcctgtggcgaagcagaggccgtggctacccagtgccctgcaccactgatccacagcgtcgaaccgctcacagggcctgtggacggtgggacccgtgtgacaatccggggaagcaatctgggccaacacgtccaggacgtcctgggcatggttaccgtggcaggtgtcccctgtgccgttgatgcccaagagtatgaggtctcaagttcattggtctgcattaccggcgccagtggcgaagaggtggctggcgcgactgccgtagaagtgcccggaagggggcgcggagtctccgagcatgacttcgcatatcaagatcccaaggtgcactcaattttccctgcccggggaccgagagcaggtggcacccgtctaaccctcaacggttctaagctgctcaccgggagactggaggatatacgggtcgtagtgggcgaccaaccatgccatctgctcccagagcagcagtctgagcaactgcgatgcgagacttctccacgccctactcccgccacactcccggtcgcagtgtggtttggggctacagagcgcagactgcagcgggggcagttcaagtacacgctggaccccaacattacttcagccgggcctaccaaatcattcttgtccggcggcagggagatctgcgtacgcggacagaatttagacgtggtgcagacccccagaatacgcgtaaccgtggtctccagaatgctgcaacccagtcagggcttggggcggagacgccgggtggtacccgagaccgcttgtagcctggggcccagctgctcttctcaacaattcgaggagccttgtcacgtaaactccagccagctcatcacctgtcgaacacctgccctccctggcctccctgaggatccgtgggtgagggtcgaattcattttggacaacttggtattcgacttcgctaccctaaatcccacacctttctcctacgaggcggaccctaccctccaacccctgaaccctgaggaccccaccatgcccttcaggcacaagccaggttccgtgttcagcgtggagggcgagaatctggacctcgcgatgtccaaggaggaagttgttgccatgataggtgacggtccctgtgttgtcaagaccctgacacgacatcatctctattgcgaacctcctgtagaacagcccttgccgcgacatcatgctctgagggaggctcccgattcattaccagaattcactgttcagatgggtaatcttcgattttcactcgggcatgttcagtatgacggtgagtcaccaggggcattccccgtggcggcacaagtaggactaggtgtgggcacgtcactactggctctgggagtgattatcatcgtgctaatgtaccggcggaagtctaagcaagccctccgagactacaagaaagtccaaattcagctagagaacctggagagcagtgtgagagatagatgtaaaaaggagttcacagatttaatgaccgaaatgactgacctcacgtccgatttactgggctcggggataccgtttctggactataaggtttacgcggagaggatctttttcccgggacatcgggaatctccactccatagggacctgggggtgcctgagtcgcggagacccacagtggagcaaggtctggggcagctgtccaacctcctgaactccaaactgttcctaaccaagtttatccatacgctcgagtcacagcgcacattttccgcccgggacagagcctatgttgcgtccttgctgaccgtagctctccacggcaagttagagtactttaccgacatactgagaacactgctttcagacctcgttgcacagtatgtagccaagaacccgaagttaatgctccgacgaacagaaaccgttgttgagaagctgctcaccaattggatgagcatttgcctgtacacatttgtgcgggactccgtaggcgaacctctctatatgttgtttcgaggtatcaagcaccaagttgataaagggccagtggattcagtcacagggaaggccaaatacacccttaacgacaataggcttctgagagaggacgtagaatatagacccctgaccctcaatgcccttttagctgtgggtcccggggcgggcgaggctcagggagtgcctgtgaaagtgctggattgtgacacaatctcacaggccaaagagaaaatgctcgatcagttatataagggcgtccccttgacacaaaggcccgatccgcggacactcgatgtggagtggcgctctggtgtcgcaggacacctcatcctgagcgatgaggatgtcacctccgaggtccagggtttgtggcgtaggctaaatactctacagcattataaggtcccagatggagcaacagtcgcccttgtgccctgcctaacaaagcatgtcctgagggagaaccaggattacgttcccggcgaaaggactcctatgttggaggatgtcgatgagggtggcatcagaccttggcatcttgtaaagccatccgacgagcctgaaccgcctcgacctcgccggggaagcctccgaggcggggaaagggagcgggccaaagcaatcccggagatctacctcacccgtcttctgagcatgaaaggtactttgcagaagttcgtggacgacctctttcaggtgatcctatccacctcccggccggtgcctctggccgtaaagtatttctttgacttactggatgaacaggcgcagcaacacggcatcagcgatcaagacacaatccacatttggaaaacgaatagcctgccactgaggttctggatcaacatcattaaaaacccccagttcgttttcgacgttcagacctcagacaatatggatgcagtactgttggttatcgctcaaacattcatggacgcctgcaccctggctgaccataaactgggacgggattcacctataaacaaattgctctatgccagagatatcccacgctataaacgcatggtcgagagatactatgcagatatcaggcagactgttccagcctcagaccaagagatgaacagcgtgctcgccgagcttagttggaactactctggagatctgggtgctcgagtggctctgcacgagctgtacaaatacataaacaagtactacgaccagattatcactgctttggaggaggacggcaccgcccagaagatgcaattgggttaccggttacagcagatagccgcagcagtcgaaaacaaggttaccgacctgtag

SEQ ID NO: 8998 - DNA, 390 bp, synthetic construct
  misc_feature 1..390: note = source = /note="Description of Artificial Sequence: Synthetic coding sequence"
  source 1..390: mol_type = other DNA
atgcggcccctgaagcccggcgcccccctgcccgccctgttcctgctagcacttgccctgagccctcacggcgctcatgggcgcccgaggggaaggagaggcgcccgggtgacggacaaggagccaaagccgcttctgtttcttcccgccgcaggagccggccggactcccagcggctccaggtctgcagaaatttttccaagagactcgaacctgaaagacaagtttataaagcacttcaccggccccgtgacattttctcctgaatgttccaaacacttccatcggctgtactataacacgcgagagtgcagtacccctgcctattataaacgctgtgccagactgttaactcggctggccgtaagccctttatgctcgcagacttag

SEQ ID NO: 8999 - DNA, 252 bp, synthetic construct
  misc_feature 1..252: note = source = /note="Description of Artificial Sequence: Synthetic coding sequence"
  source 1..252: mol_type = other DNA
atgcggctgagcgtgtgcctgctgatggtgagcctggccctgtgctgctaccaggcccacgccctagtatgccccgctgttgctagtgagattacggtgttccttttcttaagcgatgccgcagtgaacctgcaggtggctaagctgaatccaccaccagaggcccttgccgctaaactggaagtcaagcattgtactgaccagatctcttttaaaaaaagattgtctctcaagaagagttggtggaaatag

SEQ ID NO: 9000 - DNA, 1455 bp, synthetic construct
  misc_feature 1..1455: note = source = /note="Description of Artificial Sequence: Synthetic coding sequence"
  source 1..1455: mol_type = other DNA
atgtggtacgtgagcacccggggcgtggccccccgggtgaacttcgagggagcattattttcaggctatgccccagacggcgggctcttcatgccggaagaattgcctcagctggatcgagggaccctgtgccagtggagtactctttcatacccaggcttggttaaggaactttgtgcactgttcatagggtcagaactattacctaaggatgaactgaacgacctgattgaccgggcctttagcagatttaggcaccgcgaagtagtccacctcagtcgacttaggaacggactcaacgtcctggaattatggcacggggtgacctacgccttcaaggacttgtcacttagctgtactacgcagttcctccaatattttcttgaaaaaagggagaagcatgtcacagttgtggtcggaacaagtggggatacaggcagcgcagcaatcgagagcgtccagggggctaagaatatggacattatcgtcctccttccaaaaggccattgtacaaaaatccaagagttgcagatgaccaccgtcctgaagcagaacgtccatgtgttcggcgtggagggtaacagcgatgagctggacgagcccattaaaacagtgttcgccgacgtggctttcgtcaagaagcacaacctgatgagtctcaacagcatcaactggagtcgggtgctggtgcagatggctcatcacttcttcgcttacttccagtgtactccatcgctggacacacatccgttgccgctcgtggaagtcgtcgttccgaccggcgccgccggaaatctcgccgctgggtatattgcgcagaaaatcggtctgcccattcgcctcgtggtggccgtcaaccggaacgacataattcaccgcacagtgcaacagggtgacttttccttgagcgaggcagtgaaatccactctggcatcagccatggacatccaggtgccttacaatatggagagagtcttctggctcctctctggcagtgattcccaagtcaccagggcactgatggagcagttcgagcgcactcagtctgtgaatctgcccaaggaattacacagtaaattaagtgaggccgttaccagcgtttcagtgagcgatgaggccatcactcagacaatgggaagatgttgggatgaaaatcagtacctgctttgtccccactcagccgtggcagtgaactatcactaccagcagatcgatagacagcagccttcaacaccccgctgctgccttgcccccgcaagcgctgctaagttcccagaggccgtgctggctgcaggcctaacaccagagaccccagccgagatcgtggccctggagcacaaggagacccgctgtacactcatgagaagaggcgacaactggatgctcatgctgcgggacacaattgaggacctctcacgtcaatggcgtagccatgcgctgaatacctcacagtag

SEQ ID NO: 9001 - DNA, 159 bp, synthetic construct
  misc_feature 1..159: note = source = /note="Description of Artificial Sequence: Synthetic coding sequence"
  source 1..159: mol_type = other DNA
atgaagctgtgcgtgaccgtgctgagcctgctggtgctggtggccgccttctgtagtctggcgctcagtgcgccttccaataagcccctcgaggcgagcaaaagtgcactgactcctgttagcccagggagtcgatctacttgcatgacatggaactag

SEQ ID NO: 9002 - DNA, 675 bp, synthetic construct
  misc_feature 1..675: note = source = /note="Description of Artificial Sequence: Synthetic coding sequence"
  source 1..675: mol_type = other DNA
atgcgggtgagcggcgtgctgcggctgctggccctgatcttcgccattgtgacaacctggatgttcatacgctcttatatgagcttctctatgaagactatcagactgccgaggtggctcgcagcatccccaacaaaagagatccaggttaagaagtataaatgtggtcttatcaagccctgtcccgccaactactttgcatttaaaatctgtagtggcgctgcaaatgtggtagggcctacgatgtgctttgaggacaggatgatcatgagccccgtcaagaacaatgtagggagaggactgaatatcgctttagtaaacgggacgaccggcgccgtgctaggacagaaagcatttgacatgtatagcggggacgtaatgcatctggtgaagtttttaaaagaaatccctggtggagccctagtcctagttgcctcatatgatgatcctggaactaaaatgaatgatgagtccagaaaactgttttctgatttgggatcctcttatgccaaacaattagggttccgcgatagttgggtgttcataggcgcaaaagatctgcgtggcaagtctccctttgaacaatttctaaagaattcccccgatacaaataagtacgaagggtggccagagctattagaaatggaagggtgcatgcctccaaagcccttttag

SEQ ID NO: 9003 - DNA, 1404 bp, synthetic construct
  misc_feature 1..1404: note = source = /note="Description of Artificial Sequence: Synthetic coding sequence"
  source 1..1404: mol_type = other DNA
atgctgatcttctggaccatcaccctgttcctgctgggcgccgccaaaggcaaggaggtctgttacgaagacctaggctgtttttccgatactgagccctggggagggactgctattagacccctgaagatcctgccttggtccccggagaaaattggaacacgttttctcctgtacactaatgaaaatccaaacaattttcagatcctcctcctttccgatcccagtacaatcgaggcttcgaacttccaaatggacaggaagacccgcttcataatccacggcttcattgataagggagacgagtcttgggtgactgatatgtgcaagaagttgtttgaagtcgaagaagttaactgtatttgcgtggattggaagaaagggtctcaggcaacctacacacaggccgctaataatgtaagagtggtgggggcacaagtcgcccagatgctggatatattgttgaccgagtattcttacccccccagcaaggtccacctgattggacatagtctgggggctcacgtggctggagaagccggcagcaagactcccgggctgtcgcggatcacaggccttgatccggttgaggcgtcatttgagagcactcctgaagaggtgagattggacccaagcgatgcagactttgtcgatgtcattcatacagatgccgccccactgatcccatttctgggcttcggaaccaaccagcagatggggcaccttgattttttccctaacggcggagagtctatgcctggctgcaaaaaaaatgccctcagccagatcgtggatctggacggaatctgggccggtacaagagacttcgtggcttgcaaccatctgcggtcctacaagtactacctagagagcatactcaaccctgacggatttgctgcctatccctgcacaagctacaaaagcttcgagtccgataaatgcttcccctgtcctgatcaggggtgtcctcagatggggcactatgctgataaattcgccggtcgcacttccgaagaacagcagaagtttttcctgaacaccggagaggcttctaactttgcaagatggaggtacggcgtgtccatcaccttatcgggtcggaccgccacaggacaaatcaaagtcgctttatttggaaacaaaggtaatacacatcagtactctatattcagaggtattctcaagcccggatctacccacagctatgagttcgacgcgaagctcgacgtgggcaccatagaaaaggtcaaattcctctggaacaacaatgtgatcaatcctaccctgcccaaagttggtgctacaaagatcaccgtccagaaaggggaagagaagaccgtctataacttttgtagcgaggataccgtgcgcgaagatactctgctgacactgacgccctgttag

SEQ ID NO: 9004 - DNA, 237 bp, synthetic construct
  misc_feature 1..237: note = source = /note="Description of Artificial Sequence: Synthetic coding sequence"
  source 1..237: mol_type = other DNA
atgggcagcggcctgcccctggtgctgctgctgaccctgctgggcagctcccatgggacaggtcccggcatgaccctacagctgaaattgaaagagtctttcctcaccaattcttcctatgaaagcagtttcttagagctgctggagaagctgtgcctgcttctccatcttccatcaggcacgtccgtgactctacatcatgctaggagtcagcatcacgttgtgtgtaatacctag

SEQ ID NO: 9005 - DNA, 291 bp, synthetic construct
  misc_feature 1..291: note = source = /note="Description of Artificial Sequence: Synthetic coding sequence"
  source 1..291: mol_type = other DNA
atggagcacaaggaggtggtgctgctgctgctgctgttcctgaagtccggccagggggaacccttagatgactacgtgaacactcagggtcctagcctgttttctgtgaccaaaaagcagcttggcgctggctcaagagaggaatgcgcggccaaatgcgaagaggacaaggagtttacgtgccgcgcttttcagtatcactccaaagagcaacaatgcgtaattatggcggagaataggaagtcttccattataattcggatgcgagatgcggtgttgttcgaaaaatag

SEQ ID NO: 9006 - DNA, 1083 bp, synthetic construct
  misc_feature 1..1083: note = source = /note="Description of Artificial Sequence: Synthetic coding sequence"
  source 1..1083: mol_type = other DNA
atgggcctgctgctgctggtgcccctgctgctgctgcccggcagctacgggctgccgttttacaatgggttctattacagcaatagcgctaacgatcagaatctggggaacggtcacggaaaagacctgctgaatggcgtgaagctcgtggtggaaacacctgaggagaccctgtttacctatcagggagcctccgtcatccttccctgccgttatcgctatgagcccgccctggtatccccacgacgcgtgagggtcaagtggtggaaactgagtgagaacggggcccccgaaaaggatgtgctggtggctatcggattaaggcataggagctttggagactatcaaggcagagttcacctccggcaagacaaagaacatgatgtgagcctcgaaatccaagatctgcgcctagaggattacgggcggtacaggtgtgaggtgatcgatggccttgaggatgaaagtggactggtcgagctggaactgcgcggcgtagtgttcccttaccaatccccaaatgggagatatcagtttaatttccacgagggccaacaggtgtgcgccgagcaagccgccgtcgtcgcctccttcgaacagctgtttagagcctgggaagaggggctcgactggtgtaacgcaggctggctgcaggatgccaccgtgcagtacccaattatgttgccccgccagccttgcggagggcccggactggctcccggggtgagatcatatggaccacggcaccgccgcctgcaccggtacgacgtgttctgctttgcaactgcactcaagggtcgtgtttattatctggagcatccagaaaaactgacactgaccgaggcccgggaagcctgtcaggaggatgacgctaccatagcgaaggtgggtcaactctttgcagcctggaaattccatgggctcgatcgttgtgacgccggttggttggctgatggatctgtgaggtaccctgttgtgcacccacatcctaactgtggccctccagagcccggagtaagatctttcggcttcccggaccctcaaagtcgattgtacggggtgtactgctaccgacagcattag

SEQ ID NO: 9007 - DNA, 810 bp, synthetic construct
  misc_feature 1..810: note = source = /note="Description of Artificial Sequence: Synthetic coding sequence"
  source 1..810: mol_type = other DNA
atgatccggaccctgctgctgagcaccctggtggccggcgccctgtcctgtggggatcctacttaccccccttatgtgacgagggtggtggggggcgaggaagcgcgtcctaatagttggccatggcaggttagcctgcaatacagttccaacgggaaatggtatcacacatgcggaggctcacttattgcaaacagctgggtcttgactgccgctcattgcatatctagcagcagaacctatcgcgtcggacttgggcggcataacttgtacgtggccgaatcggggagtttggccgtttcagtcagcaagattgtggtgcataaggactggaattctaaccagatttcgaaaggcaatgatatagctctcctgaaacttgcgaatccggtgagcttgactgacaaaatccaattggcgtgtctgccccccgctgggaccattctgcccaacaactacccctgctacgtaactggatggggtcgactacagacaaacggcgccgtccctgatgtgctgcagcaaggcaggttgctggttgtcgactatgcaacctgttcaagcagcgcgtggtggggtagttctgtgaaaacctccatgatctgcgcaggcggagatggagttatctcctcatgtaatggcgacagtgggggcccactaaattgccaggcgtctgatgggcgttggcaggtgcacggaatcgtttctttcggtagcaggctcggctgcaactactaccataagcctagcgttttcacaagagtgtccaactacatcgactggattaattctgtcatcgccaacaactag

SEQ ID NO: 9008 - DNA, 1122 bp, synthetic construct
  misc_feature 1..1122: note = source = /note="Description of Artificial Sequence: Synthetic coding sequence"
  source 1..1122: mol_type = other DNA
atgctgccctggctgctggtgttcagcgccctgggcatccaggcctggggtgactcctcctggaataagacccaggctaagcaagtgtccgaggggttgcagtatttgtttgaaaacatctcacaattgacagagaaaggtttgccgaccgatgtcagtactactgtctcccggaaggcgtggggagctgaggccgtggggtgttccatccaactcaccaccccagtcaatgtgctggttatccaccatgtgccgggactagagtgccacgatcagaccgtatgtagtcaacggttacgggaattgcaggcacatcacgttcacaacaattctggctgtgacgtggcgtacaattttctcgtgggagatgacgggagagtgtatgaaggggtgggctggaatatccaaggagtgcacacacaaggttacaataatattagtctaggtttcgccttcttcgggacaaagaaaggtcatagcccctcccctgcagccctgtccgccatggagaacttaataacatacgcagtgcaaaagggacacctaagcagcagctacgtgcagccactgctgggtaagggcgagaactgcctggctccacgacagaagacttcattgaaaaaagcctgccccggtgtcgtgccacggtcagtgtggggtgctcgtgagacgcactgtcctagaatgaccctgccggcgaagtacggcatcataattcatacagccggacgcacctgcaacatttcagacgagtgcagattattggtcagagacattcaatcattttacattgaccgcctaaaatcgtgcgacattggatataacttcctagtgggccaggacggggccatttacgagggggtggggtggaacgtgcagggctccagcacccccgggtatgacgatattgcattggggattactttcatgggaacatttacagggataccaccaaacgccgcagccctggaagccgctcaggatctcatccagtgcgctatggtgaagggctatttgacccctaactacctactggtggggcacagtgatgtggcccggaccctctcacccgggcaggctttatataatatcatctctacttggccacactttaagcattag

SEQ ID NO: 9009 - DNA, 327 bp, synthetic construct
  misc_feature 1..327: note = source = /note="Description of Artificial Sequence: Synthetic coding sequence"
  source 1..327: mol_type = other DNA
atgcggcagcggctgctgcccagcgtgaccagcctgctgctggtggcactcctctttccaggatcatctcaagccagacacgtcaaccactccgcaactgaggctctcggcgagctgagggaaagggccccagggcagggcaccaatggattccaattacttagacatgccgtgaagagggatctattacccccaagaactccaccataccagggggacgtgcctccaggtatacgaaatacaatttgccacatgcagcaaggcatctgtagacttttcttttgtcattccggcacagggcagcaacatcgacaaagatgcggctag

SEQ ID NO: 9010 - DNA, 708 bp, synthetic construct
  misc_feature 1..708: note = source = /note="Description of Artificial Sequence: Synthetic coding sequence"
  source 1..708: mol_type = other DNA
atgagcccccccctgctgaagctgggcgccgtgctgagcaccatggcgatgatctcgaactggatgtcccagaccctgcccagtctcgtgggcctcaataccactagactttcgacacccgacaccctgacccaaatctcaccaaaggaggggtggcaggtatactctagtgcacaggaccccgacggccgctgcatctgtactgtggtcgcacccgagcagaacttgtgctctcgggatgccaagagccgtcagctcagacagttattagagaaggttcagaacatgagccaaagtatagaggtgctcaaccttcgtacacaaagagatttccagtatgtgttaaaaatggaaacccaaatgaaaggactcaaggcaaaattccgacagatcgaggacgacagaaagactctaatgacgaaacacttccaagaactcaaggagaaaatggatgagctactgcccctgataccagtgttggagcagtataaaacagacgctaaactgataactcagttcaaagaagaaatacggaatttgtccgccgtgctaactggaattcaggaggaaatcggagcttatgactacgaggagctgcatcagcgggtcctgagcctggagacccggctgcgagactgtatgaaaaaacttattgacctcaagaagaggaaagaagaagagaagagacagcaaaaaggcgaagcttag

SEQ ID NO: 9011 - DNA, 606 bp, synthetic construct
  misc_feature 1..606: note = source = /note="Description of Artificial Sequence: Synthetic coding sequence"
  source 1..606: mol_type = other DNA
atgaacctgaactgccccccctgcgtgaccggcctgcgggtgtggagctcatgtcgctcaaagccaaatagccgcgcccgctcttgccggagttgtacaggcgcttcaagaaccctgccttcgcatcacatgtctcacgtagagtgtccatctggaatcgtgaacgaggagaactttaagcagatctatagccaatttttcccacagggtgattcatccacttacgccacctttttgttcaatgccttcgataccaaccacgacggttcagtgagcttcgaggactttgtggctggtctgagcgtcatcctgcgtggcacggtagacgatagacttaattgggccttcaatctttacgatcttaataaggatggctgtatcacaaaggaggagatgctggatatcatgaaaagtatctatgacatgatgggcaaatatacataccccgctctaagagaggaagctcctcgggagcacgtcgagagctttttccagaaaatggacaggaataaagacggagttgttaccatcgaggagtttattgagagctgtcagaaggatgagaatattatgagatcaatgcaactcttcgacaacgtaatctag

SEQ ID NO: 9012 - DNA, 693 bp, synthetic construct
  misc_feature 1..693: note = source = /note="Description of Artificial Sequence: Synthetic coding sequence"
  source 1..693: mol_type = other DNA
atgcggctggccggccccctgcggatcgtggtgctggtggtgagcgtaggagttacgtggattgtggtcagcattttgctgggaggtccagggtccgggtttcctaggatacagcagttgttcacttcaccggaaagctctgtgaccgccgccccacgtgcccgcaagtataagtgtggattacctcaaccttgtccagaagaacacctggcatttcgcgtggtaagtggggccgcaaacgtcattggccccaaaatctgcctggaggataaaatgttaatgtccagtgtgaaggacaacgtaggaaggggattaaacattgccttagtcaacggggttagcggagaacttattgaggcccgtgcattcgatatgtgggcaggcgatgttaacgatttgctgaaattcataaggccacttcatgaaggaaccttagtgttcgtggccagctatgatgaccccgcaaccaagatgaatgaagagacacggaagctgttctctgagctggggagtcggaatgccaaggagttggcctttcgtgactcctgggtgttcgtcggcgccaaaggagtgcagaataaaagcccctttgagcagcacgtgaagaatagcaagcacagcaacaagtacgaaggctggcccgaggctcttgagatggagggctgtataccccggcgatctaccgcttcatag

SEQ ID NO: 9013 - DNA, 684 bp, synthetic construct
  misc_feature 1..684: note = source = /note="Description of Artificial Sequence: Synthetic coding sequence"
  source 1..684: mol_type = other DNA
atgcgggtggccggcgccgccaagctggtggtggccgtggccgtgttcctgctgacattttatgttatcagccaggtgtttgagattaagatggacgcttccctgggaaatctgttcgcaaggagcgccctcgatactgccgcccgctctacaaaacccccccgctacaaatgcggtatttcaaaagcctgccccgagaagcattttgccttcaagatggcatccggggcggcgaacgtcgtgggaccaaagatctgcctcgaagataacgtactaatgagtggagttaagaataatgtggggcgcgggattaacgtggcactggcgaatggaaagacaggggaggttctggacaccaaatactttgacatgtgggggggcgacgtggccccttttattgaattccttaaagccattcaagatgggaccatcgtcctaatggggacctatgacgacggcgccacaaagcttaatgatgaggctaggagactgatcgccgatctcggatctacaagcattacaaatctgggattccgggataattgggtgttctgcggtggcaaaggcatcaagacaaaatctccattcgaacagcatatcaaaaacaataaagatactaataaatatgaagggtggcctgaggtggtcgagatggaaggttgcattccgcagaaacaggattag

SEQ ID NO: 9014 - DNA, 1656 bp, synthetic construct
  misc_feature 1..1656: note = source = /note="Description of Artificial Sequence: Synthetic coding sequence"
  source 1..1656: mol_type = other DNA
atggaggacagcgacagcgccgccaagcagctgggcctggccgaggcagccgcggcagggggcgaagccgaagagccagttcttagtcgggacgaggattccgaggaggatgctgattcagaagcagagagggaaacccctcgtgtcaccgccgttgcggtcatggcggccgagcccgggcatatggatatgggagctgaggcactgccaggtcctgatgaagccgcggcagccgcggcgttcgccgaggtgacaactgttaccgtcgccaacgtgggggcagcagccgacaatgtgttcaccacttcagtggctaatgcagcctctatttcaggacacgtgctcagtggccgcacggcgctgcagattggtgattcgctgaacactgaaaaagctaccctcattgttgttcacaccgatgggtcgatagtcgaaactacgggtcttaagggacctgcagccccgctgacacccgggccacagtccccacccaccccgctggcccccggacaggagaaaggaggcactaagtacaattgggatccaagcgtctacgatagtgaattaccagtccggtgtcggaatatctctggcacactgtacaagaacaggctaggcagtggtggtcgaggcagatgcatcaaacagggagagaactggtactctccaactgaattcgaagctatggcaggtcgtgccagttcgaaggactggaagaggtctatccggtacgccggacgaccactccagtgtttgattcaggacggaattttgaacccccacgccgcttcttgtacctgtgcggcatgctgtgatgacatgacactcagtggccccgtaagactgtttgttccctacaagcgccggaaaaaggaaaatgaacttcccacaacacccgttaagaaggattctcccaaaaatatcacactgctaccagccacggccgctactacttttaccgttactccaagcgggcagatcaccacgtccggagcactgacttttgatcgagccagtacagttgaagctaccgcagttataagcgaaagccccgcccagggagatgtgtttgccggtgccacggtgcaggaggcctctgtccagcccccctgccgcgcttcgcatcctgagccccattaccctggatatcaggactcgtgccagatcgcacctttcccagaggccgctctgcctactagccaccccaagatcgtgctgaccagtctgcctgccctggccgtccccccccctacaccgacaaaggctgctcctcctgcactcgtcaacgggctcgaactatccgagcctcgttcctggctttacttggaagaaatggttaatagccttctgaatacagcacagcagttgaaaacacttttcgagcaggcaaagcatgctagcacctacagagaagcggctacaaatcaagcaaaaatccacgctgatgccgagagaaaagagcagtcttgtgttaattgcgggcgagaagcgatgtctgaatgtactgggtgccacaaggttaattactgctccacattctgccaacggaaggactggaaggatcaccagcacatctgcggccagtcagccgcggtgaccgtgcaggcggacgaggtgcacgtggccgagtctgttatggagaaggttaccgtttag

SEQ ID NO: 9015 - DNA, 2022 bp, synthetic construct
  misc_feature 1..2022: note = source = /note="Description of Artificial Sequence: Synthetic coding sequence"
  source 1..2022: mol_type = other DNA
atgaagcccggcggcttctggctgcacctgaccctgctgggcgcctctctcccagcggctctgggttggatggacccaggaactagccgggggcccgacgtcggcgtgggagaatctcaggctgaagagcccaggagttttgaggtgacccgtcgagaaggactgtcctcgcataatgagctgctcgcttcttgtggaaaaaaattctgtagcaggggctcaagatgtgttcttagcctggcccccgaggatagggtttccgtgaccacagtcaccgtcggtttatcaaccgtgttgacctgtgcagtgcatggagacctacgaccccctatcatttggaagcggaatggattgactcttaactttcttgacttggaagatattaacgacttcggcgaggatgacagcctctacatcaccaaagtgacaacgattcacatggggaattatacttgccatgcttctggtcatgaacaattattccagacccatgtgttgcaggtgaatgtcccaccggttatcagggtttacccagaatcccaggcccaagaacccggcgtcgctgcgagcctgaggtgccatgccgaagggatccctatgccccggataacttggctcaaaaatggggtcgacgtgtccactcaaatgtctaaacagttgagcttgctggctaatggttcagagttacatatttcatcagtgcgctatgaggatactggcgcttacacatgtattgctaaaaacgaggttggcgtggacgaagacattagctcactgtttatcgaagattctgcgcgtaaaactttagcaaatatcctgtggcgggaggaggggctctccgtgggaaatatgttttacgttttttcagacgacggcatcatcgtgatacaccccgtcgattgtgagatccagcggcacctgaaacctaccgagaagatcttcatgtcttatgaggaaatctgccctcagcgtgagaagaacgcgactcagccatgccaatgggtgtctgccgtgaacgtaaggaatcgatatatctatgtggcacaacctgctctttccagggtcctggtggtggatatccaggctcagaaggttctgcaatccatcggtgtcgaccccctgcccgccaaattatcctacgacaaatcacacgatcaggtctgggtactgagttggggtgacgtccacaaaagcagaccctccttgcaggtcattaccgaggcatctaccggtcagtctcagcatctgatcagaactcctttcgccggggttgacgatttcttcataccacccacaaacttaatcatcaaccacatcaggtttggcttcattttcaacaagtctgacccggccgtgcacaaggtcgatttggaaacaatgatgcccctcaaaaccatcggattacatcaccatggctgcgtgcctcaggccatggcacacacccatttgggaggatattttttcatccagtgccgccaggattctcccgcttcagccgctcgccagctcctggtggactctgtcactgattccgtgctggggccaaatggggatgtcaccggaaccccccataccagtcctgatggtcggttcatagtttcagctgcggcagattcaccgtggctgcatgtccaggaaatcacagtgcggggcgaaatccagaccctgtatgacctgcagattaacagcggcatatctgacttggcgtttcaaagatccttcaccgaatctaatcagtataatatttatgccgcactgcataccgaacccgatctccttttcctggagctctcaaccgggaaagtgggcatgcttaagaaccttaaagagccacctgcaggacctgcccaaccctggggtgggacacatcggatcatgcgagacagcggcctgttcggtcagtacttgctaactcctgctcgggaaagtctgtttctgattaatggtcggcagaatacgttgaggtgcgaggtgagtgggatcaaaggtggcacaaccgtggtttgggttggagaggtgtag

SEQ ID NO: 9016 - DNA, 2007 bp, synthetic construct
  misc_feature 1..2007: note = source = /note="Description of Artificial Sequence: Synthetic coding sequence"
  source 1..2007: mol_type = other DNA
atggacctggtgctgaagcggtgcctgctgcacctggccgtgatcggggccttgctggcagttggcgctactaaggtgccccgcaatcaggattggctgggcgtctctcggcagttacggactaaggcttggaaccgacagctttaccctgagtggaccgaggctcagcgcttggattgctggagaggcggccaggtgagcctgaaggtgtccaatgatggcccaacactcatcggtgccaatgcctccttttccattgcactcaattttcctgggtcccagaaggtcttacctgacgggcaggtaatttgggtgaacaatacgatcattaacggagatcaggtgtggggcggccagcccgtgtacccccaggagacagatgacgcttgtatatttccagatggaggtccctgcccatcagggagctggtcgcagaagcgtagcttcgtgtatgtgtggaagacttgggggcaatactggcaggtacttgggggccctgtctcaggactttcgattggaactgggagggccatgcttgggacccacacaatggaggtaacggtttatcacagacgcggatcccgcagttacgttccattggcacatagctcctccgcctttactattaccgaccaggtgccattttcagtatctgtgagccagctaagagctctggacggggggaacaaacactttctgcgaaatcagcccctcacctttgcactccagctgcatgatccaagcgggtatctggccgaggcagacctgagctatacctgggatttcggcgattctagcgggaccctgatctcaagggccctggtagttacccacacctacctcgaacccggacctgtgaccgcacaggttgtcctgcaggccgctattccactcacaagctgcggatcaagtccggttcctggcaccactgatggtcatagacctacagcagaagctcctaatacaaccgccgggcaggtgcctacaacggaagttgtgggtactaccccaggtcaggctccaacagctgaacctagcggaaccacttccgtacaggtgccaactactgaagtgatatccaccgcgcccgtccagatgccaaccgccgagtctaccgggatgacaccagaaaaggtacccgtgtcggaagtgatggggacaaccctggctgaaatgtctaccccagaggccaccgggatgactccagctgaagtaagcatcgtggtgctatcggggaccaccgccgcacaagtgaccacaacagaatgggtagaaaccacagcacgcgagctgccgatcccggaaccagagggccccgatgccagcagtatcatgagcacagagtccattacaggctcgttaggccccctgttagacggcactgccactctgcggctagtcaagcggcaggtgccactggactgcgttctctaccgctacggctcattcagcgtcactctggatatagtgcagggcatcgagtccgccgagattctacaggccgtgcctagcggtgagggtgatgcctttgaactaaccgtgtcttgccaaggggggcttccaaaagaagcatgcatggaaatcagttcgccaggatgtcagcctcccgcccaacggctttgccagcctgtattgccatcaccagcatgccagctggtgctgcaccagattcttaaaggcggatccgggacttactgcctgaatgtatccctggcggacacgaactccctagccgtggtctctacacagttaatcatgcccgtgcccggtatcctgctgaccgggcaggaggcaggtctcggacaagtaccactgattgtgggcattctgttggtgcttatggcagttgtcctggcttcactaatctatcgccgacgactcatgaaacaggacttctcagtaccgcagttaccacactctagtagccattggttgcgactcccccgtatattctgtagttgtccgatcggtgaaaactctccgctgctgtctgggcagcaggtctag

SEQ ID NO: 9017 - DNA, 1746 bp, synthetic construct
  misc_feature 1..1746: note = source = /note="Description of Artificial Sequence: Synthetic coding sequence"
  source 1..1746: mol_type = other DNA
atgcagcaggacggcctgggcgtgggcacccggaacggcagcggcaaagggcggagcgtgcacccctcttggccatggtgtgcgccccggcctttaagatacttcgggagagatgctagagcgcggcgcgcccagacagcggctatggctctacttgctggcggattgagtagagggctgggcagtcaccccgcagccgccggccgcgatgctgtagtatttgtttggttacttcttagcacttggtgcacagccccagctagggctatccaggtcacagtgtccaatccttaccacgtcgtgattctgttccagccagttacactcccgtgtacttatcagatgacaagtacgccgacccagcccatcgttatttggaagtacaagagtttctgtagggaccggattgccgatgcgttttctccagcttccgtggacaatcagctgaacgcccagctggccgccggtaatcctggctacaatccttacgtcgagtgccaggactctgtgagaacggttagggtggtagctaccaaacagggcaatgccgtcacgttaggagattactatcagggaaggaggatcacaataactgggaacgccgatttgacatttgatcaaaccgcctggggagacagcggtgtatactattgttccgtggtgtccgctcaagatttgcagggtaataatgaagcctatgcagagctgatcgtgctagtctacgccgctggtaaggccgccacttctggagtcccatccatatacgccccctctacctacgcacatctgtcgcctgcgaaaacccccccccctccagctatgattccaatgggtcctgcttataacggatatccgggcggctaccctggcgacgtggatcggtcttcttcggcgggaggccagggtagttatgtcccgctgttaagggacacagattcgtccgtcgcgtcagaggttcggtccggataccgaattcaggcctcacagcaggatgactcgatgcgagtgctgtactatatggaaaaggaactggctaattttgacccttctcgcccggggccacccagtggtagggtggaacgagcgatgagcgaggtgactagcctgcatgaggacgactggcgtagccgcccaagtcgtggaccagccctgacacctatccgcgatgaggagtgggggggccatagtccacgttcccccaggggttgggatcaggaacctgccagggagcaagctggcggcgggtggagagctcgcaggccccgcgctcgctctgtagatgcactggacgacctgactccacccagcacggctgaatctggcagtaggtctcctacaagcaatggtggcaggtctagggcttatatgccacctagatctaggtcccgggacgatctgtacgaccaagacgattctcgcgactttccccggagccgggatccacactacgatgactttaggtcaagagaacgaccccctgctgatcctcggagccaccatcatcgaactcgcgacccccgcgataatgggagccgctctggggacctcccttacgacgggcgcctgctggaggaagccgtgcgcaagaagggaagtgaggagcgccggcggccacataaagaggaggaggaggaagcctattacccccccgctccaccaccctatagtgagaccgactcccaagcatcccgtgaacgacggttaaagaagaacctggccctctcccgcgaaagtcttgttgtgtag

SEQ ID NO: 9018 - DNA, 1959 bp, synthetic construct
  misc_feature 1..1959: note = source = /note="Description of Artificial Sequence: Synthetic coding sequence"
  source 1..1959: mol_type = other DNA
atgcccccccccctgcccctgctgctgctgaccgtgctggtggtggctgcagcccgcccgggctgtgagtttgagagaaacccagccggggagtgtcatcgcccccccgccgccgatagtgctacatgtgtagacctgcagctgcgcacttgttctgatgccgcctacaaccacaccacgttccccaacctattgcaacataggtcctgggaggtcgtggaggcatcatccgagtacattctgctttcagtgctgcaccagctgttagaaggccaatgcaaccccgacctgcgcctgcttggctgtgcagtgttggccccacgctgtgaagggggatgggtgcggcgtccttgtcggcatatctgtgagggattacgggaggtgtgtcagccggcttttgacgctatcgacatggcctggccatactttttagattgccaccggtatttcacaagggaggacgagggctgttacgaccctctggaaaagctcaggggaggcctcgaagctgatgaagcgcttcccagtgggttgcctccaactttcataagattttcccaccacagctacgctcagatggttcgggtcctgagacgcaccgcttcgagatgcgctcatgttgctcgaacttattccatcggaagaagttttgatgggcgggagctacttgtgatcgaatttagctccaggcccggccagcatgaattgatggagccagaggtcaagctgattggtaacattcacggtaacgaggtggccggccgagagatgttgatttatttagcacaatacctctgctcagagtatctactcggaaatcctagaatccaacggctccttaacacaacgcggattcatttgctaccatccatgaacccggatggatacgaggtcgcggccgcagaaggagctggatataatggatggacaagcgggcgtcaaaatgcccagaacctggatctgaaccgaaatttcccagatcttacgtccgagtattacagattggcagaaaccagaggtgccaggtcagaccatataccaattccccagcattattggtgggggaaagtcgctccagagacaaaagcaatcatgaagtggatgcagacgatcccattcgtcctgagtgcgtcactccatggcggcgacctggtcgtatcttaccctttcgatttctccaagcatccacaggaagaaaaaatgttctctccaactccggacgagaagatgttcaaactactgagtagggcatacgcagatgtacatcccatgatgatggatagatctgaaaatagatgtggcggtaatttcttaaaacgcgggtctatcatcaatggagcagattggtacagcttcactgggggaatgtctgatttcaattacttgcacacaaattgttttgagattacggtcgaactgggctgcgttaagttcccgcctgaggaagctttatatatattatggcaacataataaagaatccttactgaacttcgtggagaccgtgcatcgcggcatcaaaggggtggtcacagataagttcgggaagcctgtcaagaacgcacgcatcagcgttaaaggaattagacatgacataaccactgcccccgatggggactactggcgtctcctacctcctgggatacacatcgtgatcgcccaggctcctggatatgccaaagtgattaagaaagtgattatcccagccaggatgaaacgcgccggccgtgtggacttcattcttcagcccctcggaatggggccaaagaatttcattcacggcctcaggcgaacgggcccccatgaccccctgggtggtgcaagcagtctaggcgaagcgacagagcctgatcctttgcgagctcgccggcaaccatcagccgatggttccaagccttggtggtggtcctattttacaagcctgtctacacaccgtcctagatggctcctcaaatattag

SEQ ID NO: 9019 - DNA, 279 bp, synthetic construct
  misc_feature 1..279: note = source = /note="Description of Artificial Sequence: Synthetic coding sequence"
  source 1..279: mol_type = other DNA
atgaagctgtgcgtgaccgtgctgagcctgctggtgctggtggccgcattctgcagcttggccctcagtgctccgatgggaagtgacccacctactgcctgttgcttcagttacaccgcacgaaagttgccgagaaactttgttgtggattactacgagacttcctccctctgtagccagcctgcagtggtgggtttcttgggcaggaaaggcaaacaagtgtgcgccgatccatcggaatcctgggtgcaggagtacgtttacgatttggagctatag

SEQ ID NO: 9020 - DNA, 249 bp, synthetic construct
  misc_feature 1..249: note = source = /note="Description of Artificial Sequence: Synthetic coding sequence"
  source 1..249: mol_type = other DNA
atgcggcagcggctgctgcccagcgtgaccagcctgctgctggtggctctactcttccctgggagttctcaggctcgccacgtgaatcactcagcaaccgaagctctcggggagctaagggagcgggcacccgggcaagggacaaatgggtttcagttactcagacatgctgtgaaaagagatttgctcccaccaaggacaccaccctaccaagggacagggcagcaacatcgccagagatgtggttag

SEQ ID NO: 9021 - DNA, 411 bp, synthetic construct
  misc_feature 1..411: note = source = /note="Description of Artificial Sequence: Synthetic coding sequence"
  source 1..411: mol_type = other DNA
atggacaacgtgcagcccaagatcaagcaccggcccttctgcttctccgttaaaggacacgtgaaaatgcttcgccttgcactcaccgtgacaagcatgacttttttcataattgctcaggctcccgaaccttacatagttatcactgggtttgaggtaaccgtgatactcttttttatcttgctgtatgttctgcggctggatcgccttatgaaatggctgttctggccactgttagatattatcaacagcctggttactacggttttcatgctcattgtaagcgttttggcactgatacctgaaacaactacgctgacagttggaggcggcgtgttcgcgctcgtcaccgccgtgtgctgcctggctgatggggccctaatttaccgcaagctcctctttctgagatag

SEQ ID NO: 9022 - DNA, 1068 bp, synthetic construct
  misc_feature 1..1068: note = source = /note="Description of Artificial Sequence: Synthetic coding sequence"
  source 1..1068: mol_type = other DNA
atgcagctgaccacctgcctgcgggagaccctgttcaccggcgcctctcagaaaacatccctgtggtggttgggaatagcatcttttggcgtgcctgaaaaactgggatgcgccaacctacctctcaatagtagacagaaggaactctgcaagcggaaaccctatctcttaccatctattcgcgagggggccaggctcggcattcaggagtgtggctcacaatttagacatgagcgctggaactgcatgatcaccgctgccgcgactactgcaccgatgggggccagtccactgttcggctatgaactctcctccggaactaaagaaaccgcctttatatacgccgtgatggcagccgggctggttcattccgtcactcgatcttgctcagccgggaatatgacagagtgctcgtgtgataccaccctgcagaatggtgggtcagcttctgaggggtggcattggggagggtgtagcgacgatgtccagtacggcatgtggttttcaagaaaatttcttgactttcccatcggaaataccaccggcaaagagaataaggtcctgctggctatgaatctccacaacaatgaggccggcaggcaggccgttgcgaagctcatgtccgtagactgccggtgtcacggtgtgagcggctcgtgtgccgtgaagacctgctggaagacgatgtccagctttgagaaaatcgggcacttgctaaaggataagtatgagaacagcatacagatttcagataagaccaagcgcaagatgcgaagacgggagaaagaccaacgtaagatcccaattcataaggacgatctgctgtacgtcaacaaatcccccaactactgcgtagaagataaaaagctgggcatccctggaactcaaggacgcgagtgtaacagaacatctgaaggtgcggacgggtgtaacctgctctgttgcggtcgggggtacaatactcacgttgttcggcacgtggaaaggtgtgagtgtaagttcatctggtgctgctatgtaaggtgccgccggtgtgaatctatgacggatgttcacacctgtaaatag

SEQ ID NO: 9023 - DNA, 2916 bp, synthetic construct
  misc_feature 1..2916: note = source = /note="Description of Artificial Sequence: Synthetic coding sequence"
  source 1..2916: mol_type = other DNA
atgctgcggcggcccgcccccgccctggcccccgccgcccggctgctcttagcagggctgctatgcggtggcggggtttgggccgcacgggtgaataagcataagccctggctggagcccacctatcatgggatagtgaccgagaacgacaacactgtccttctcgatcctcctttgattgctctcgataaagacgcccctttgaggttcgccggcgaaatctgtggatttaaaattcacggtcagaacgtgcccttcgacgctgtggtcgtagacaagtcgacaggtgaaggagtaattcggagtaaggagaagctggactgcgagctgcagaaggattactcattcacaattcaggcatacgattgtggaaagggccccgatgggaccaatgtcaaaaagtctcacaaagctaccgtgcacattcaagttaatgatgttaatgagtacgcaccagtgttcaaggagaagtcatacaaggccaccgttatcgagggcaagcaatatgactccatactaagagttgaagccgtggacgccgactgcagtccgcaattctcccagatctgctcttacgaaattatcacccctgacgtaccttttaccgtcgataaagatggttatattaagaatacagagaaactgaattacggcaaagaacatcaatataagctgaccgtgaccgcttacgattgcgggaagaagcgagccacagaagacgtgctcgtcaaaataagcattaaaccaacttgcacaccagggtggcagggctggaataatagaatcgagtatgaacctggcacaggcgcactagctgtctttcccaacattcacctcgagacttgtgatgagcctgtagccagcgtgcaggccacagtggagcttgaaacgtcccacattggcaagggctgcgaccgagacacttactccgaaaagtctctccaccggctgtgcggggctgcagcaggaacagcagagctgctcccgtctcccagcgggtctctgaactggaccatggggctccccacagacaacggccacgactctgaccaggtatttgaatttaatggtactcaagctgtgaggatccctgatggcgtggtctctgtcagtccgaaagaaccgttcacaatctcggtgtggatgcgccacggaccctttggcagaaaaaaagaaaccatcctctgcagcagcgacaagacagacatgaatcggcaccattattctttatatgtgcacggctgccgtttaatctttttatttcgtcaggatccctccgaagaaaagaagtatcgccctgcggagtttcactggaagcttaaccaggtctgcgacgaggaatggcaccattatgtcctcaatgtggagttccctagcgtgacgctgtacgttgatggtacgtctcatgagcctttttctgtgacagaggactatcctctgcacccaagtaagatagagacccaactggtcgtcggggcctgctggcaggagttctccggcgtagaaaacgacaatgagactgaacccgtcactgttgccagcgcaggaggcgacctccacatgacccagttcttccgcggcaatctcgctggccttaccctgcgcagtggcaagttggctgacaagaaagtgatcgattgtctctacacatgcaaggagggtctggatctgcaggtgctcgaagacagtggtaggggcgtacagattcaagctcacccgtcacaactggtcctgactcttgagggagaggacttgggggaactggacaaggctatgcagcatatttcctatctcaacagtagacagttcccgacgcccggtatccggcgactgaaaatcacttccacgataaagtgcttcaatgaggccacttgcatttccgtgccccccgtggatggctacgtgatggtactgcagcccgaggagccaaagataagcctctccggagtgcaccactttgctagagctgcttccgagttcgagagcagcgaaggggtcttcctgtttcccgaactcaggatcattagcaccataaccagggaagtggagcctgagggagatggggcagaggatcccacggttcaggagagtctcgtgagtgaagaaattgtgcatgacctcgacacgtgtgaggtgaccgtggagggggaagagctgaaccacgaacaggaatcactggaggtagacatggcacggctccagcagaaaggaatcgaggtttcctcttctgaattgggcatgaccttcaccggggtcgacactatggcatcatacgaagaagtgctgcacttgttacggtataggaattggcatgcacggagcctccttgaccgcaagttcaagttgatctgcagcgagctgaatgggcggtatatttcgaatgagttcaaggtggaggtcaatgtcatccacaccgccaacccgatggagcatgccaatcacatggcagctcagccacaattcgttcatccagagcaccgatcattcgtggatttgtctggacataatttagctaatcctcacccctttgcggtggtgcctagcacagccacagtggtaatagtggtttgtgtatccttcctggtcttcatgattatcttaggagtcttccggatccgggccgcccaccggaggaccatgcgggatcaggacaccggaaaggagaacgagatggattgggacgactcagccctgacaatcactgtaaacccaatggaaacctacgaagaccagcacagcagcgaagaggaggaggaagaggaagaggaggaagagagtgaagatggtgaggaagaggatgatattacttctgccgagtcagaatccagtgaagaagaggagggtgagcagggagacccgcagaacgcaacccgccagcagcagctggagtgggatgactccacactgtcctactag

SEQ ID NO: 9024 - DNA, 564 bp, synthetic construct
  misc_feature 1..564: note = source = /note="Description of Artificial Sequence: Synthetic coding sequence"
  source 1..564: mol_type = other DNA
atggtggccgccaccgtggccgccgcctggctgctgctgtgggccgcagcctgtgcccagcaggagcaggatttctacgacttcaaggcagtgaatatccgcggaaagctggtgtcactggagaagtatcggggaagtgtgagtctagtagtgaacgtggcctcagagtgcgggtttactgatcagcactatagggcccttcaacagctgcagcgcgatctgggcccacaccactttaacgtcctcgcgttcccctgtaaccagtttggccagcaggaacccgatagcaataaggaaatcgagtccttcgctagaagaacctactcagtgtcattcccgatgtttagtaagatcgcagtgaccggaacgggcgcccacccggccttcaagtatctggctcagacttctggcaaagagccaacgtggaatttttggaagtacctggtcgcccccgatggtaaggtggtaggagcatgggatccaacagtgtctgtcgaggaggttaggccccagatcacggccctggtgagaaagcttatcttacttaagagggaagacctatag

SEQ ID NO: 9025 - DNA, 303 bp, synthetic construct
  misc_feature 1..303: note = source = /note="Description of Artificial Sequence: Synthetic coding sequence"
  source 1..303: mol_type = other DNA
atgtggggcttcctggtgctgaaggcccggtggctggtgacccccgttcgtacactcgcaaccgaggcaggacagaaaccttcattgcggggcctgcttgacgtaggcaacatccagcaccgagccgccagagcccgcggattaactcgcggggtcatccgagtaagccctcaggagcgctcacaacagaaccagtctgcacctaagggaccaactccctcgacaaggcccaagcccagaacactcggtccccaggcccacagcctggccctgcaatccgttgatttactgtttaggccatag

SEQ ID NO: 9026 - DNA, 2352 bp, synthetic construct
  misc_feature 1..2352: note = source = /note="Description of Artificial Sequence: Synthetic coding sequence"
  source 1..2352: mol_type = other DNA
atgcggtggcagtgcggcacccggttccggggcctgcggcccgccgttgccccttggacggcccttcttgctctggggctccctgggtgggtgctcgccgtgtccgcaacggcggcagcggtggtccccgagcagcacgcatctgtcgcaggacagcaccccctcgactggctgctgaccgatcgcggaccatttcatagggcccaggaatacgcagattttatggaaagataccggcaggggtttactacacggtatcggatctaccgcgaatttgctaggtggaaggtgaataacctggctctggaaaggaaagattttttttctttgcccctaccactcgcgcccgagttcattcggaatattcgtctgctggggcggcgtcctaacctccagcaggtcaccgaaaatcttataaagaaatacggaacccatttcctgttgtccgctacactcgggggcgaggagagcctcacaatcttcgtagacaagcagaaactcggacggaaaactgagacgacgggcggcgccagtattatcgggggaagcggcaattctacagccgtctccttggaaactctgcatcagctcgcggcatcctatttcattgaccgcgagagcacattgagacgccttcatcatattcaaatagccacaggcgcaatcaaggtaactgagaccagaaccggacctctgggatgttctaattatgacaacttggacagcgtgagcagcgtacttgtacagtctcctgagaacaaggtgcaactgctcggcctgcaggtcctccttccggagtatctcagagagaggttcgtggccgccgcactgagctacattacatgcagcagcgagggggagctggtttgtaaggaaaatgattgctggtgtaaatgcagtcctacattcccggagtgtaactgtccagatgctgatatccaagcaatggaggatagcctgcttcaaatccaagactcttgggcaacacacaatagacaattcgaggaaagtgaggaatttcaggcactcctaaagcgtctcccggacgaccgcttcctgaacagtacagcaatctctcagttctgggcaatggacacttctctccagcatcgttaccagcaactgggggccggcctgaaagtcttatttaagaagacccaccggatccttcgtcggttgtttaacctgtgcaagagatgccatcggcagccacggtttcgtctgcccaaagagcgaagcttatcatactggtggaacaggattcagagcctcctctattgcggcgagagcacatttcccgggacgtttctggagcagtcgcactcttgcacctgcccatacgatcagtccagctgtcagggtcctatcccctgcgcgctgggagaaggacctgcgtgcgcacattgtgcgccagacaactccactcgatgcgggtcttgcaacccgggctacgtgctggcccaggggctgtgccgccccgaggtagctgaatcgctggagaacttcctggggctggagacagatctgcaggatttggaactgaaatatctgctgcaaaaacaagactccaggatcgaggtgcattccatttttataagcaatgacatgcggttaggaagctggttcgatcctagctggcgcaagcgcatgctgttgaccctgaagagcaataagtataagccgggactggtgcacgtaatgctcgcactctccctccagatctgcctgactaagaactctactctggaacccgtgatggcaatatacgtgaatcccttcgggggtagtcatagcgaatcttggttcatgcccgtgaatgaaggctcttttcccgattgggaacgtactaacgttgatgcggccgctcagtgccagaactggacgattactctcggaaaccgctggaagacattctttgagaccgtgcatgtgtatcttcggagccgcattaaatccctggatgattcttcaaatgagactatttactacgagcctcttgagatgaccgaccctagcaagaaccttggctatatgaaaatcaataccctgcaggtctttggatattcacttcccttcgatcctgacgcgattcgcgatttgattttgcaactggactatccctacacccaggggtctcaggacagcgcactgttgcagctcattgaactaagggatcgggttaatcagctgtctccccctggcaaggttaggctggacctcttttcctgcttactcagacaccgccttaagctggccaataatgaagtgggcaggattcaatcatccctgcgcgcatttaacagcaagctgcctaatcccgtggaatacgagaccggtaaattgtgttcgtag

SEQ ID NO: 9027 - DNA, 2016 bp, synthetic construct
  misc_feature 1..2016: note = source = /note="Description of Artificial Sequence: Synthetic coding sequence"
  source 1..2016: mol_type = other DNA
atggcccagctgttcctgcccctgctggccgccctggtgctggcccaggccccagcagccctggcggacgtcttggagggcgacagttccgaggaccgtgcctttcgagttaggattgccggggatgccccactgcaaggagttctgggcggggcgttgacaatcccttgccatgtccactacctgcgtccccctccatccagacgcgccgttctgggctcaccacgtgtcaaatggacatttctgtccaggggaagagaagctgaagtcctggttgcccgcggggtcagagtgaaagttaatgaagcttataggttccgggtcgcattgcctgcgtacccagcctcgctgaccgacgtgtccttggccctgagcgagcttagaccgaatgattccggaatttatcgatgtgaggtgcagcacgggatcgatgacagtagtgacgcagtagaggtcaaggtgaagggcgtggtgttcttgtatagagaggggagtgcacggtatgctttctcattctcaggagctcaggaagcctgtgccagaatcggcgcccatattgccacccctgagcagctgtatgctgcttacctaggcggctatgagcagtgcgacgccggctggctgagcgaccagacggttcggtacccaatccagacaccccgtgaagcctgttacggggatatggatgggttccctggggtgagaaactacggagttgtcgaccctgatgatctgtacgacgtctattgctacgctgaagacctcaatggcgagctgttcttgggagatccacccgaaaaattaaccctcgaggaggcaagagcttactgccaggaaaggggagctgagatagccaccactgggcaattatacgcagcctgggacggaggcctagaccactgcagcccagggtggttggcggatggaagtgtccgctatcccattgtaacaccttcccagcgatgcggggggggcttgcctggcgttaagaccctatttctctttcctaatcaaactgggtttccaaataaacacagtagatttaacgtttattgtttcagggactctgcgcagcccagcgctatccctgaggccagcaacccagcaagcaacccagcgagcgacggactggaagcaatcgtgacagtgactgagaccttggaagaactgcagttgccacaggaggccactgagtccgagagtaggggggcgatctattccataccaataatggaggatgggggcggggggtccagcactccagaagatccagccgaagcccctcgcactctgctggaattcgagacacagtcaatggttccacctacaggcttctcagaggaggaaggcaaggcgctagaagaggaggagaaatacgaggatgaggaggagaaggaggaggaggaggaggaggaagaggtcgaggatgaggcgctatgggcatggcctagtgaactgtcctcccctgggcccgaagcctctcttccaacggagccagccgcccaggaggaatccctcagtcaggcgccggccagagctgtactgcaacctggtgctagcccactgcccgacggagaatctgaggcatcaaggccgcctagggttcatggcccaccgactgaaaccctgccaacacctagggagagaaacctagcgtcgccgagccctagcaccctggtggaggccagggaggtaggcgaggccaccggcggacctgagctatctggggttcctcgaggcgagagcgaagaaacaggatcctccgaaggggcaccctctttactgcctgcgacccgagcccccgaaggcacccgagagcttgaagcccccagtgaggacaacagtggacgtaccgccccggccggaacaagtgtgcaagctcagccagtgctgccaaccgacagtgcgtccaggggaggggtggccgtggtccccgcgtcaggtaattccgcacagggctccactgctctcagtatccttctgctcttttttcctctccagctgtgggtgacttag

SEQ ID NO: 9028 - DNA, 375 bp, synthetic construct
  misc_feature 1..375: note = source = /note="Description of Artificial Sequence: Synthetic coding sequence"
  source 1..375: mol_type = other DNA
atgtacaagctggccagctgctgcctgctgttcatcggcttcctgaaccccctgctttctctgccactgctcgattcaagagagatctcattccagctgtctgcccctcatgaggacgcgcgcctcacccccgaagaactggaacgcgcttcattgctacagatcctgcccgagatgcttggggcggaaagaggcgatattttaagaaaggccgatagctcaaccaacatattcaacccgcgcggcaatctccgcaaatttcaggatttttccggacaggaccccaacattctgctatctcaccttttagccagaatttggaaaccttataaaaaaagagaaacaccggactgcttctggaagtactgtgtgtag

SEQ ID NO: 9029 - DNA, 1326 bp, synthetic construct
  misc_feature 1..1326: note = source = /note="Description of Artificial Sequence: Synthetic coding sequence"
  source 1..1326: mol_type = other DNA
atggagttcgagttcgaccggctgcgggccttccaggccatgcaggtgcactgcaacaacatgcacacgctcggcgctcgcctgccaggcggggttgaatgcagattccgacggggacctgccatggcctgggaaggcgagcctatgcgccataaccttggaggtaatctgggcgatcctagagcacgtgccgtgtccgtgccattgggaggtcgggtggccagattcttacagtgccggttcctgttcgctggaccctggttgctgttttccgaaatatccttcatctccgacgtggttaataactctagcccagcacttggtgggacctttccgcccgcgccgtggtggccccccggcccgccccccaccaactttagcagtctggagctggagccaagaggtcaacagccagtagcaaaggccgagggctctccaacggccattctgataggctgtctcgttgccatcatacttctcctgctgctaattatcgcactgatgctttggcggttgcactggaggcgcctcttgagcaaagtcttagagtcccacccccgtacccgtagcccaggactcgttggtatcagacccacacctctgcctgtgagtccgatggccttgcggtgctgttctccaatacagcccacggcatctttttggcccctgactcccgtgccactggaggcccgggctcccccacacccccccggacccaaccctcctacacctcgcggggtcacaggcgggaacacttacgctgtacccgcgctcccacctggagccgttggcgatggtccgccccgtgtggacttccctcggagtcggcttcggtttaaagagaagttgggggaaggacagttcggagaggtccacctctgcgaggtagactctccacaggacctagtgtccctcgatttccccctgaatgtcaggaagggccacccactcctggtggccgtcaaaattctcaggcccgatgctactaagaacgctagaaatgattttcttaaagaggtcaagatcatgtccagactgaaggatcctaatatcatacgcttgctgggcgtgtgtgtgcaggacgacccattgtgcatgatcaccgactacatggagaacggcgacctcaatcagttcctgtccgctcatcagctggaggacaaggccgctgagggagccccgggcgacgggcaggcagcccaaggccccaccataagctaccctatgttactgcacgtggcggcacagatcgcttctggtatgcgctaccttgccaccctcaattttgtccatttttggggtgagaggcatagatttctgcactag

SEQ ID NO: 9030 - DNA, 1950 bp, synthetic construct
  misc_feature 1..1950: note = source = /note="Description of Artificial Sequence: Synthetic coding sequence"
  source 1..1950: mol_type = other DNA
atgcagcaggacggcctgggcgtgggcacccggaacggcagcggcaaagggaggagtgtgcatccatcttggccgtggtgtgcccctaggccgttgagatacttcgggcgggatgctagagcacgaagggcccagacagcagccatggccctactggctggaggactttccaggggactgggcagtcaccccgcagccgctgggcgggacgccgtggtgttcgtctggctgttattaagcacctggtgcacagcacccgctcgggctatccaggttacagtgtctaacccttatcatgtcgtgattctttttcagcctgttaccttaccctgcacttaccaaatgacttcaactccaacccagcctatcgtcatttggaagtataagtcattctgtcgggaccgcatcgccgacgccttctcacctgcttcagtggacaatcaactcaacgcacaactagccgccggcaaccctggctacaatccatatgtagagtgtcaggatagtgttcgcacagtaagggtggtagcgaccaagcaggggaacgctgtgacgctcggggattattatcagggcaggcgcatcaccattactggtaatgctgatttaacctttgaccagactgcttggggcgattccggcgtgtattattgtagcgtggtgagtgcacaggacctgcaaggaaataatgaagcctatgcagagctgatcgttctggggagaacgtccggcgttgccgagctgttacctggttttcaagctggaccaatcgaggactggctgttcgttgtcgtcgtctgcctggcggcttttctgatatttctgctcctgggcatctgttggtgccagtgctgcccccacacatgctgttgttacgtacgatgtccgtgttgcccggataaatgctgctgtcccgaagccttgtatgctgcagggaaagctgctactagcggcgtgcccagcatctatgccccttccacttatgcccatttaagcccagccaagaccccaccaccccccgctatgatccctatgggccctgcctacaatggctatcccgggggatatcccggtgatgtagataggtcatcaagcgctggtgggcaggggtcttatgtgcccctacttagagacaccgattccagcgtggcatccgaagtgcggagtgggtatagaatccaggcaagccagcaggacgattccatgcgagtgctttactatatggagaaagagctcgctaatttcgacccttccagacctggacctcctagcggtcgagtggaacgcgccatgtctgaggttaccagcttacatgaagatgattggcgtagcaggccgtccagggggccagctctgactcctatcagagacgaagaatggggcgggcactctcctaggagccctcgaggatgggatcaagagccagcaagggagcaggctggaggtgggtggcgggcaaggcgacccagagctaggagcgtcgacgctttagatgatcttacccctccgtcaacagctgagtcaggatcacgtagccctacatctaacggaggccgctccagagcctatatgcctccgaggtccagaagcagggatgacctgtatgaccaggatgacagtcgcgatttcccaagaagtcgcgatccccactacgacgactttaggtcacgggaaaggccgccggccgatccacgcagtcaccaccaccggacacgcgatccgcgggacaatggctctcggtccggagacttaccatacgacgggagactgctggaagaggctgtccgcaaaaaagggtcggaagaaaggagaaggccacacaaggaggaggaggaagaagcttactatccccccgcccctcccccatacagcgagactgactcacaagcctccagggaaaggcgactgaagaagaatctggccctgagtcgggagtcactggttgtgtag

SEQ ID NO: 9031 - DNA, 402 bp, synthetic construct
  misc_feature 1..402: note = source = /note="Description of Artificial Sequence: Synthetic coding sequence"
  source 1..402: mol_type = other DNA
atgagcgagcgggtggagcggaactggagcaccggcggctggctgcttgctctctgtttggcttggctttggacccacttgacattagcagccctgcagccccccacagccactgtccttgtccagcagggcacgtgtgaggtgatcgctgcccatcgctgttgtaaccgcaacagaatagaggagcgttctcaaacagtgaagtgctcttgtttttctggacaggtcgctggcacaaccagagcaaaacccagttgtgtggatgcttctatcgtgctgcagcggtggtggtgccagatggagccttgccttccgggagaagagtgtaaagtgttaccggatctgagcgggtggtcctgttcaagcgggcataaggttaagactaccaaggttacccgatag

SEQ ID NO: 9032 - DNA, 699 bp, synthetic construct
  misc_feature 1..699: note = source = /note="Description of Artificial Sequence: Synthetic coding sequence"
  source 1..699: mol_type = other DNA
atggtggccgccaacacccgggcccccgaggacacccgggcccccgctgggcctaaaccctcgagctgcgaatgggccgtttgctgggcccctgctcgttgtaggatctctgcgacggcatgtggcaactcttgggacagacctgccggtagaacacagctgctgtggacacccgcagcacccactgctatggctgaagtggggcccgggcacactcctgcccatccttcccagggtgccgtcccaccaagccgagccgcagcagaacctcatctgaagcctagtccatctgagctacagactgcaggccctgccgccactatcccagctcggctttgtacgaggaagcctagactggtgtacacccagtgctggtatgtcaaggagcctaaacaccctgagattgtgacaccctggggtaccgccgcccggcactcatggaggcagcatcagatgctctccgcctccgagagaagatgtttaccaagagacgtcgagcagaagcttggacccgagcataccgggccctgcttggatgagcagggtagggaagctgaacttgccagatccgggccgtcagccgccggccctgtgcgcctgaagcccggcctggtaccagggctgtttctgctctcctgtactactagtccttctacttgtttaccggtgggccaggaaggagaaagaggtatgctatag

SEQ ID NO: 9033 - DNA, 711 bp, synthetic construct
  misc_feature 1..711: note = source = /note="Description of Artificial Sequence: Synthetic coding sequence"
  source 1..711: mol_type = other DNA
atgtgcgtgacctaccacaacggcaccggctactgcaagtgccccgagggctttttgggcgagtattgccagcaccgcgatccctgtgagaaaaacagatgccaaaacggtgggacctgtgtagcacaggcaatgctgggaaaggctacatgcagatgcgcctccggcttcacaggagaagactgccagtacagcacaagtcacccctgttttgtgagtaggccatgtctgaacgggggtacatgtcacatgctatcccgggacacctacgagtgtacctgtcaggttggcttcaccgggaaagagtgtcaatggacggacgcttgtctgtcccacccgtgcgctaatggttctacttgcactaccgttgctaatcagtttagttgtaagtgtctaaccggattcacggggcaaaagtgcgaaacagatgtaaacgaatgcgatatacccggtcactgccagcacgggggcacttgcttgaatctgccgggctcctaccagtgccagtgtcttcaggggttcactggtcaatattgcgacagtctttacgtaccctgtgcccccagtccatgcgtgaacggcggcacctgcagacagaccggcgattttaccttcgaatgcaattgtctgccggagacagtgaggaggggaacggaactgtgggagagggatcgggaggtgtggaatggaaaagagcacgatgagaattag

SEQ ID NO: 9034 - DNA, 204 bp, synthetic construct
  misc_feature 1..204: note = source = /note="Description of Artificial Sequence: Synthetic coding sequence"
  source 1..204: mol_type = other DNA
atggacaacgtgcagcccaagatcaagcaccggcccttctgcttctcagtgaagggacatgtaaagatgctgcggctcgtcttcgctctagttacggctgtgtgctgtttggcagatggagccttgatctatagaaagctgcttttcaatcccagtggcccttaccagaagaaacctgtccacgaaaagaaggaagttctctag

SEQ ID NO: 9035 - DNA, 75 bp, synthetic construct
  misc_feature 1..75: note = source = /note="Description of Artificial Sequence: Synthetic coding sequence"
  source 1..75: mol_type = other DNA
atgctggtggacggccccagcgagcggcccgccctgtgcttcctgcttctggctgttgcaatgagctttttttag

SEQ ID NO: 9036 - DNA, 3345 bp, synthetic construct
  misc_feature 1..3345: note = source = /note="Description of Artificial Sequence: Synthetic coding sequence"
  source 1..3345: mol_type = other DNA
atgctggccagcagcagccggatccgggccgcctggacccgggccttactgctccctctcttattggccggtcctgtggggtgtctcagtagacaggagctgttccccttcggcccaggccaaggggacctggagctcgaggacggagatgatttcgtgagtccagccctcgaactatcgggagcgttacgcttctatgatcgctctgatattgacgccgtgtacgtgacaaccaacggcatcatcgcgacatcggaaccccccgcaaaagagagtcacccggggttgtttccccccacttttggggctgtagcaccgtttctggcagatctcgatacgacagatggacttggaaaagtgtactaccgcgaggacctgagtccgtccatcactcagagggccgccgagtgtgtacatcgcggctttccggaaatctctttccagcccagttcagccgtggtggtgacctgggaatctgtggccccctaccaggggcccagtcgggatcccgaccagaaaggcaagcggaatactttccaagctgttcttgcgtccagcgacagttcttcatatgctatattcctctatccagaagatggcctccagtttcacaccactttctcaaagaaggaaaacaaccaggttcctgcagtagtcgccttctctcagggaagtgtaggattcctctggaaaagcaacggggcgtacaacattttcgcaaatgaccgcgaatcagttgagaatctggccaaaagctcaaactccggtcagcagggcgtctgggtcttcgagatcggatctccagcaacaaccaatggtgtcgtgcctgccgacgtcatccttggaaccgaagacggggccgagtacgacgacgaggacgaagactacgacctcgccaccacaaggctcggtctggaggacgtgggcacaaccccattttcatacaaggcattgcggagaggtggggctgatacctattcagtccccagcgtgctcagcccccggagagctgcgaccgaacgccctttgggtcctcccaccgagcgcacaagatcctttcagcttgcagtagaaacgttccaccagcagcatccccaagttattgatgtagacgaagtcgaggagacaggagtcgtcttcagttataacaccgacagccgccagacgtgtgccaacaaccgccaccagtgtagcgttcatgcagaatgtcgagattacgccactggtttttgctgcagctgcgtcgccggctacactgggaacggccgccagtgtgtggccgagggttcccctcagcgagtcaacggtaaggtgaaaggccgcatcttcgtcgggtccagccaggtccccatcgtattcgagaataccgatctccattcatacgtagttatgaatcacggccgatcctacacagccatctcaactatcccagaaaccgttggatacagcctgctgccccttgcccccgttggaggtattattggctggatgtttgccgtggaacaagacggtttcaagaatggctttagcattactggcggagagtttacgagacaagctgaagtgacatttgtgggtcatccaggcaatctggtaattaagcagcgcttctccgggattgatgaacacggtcacctcactatcgatacagagcttgaggggcgggtgccccaaattcccttcggtagctcagtccatatagagccttataccgagctctatcattattcaacatcagtgattacatcttccagcactcgagagtacaccgtgaccgaacctgagcgagatggagcttcaccgtcaaggatttacacataccagtggagacaaaccatcaccttccaggaatgtgtccacgatgactccagaccagccctgccaagtacacagcaactgagcgtggattctgtgttcgtcctgtataatcaggaagaaaagatcctgagatacgctctatcgaattcgatcggccccgtccgggaggggtcgcccgatgcgctgcaaaacccctgctatatcggaacccacggctgcgacacaaacgctgcatgccgaccaggtccccgaacccaattcacttgtgagtgctctattggattcagaggggacggccggacttgttatgaggttgagaaaacccgatgtcagcatgagagggaacacatcctgggagcggcaggggcgaccgaccctcagaggcctatcccacccggactctttgtgcctgagtgtgacgctcacggccactatgcgcctacccaatgccacggaagtacaggctactgttggtgcgtggatagagacggtagggaagtagaaggcacccgtacacgccccggaatgacacccccatgtttatcaacagtggctccacccattcaccagggccctgcggtccccacagcagtaattccccttccacccggcacacatctcctattcgcgcagacaggcaagatcgagcggctgccacttgagggaaatacgatgagaaaaaccgaggctaaggcgttcttacatgtgccagccaaagtcatcattggtctcgcattcgactgcgtggacaagatggtctattggacagatatcacagaacctagcattggtagggcctccttacatggcggcgaaccaacaacgatcatccgtcaggatctgggttcacctgaagggattgctgtggatcacctgggccgaaacatattctggacagattctaacctcgatcgaatcgaggtggctaaactagacggcactcaaaggcgcgtgctcttcgaaaccgacttggtgaatccaaggggaattgtgacagatagcgtgcgcggcaacttatactggacagattggaatcgggataaccccaagattgagacctcatatatggacggcacgaatcggcgaatcctggtgcaagatgacttggggcttccaaatggcttgacatttgacgcattttcatctcagctgtgctgggtggacgctggcactaatcgcgcggaatgtctgaatccatcacagccaagtagacggaaggcactggagggattgcagtacccatttgcagtcacctcttacggaaagaacctatatttcactgactggaaaatgaattccgtcgttgcattagacttggctatttcaaaagaaaccgacgccttccagccccataagcagacacgcctttacggaattaccactgcattatcccagtgccctcagggacataactattgtagcgtcaataacggaggctgtacacacctgtgtctagcaactcctggatcccggacctgccgctgtcccgacaataccctgggtgttgactgcatagaacagaaatag

SEQ ID NO: 9037 - DNA, 2172 bp, synthetic construct
  misc_feature 1..2172: note = source = /note="Description of Artificial Sequence: Synthetic coding sequence"
  source 1..2172: mol_type = other DNA
atgggcagccggtgcgccctggccctggccgtgctgagcgccctgctgtgtcaagtgtggtcctccggagtgttcgagctcaaactccaggagtttgtgaacaagaagggtcttctgggaaatcgaaactgttgtaggggcggtgccgggccgcccccgtgcgcttgccgtacttttttccgggtgtgcttgaagcactatcaagcaagcgtttctccagagccgccttgcacctatggctcagccgtgactcctgtcctgggcgtggactctttctccctccccgatgggggcggagctgattcggctttttcaaatcctattcgcttcccattcgggttcacctggcccggcactttcagcttaattatcgaggctcttcataccgactctcccgacgatctggccacggagaacccagaacggctgatctctagacttgcaacccagcgccatctgactgtgggtgaagagtggtcacaggaccttcacagttctggccggactgacttaaaatacagttatcggttcgtctgtgacgagcactactacggtgaaggatgctcggtgttctgccggcctagggacgatgccttcggtcacttcacttgcggagaaaggggcgagaaagtgtgcaacccaggctggaaaggcccatactgcaccgagcccatatgcctacccggttgtgacgagcagcacggcttttgtgataaaccaggggaatgcaaatgcagggtcggatggcaggggcgctactgcgatgagtgtatccgttatcctggctgtctgcatggcacctgtcagcaaccctggcagtgtaattgccaagaaggatgggggggtctcttctgcaatcaggatttaaattactgcacccatcataaaccctgcaaaaatggcgctacctgcacaaatactggacaggggtcctacacctgcagctgtaggcctggttacacaggcgccacttgcgaactgggcatcgatgagtgtgacccttcgccctgcaagaacggaggttcttgcaccgacctggaaaactcctacagttgcacgtgccctcccggcttttatggaaagatatgcgaactgtctgccatgacatgtgccgatgggccttgttttaacggtgggaggtgctccgattcacctgacggagggtactcatgcaggtgtcctgttggttatagcggctttaactgtgagaaaaagatcgactactgctcttcatccccttgctccaacggagcgaaatgtgtcgacctgggcgacgcttacctgtgccggtgtcaggcaggattttctggcagacactgcgatgacaatgtagacgactgcgcttcctcgccctgcgcaaatggcggaacctgccgcgacggcgtgaatgactttagctgtacctgcccacccggttatactggccgaaattgttcagcccccgtatccaggtgcgaacacgcgccttgtcacaatggagcaacatgtcatgagagaggtcacagatacgtgtgtgaatgtgccagaggatatggcggccccaattgccagttcctgctaccagagctgccaccaggccctgcagttgttgatctgaccgagaagctggaaggacaaggcggtccgtttccctgggtcgccgtgtgcgccggagtcatccttgtgttaatgctgctgcttggatgtgctgccgttgttgtgtgcgttagactcaggctgcagaagcacagacctcctgcagacccctgccggggcgagacggagaccatgaacaatctggcaaattgccagcgggagaaggatatatctgtttcaattattggagcaacccaaatcaagaataccaataaaaaggctgacttccatggggaccactcagcggataaaaatgggttcaaagctaggtaccccgcggttgactataatctcgtccaagacctgaagggtgacgacactgccgtgagagacgcacacagtaagagggacacaaagtgccagcctcagggctccagcggggaggagaaggggacaccgacgacgttgcgcggtggggaagccagcgagcgcaagcggcctgacagcgggtgctcaacttctaaggatacaaagtatcagtctgtttacgtgatttcagaggagaaggatgagtgtgttatagccactgaagtatag

SEQ ID NO: 9038 - DNA, 981 bp, synthetic construct
  misc_feature 1..981: note = source = /note="Description of Artificial Sequence: Synthetic coding sequence"
  source 1..981: mol_type = other DNA
atggccgcccccgccagcgtgatgggccccctgggccccagcgccctcggtctcctgctcctcctgctggtcgtcgctccccctagggttgctgcactggttcatagacaacccgagaatcagggtatctctttaaccgggagtgtggcttgtggcagaccatctatggagggaaagatcttaggaggtgtgcctgcaccggagcgcaaatggccatggcaagtgtccgtgcactatgcaggcctgcacgtctgcggaggatctatcctgaatgagtactgggtgctgtccgcagcacactgctttcatcgggacaagaatataaagatttatgacatgtacgtgggactagtcaatctccgtgtcgcgggcaaccatacccagtggtatgaggtgaacagagtgattctgcacccaacttacgagatgtaccacccaattggcggagatgtggctctggtgcaactgaagacccggatagtcttctccgagtccgtccttcccgtttgtctggccacacctgaagtcaacctgacctcggcaaattgttgggccactggctggggcctcgtgtctaaacagggggagacatccgatgaactacaggaaatgcagttacccctgatacttgaaccttggtgccacctgctatacggacatatgtcatatataatgccggacatgctatgtgcaggagacatccttaacgccaaaacggtatgcgaaggtgatagcggcggcccacttgtttgcgaattcaataggagttggctgcagatcggcattgtgagctggggccgtggttgctctaatcccttgtaccccggagtctacgctagcgtctcgtatttcagtaagtggatttgcgacaacattgagatcaccccaactcccgcccagcccgctccagccctatccccggcgctgggacctaccctctcagtactgatggccatgctggcgggatggtctgtgctatag

SEQ ID NO: 9039 - DNA, 1596 bp, synthetic construct
  misc_feature 1..1596: note = source = /note="Description of Artificial Sequence: Synthetic coding sequence"
  source 1..1596: mol_type = other DNA
atgagcctggccgcctactgcgtgatctgctgccggcggatcggcactagcaccagccctcccaagtccggcacccactggcgggacatccgcaacatcataaagttcactggatccctgatacttggggggagcctgtttctgacctatgaggtgcttgctctcaaaaaggctgtgacactggacacccaggttgtggaacgcgagaagatgaagtcctatatctatgtgcatactgtgagcctcgataaaggggagaaccatggaattgcctggcaagcccgcaaagagctgcacaaggcagtgcggaaagtcctcgccacatccgccaagatcctgaggaacccctttgccgaccctttcagtaccgtggacatcgaggatcacgagtgtgccgtttggttgctgctgaggaagagcaagagcgatgacaagactactcgcctagaggctgtacgggagatgtctgagacccaccactggcacgattatcaatacaggatcatcgcacaggcctgtgaccccaagaccctgattgggctggcccgaagcgaggagtctgacctgagattttttctcctgccgcctccacttcctagcctgaaggaagattcaagcacggaagaagagcttcgccagctgctggcttccctgccacaaactgaacttgacgagtgtatccagtatttcacttccctcgcattatccgagagttcacaatctctggccgcacaaaaggggggactgtggtgcttcggaggaaacggcctcccatatgccgaatcatttggagaggtaccttccgcaactgtcgagatgttttgccttgaagcgatcgtgaaacactccgaaatctcgactcactgcgataaaatcgaggccaacggcggcttgcaactgcttcagaggctgtaccgtctccacaaagactgccctaaggtgcaaagaaatattatgcgagtgataggcaatatggccttgaatgagcatctgcatagctccatcgtgagaagcggctgggtaagcataatggccgaggcaatgaaatctccccacattatggagagtagtcatgctgctagaatcttggcaaatctcgatagagagaccgtgcaggagaaataccaggacggggtgtatgtgcttcatccacaatatcgaaccagccagcccattaaagctgacgtgctcttcatccacggccttatgggcgccgctttcaagacatggcggcaacaggacagcgaacaggctgtgattgaaaaacctatggaggatgaggacaggtataccacctgttggcccaagacttggctggcaaaggattgccccgccctccgtatcattagcgtagaatatgacacatcgctgagcgattggcgtgcacgctgccctatggagagacgcagtttactctcaatcagcagcggaatagtggaaggcctcgaatcgccactgcactccgaggccaccaatttccttggttcaagcgagctgttggtactgggaatcggtcagtggtttggataccatatcgcttgggaggtttttctttccaagcgttgctgctggaaaccattgagatcccagaagtag

SEQ ID NO: 9040 - DNA, 1596 bp, synthetic construct
  misc_feature 1..1596: note = source = /note="Description of Artificial Sequence: Synthetic coding sequence"
  source 1..1596: mol_type = other DNA
atgagcctggccgcctactgcgtgatctgctgccggcggatcggcactagcacttcacctcccaagagtggcacccactggagggacatcagaaacatcattaagttcacaggcagcctgatcttgggggggtccctctttctcacatacgaagtcctggccctaaagaaggccgtgaccctggatacgcaggtggttgagagagagaagatgaagagttacatctacgttcacactgtctctctcgacaaaggcgaaaatcacgggatcgcttggcaggcaagaaaggagctccacaaggctgtccgaaaagtgctggccacgtcggctaaaatcctaagaaaccctttcgccgaccctttctccaccgtggacattgaagaccatgagtgcgctgtgtggcttttattaaggaagtccaaaagcgacgacaagactacacgcctcgaagctgtgcgtgaaatgtccgaaacccaccactggcatgactatcagtatcgtataatagcccaggcttgcgatccaaagactctgatcggcctagcccgaagcgaggagtcagatttacgttttttcctgctgccaccccctctcccctccctgaaggaagattcatcaacagaggaagagctccgccagttactggcctcgctgcctcagactgaactggacgaatgtattcagtactttacttccttggcactgtctgagtcatctcaatctctcgcagcccagaaaggcggtctctggtgttttggcggaaacggtttgccatacgcggagtccttcggagaggtcccctctgccaccgtggagatgttctgtctggaagccatcgtgaagcatagtgagatatcaactcattgcgataaaatcgaggccaatggtggcctccagctgctccagaggttgtaccggctgcacaaagactgccctaaagtacagcggaatattatgagagtcatcggaaatatggcccttaatgaacacttgcactcaagcatcgtgcggagcggctgggtgtccatcatggccgaggccatgaaatcacctcatattatggagtcctcacacgctgccaggattctcgccaacctggaccgcgaaacggtgcaggagaagtatcaggacggcgtctacgtgcttcaccctcagtaccggacgagtcagccgatcaaggccgatgtgctcttcatccatggcctgatgggagcagcttttaaaacctggaggcaacaggactctgagcaggctgtcattgaaaaaccgatggaggacgaggacagatacactacgtgctggccaaaaacctggctcgctaaggactgccctgccctccgcattattagcgtggaatacgatacgagcctttctgattggagggcaaggtgtcctatggagaggaggtcactcctgtccatcagtagtggaatagtggaaggattggaatctcctctgcacagcgaggcaactaattttctgggatcttcagaactgcttgtgctgggaatcggacagtggttcggctaccacattgcttgggaagtctttctgtcaaaacgatgctgctggaaaccactccggagtcaaaaatag

SEQ ID NO: 9041 - DNA, 1965 bp, synthetic construct
  misc_feature 1..1965: note = source = /note="Description of Artificial Sequence: Synthetic coding sequence"
  source 1..1965: mol_type = other DNA
atgagcctggccgcctactgcgtgatctgctgccggcggatcggcacatcaacctcaccgccaaagagcggtacccactggcgggacatcaggaacataattaaatttacagggtccctgattctgggaggctccctgttcctgacatacgaagttctagccttgaagaaggctgtgaccttggatactcaggttgtggagagagaaaagatgaaaagttacatctacgtgcatacagtgtcgctggataagggcgaaaaccacggtatcgcatggcaggctcgcaaagagctgcataaggcggtgaggaaagtgttggctacgtcagccaaaatactcagaaacccattcgcagatccatttagtactgtggacatcgaagaccatgagtgcgcagtgtggttgttgctgaggaaatcaaagtctgacgataagacgacccgcctggaggctgttagggaaatgtcagagactcaccattggcacgactatcagtacagaatcatcgcccaggcatgtgaccccaagacattgattggcctggcccggtcagaagaatctgacttgcggttcttcctcctaccccctccacttcccagcttgaaggaggactcatcaactgaggaagagcttcggcaactgctagcttccctcccacagactgagctggacgagtgcatccagtactttactagcctcgccttgtccgagtcatcccagtcccttgccgcccagaagggagggctgtggtgtttcggggggaacggcttaccatatgccgagtcctttggggaggtacctagcgcaacagtagaaatgttctgcttggaagcaatcgtgaaacactccgagatctctacacactgtgataagattgaggctaatggagggctacagctcctccagagactgtaccgactccataaggactgtcccaaggttcagagaaacatcatgcgagtaattggaaatatggcactgaatgaacacctgcattcttccattgttcggagcggatgggtgagcatcatggcagaagccatgaagtctccacatatcatggaatcttctcacgctgccagaatcctggccaatttagatcgagagactgtgcaagagaagtatcaagacggagtgtatgtccttcatccgcagtatcgcacgtcacagcccattaaagctgacgttctgttcattcatggcttgatgggcgccgcttttaagacttggagacagcaggatagtgagcaagcggtgatcgagaagccaatggaggacgaagaccgctacacaacttgctggccaaaaacctggctggcaaaggattgccccgcactccggataatttctgtggaatacgataccagtctatccgactggcgggccaggtgtcccatggagcgcaagagcatagcgttccggtcgaatgagctgttaagaaaactacgcgctgccggggtgggcgatagaccggtcgtgtggatcagccattcaatgggtgggttgttggtcaaaaaaatgctcctcgaagcatcaacgaagcctgagatgagcaccgtgattaataacaccagaggcatcattttctactcagtcccccatcacggaagtcgcctagccgagtactcagttaacatccggtacctgttattcccatctctggaggtcaaggagttgagtaaggactccccggctctgaagacactgcaggacgacttcctggagttcgctaaagataagaactttcaggttctgaatttcgtggaaaccctccctacctatattggctcaatgataaagcttcacgtcgtccccgtggaatcagctgacctgggcatcggcgacctcattccggtggatgtgaaccacctcaacatatgcaaaccaaagaaaaaagatgcttttctgtatcaaaggacccttcagtttatcagagaggctctagccaaagacctggaaaattag

SEQ ID NO: 9042 - DNA, 1509 bp, synthetic construct
  misc_feature 1..1509: note = source = /note="Description of Artificial Sequence: Synthetic coding sequence"
  source 1..1509: mol_type = other DNA
atggcccagcggtgcgtgtgcgtgctggccctggtggccatgctgctgctagtgttcccaacggtgagccgctccatgggcccacggtctggcgagcaccagcgcgcctcaaggattcctagccaattcagtaaagaggagagggtggcaatgaaggaggccctgaaaggagccatccaaatacccaccgttacattttccagtgaaaaatctaataccaccgccctggccgagttcggaaagtacattcataaggtgttcccgactgtggttagcacatcctttatccagcacgaagtggtcgaagagtactcccatcttttcacaattcagggctctgatcccagtctgcaaccatacctgctgatggcccattttgatgtcgtacccgctccagaagaaggttgggaggtacctccctttagtggcctcgaacgcgacggcatcatttatggccgcggcacactggacgacaagaactctgtgatggcgctcctgcaagcactggagttacttctgatacggaaatatattccccgccgcagcttctttatctctctcggtcatgacgaagaatcttctggaacaggggctcaacggatctccgctcttcttcagtcgagaggtgtccagcttgctttcattgtggatgaaggaggcttcatcctggacgactttattcccaattttaagaaacctattgctttaatagccgtttccgagaagggatcaatgaatctgatgctgcaggtcaacatgacaagtggccattcaagtgccccacctaaggaaaccagtatcggtattctcgccgcggccgtctccaggctggaacagactcccatgcctatcattttcggctcaggaactgttgtaacggtccttcaacagctggctaatgagtttccctttcctgtgaatatcatactgagcaacccctggttgttcgagcctttgatcagtagattcatggaacgaaatccactgacaaatgccatcattcgtactaccaccgcgttgactattttcaaggcaggggtgaaatttaacgtaattcctccagtggcacaggccactgtgaactttcgcattcaccctgggcagaccgtgcaggaggtcctggaattgactaagaatattgtggcggataatcgagtccaatttcacgtgctgtcagcattcgatccgctgccggtctctcccagcgatgataaagccctgggctatcagctgctgaggcagacagtgcagagcgtgtttcccgaggtgaacataacggcgcctgtgacatcaataggcaacaccgacagtcgattctttactaacctgactactggcatttaccgattttacccaatctatatccagcctgaggattttaaacgtatccatggagttaacgaaaaaatctctgtgcaggcctatgagacccaggtcaagttcatctttgagctaatacagaatgccgacaccgaccaggagcccgtttctcacttgcacaagctttag

SEQ ID NO: 9043 - DNA, 999 bp, synthetic construct
  misc_feature 1..999: note = source = /note="Description of Artificial Sequence: Synthetic coding sequence"
  source 1..999: mol_type = other DNA
atgcggctgctggccttcctgagcctgctggccctggtgctgcaggagaccggcacagcaagtctgccccggaaggaaagaaagcgcagagaagaacagatgccacgcgagggggatagctttgaggtccttccactgcgcaatgacgtgctgaatcccgataactacggcgaggtgatagacttgagtaactatgaggagttaactgactacggggatcagctgcccgaagtgaaagtgacttcgctcgctcctgccacctccatatccccagccaaatccacaaccgcccctggaaccccctcgtcgaaccccacaatgacccgacccacaactgcaggccttttactatcgagccaaccgaaccacgggctgcctacgtgtttggtttgcgtttgcctgggctctagtgtatattgtgatgatattgatctggaagacataccacctctgccgaggaggacagcatacttgtacgcacgttttaataggattagtcgtattcgtgccgaggatttcaagggtctgaccaagctgaagcggatagacttgtcgaacaatctgatctccagcattgacaacgacgcatttagattgctgcacgccctgcaggatttaatccttcccgagaatcagctggaggctctccctgttctcccgtctggcatcgaatttcttgatgtccgccttaaccggctacaatcgtccggcatccagccagctgcctttcgcgccatggaaaagctgcagttcttgtacctttctgataacctactggatagtataccggggccactgcccctctcgctccgaagtgtccatttgcagaacaacctgatagagaccatgcagcgcgatgtcttttgcgatccagaggagcacaagcacacgagacgtcaactggaggacatccggctggatggcaatcctatcaatctcagcctgttcccgagtgcctatttctgtctcccgagactccccatcggccgtttcacatag

SEQ ID NO: 9044 - DNA, 1401 bp, synthetic construct
  misc_feature 1..1401: note = source = /note="Description of Artificial Sequence: Synthetic coding sequence"
  source 1..1401: mol_type = other DNA
atggtgcggagcgtggcctgggccggcttcatggtgctgctgatgattccctggggttcagcggctaagctggtatgttattttaccaattgggcccagtacaggcagggggaggcaagattcctgccgaaagacttggacccttcgctgtgtactcacttgatctacgcatttgccggtatgaccaaccatcagctctccaccaccgagtggaacgatgagaccctgtatcaagaattcaatgggctcaagaagatgaaccccaaactgaagaccctcctggcaatcggcggttggaacttcgggacccaaaaatttacagacatggtggctaccgcaaacaatagacagacattcgtgaacagcgcgatacggttcctgagaaagtattcatttgacggtcttgacttagactgggaatatccgggctcccagggcagtcctgcagtggacaaagagcgctttaccacgcttgtacaagacctggcgaatgccttccagcaagaggcacaaacctcaggcaaggaacggctcctgctgagtgccgccgtgccagctggccaaacttacgtggacgccgggtacgaggtggacaagattgctcaaaacctggatttcgtgaaccttatggcttacgactttcatgggagctgggagaaggtgacaggacacaattcgcctctttataagagacaggaggaatccggggcagcggcgagtctgaacgtggacgctgccgtccagcagtggctccagaagggaacccctgcatcaaaactcattcttggcatgcccacgtacgggcgaagcttcacactggcgtcctcatccgatactcgggtgggcgcccccgcgaccggaagcggaacccctgggccattcacaaaagagggcgggatgctggcctactacgaggtctgcagttggaagggtgcaaccaagcagcgcatccaggatcagaaggttccatacatttttcgcgacaaccaatgggtggggttcgatgacgtggagtccttcaagactaaggtatcctatctaaagcagaaagggctcggaggggcaatggtttgggctctggatctggatgatttcgccggtttcagctgcaatcagggcaggtatccgctgattcagactcttcgccaggagctgtcactgccatacttgcctagcggtacccctgagctggaagtgccgaagccaggtcagcctagcgaaccagagcatggcccaagccccggccaggatacattctgccaaggcaaggccgatggattgtaccctaatccccgcgaaagaagcagcttctactcttgtgctgcagggaggcttttccaacagtcttgtccgaccggcctcgtgtttagtaattcctgtaagtgttgtacgtggaactag

SEQ ID NO: 9045 - DNA, 1596 bp, synthetic construct
  misc_feature 1..1596: note = source = /note="Description of Artificial Sequence: Synthetic coding sequence"
  source 1..1596: mol_type = other DNA
atgcggctgtgcctgggccggccccacccccggggccacagccgggtggggaagagcgagagaggtaggggcgcccggggactggccaggcagcgtactttggaagacgaggaagaacaggagagagagcgacggagaaggcacagaaatctttcctccacgaccgatgatgaagcaccacgcttgagccagaacggggatcgacaggcatcggcatcagaaagactgccctccgttgaggaggcagaggtgcctaaacccttgccaccagccagcaaagacgaggacgaagatatccagtctatcctgaggaccagacaggagagaagacagaggcgccaggtggtggaagcagcccaggctcctattcaggaacggctggaggcagaggaggggagaaatagcctgagtccagtgcaggccacgcagaagcctctcgtatccaagaaggaactcgaaatcccaccccgacgtagactgagccgtgagcagagaggaccgtgggcactcgaggaggagtcactggtgggtcgagaacctgaggagagaaagaagggtgtgcctgaaaagtctccagtcctggagaaatcctcaatgcctaagaagaccgcgcctgagaagtcattagtgagcgacaaaacctctataagtgaaaaggtgctggcttcggaaaagactagcctctctgagaaaattgccgtatcggaaaaacgtaactcttccgagaaaaaatctgtgctggaaaagacaagcgtcagtgagaagagtctggcacctggaatggccctaggaagcggacgccggttggtgagcgagaaagctagcatatttgagaaagccctggccagtgagaaaagcccgactgccgacgcgaagccagcgcccaaaagagctaccgcaagtgagcagccactggctcaagagcctcctgcctccggcggctccccggccaccacgaaggagcagaggggccgggcactccccggtaagaatctgcctagtctcgctaaacaaggagcaagtgatcccccgaccgtggcctcccgccttcccccagtgacacttcaggtgaaaattccctccaaagaggaagaggcagacatgtcatctcccacccaaaggacttacagctcatcactgaaacggagcagccccagaaccattagttttagaatgaagcctaagaaggaaaactcggaaaccacgctgacgaggtccgccagcatgaagctgccagacaacactgtgaagctgggggaaaagctggagcgctatcatacggctattcgaagatctgagagcgttaaaagccgtggtctgccctgtaccgagctctttgtcgctcccgtgggtgttgcctcaaagcggcatctcttcgaaaaggaactcgctggccagagtagggccgaacccgcgtcaagtcgtaaagaaaacttgaggctttccggcgtggtgacatctagactgaacctttggatcagtagaacccaagagagtggagatcaggaccctcaggaggctcagaaggcttcttccgcaaccgagcgcactcagtgggggcagaagtctgactcatccctggacgccgaggtgtag

SEQ ID NO: 9046 - DNA, 1782 bp, synthetic construct
  misc_feature 1..1782: note = source = /note="Description of Artificial Sequence: Synthetic coding sequence"
  source 1..1782: mol_type = other DNA
atgaaggccgacctgaagcagcaccaccaccactggagcatcttctcatacattcggctccgtctgccttccatgttacttttgttttctgtaatccttatcagttgggtttctacggtgggcggcgaagggactctttgtgattttcctaaaatccaccatggatttctctatgatgaagaggattacaaccccttttcacaggtgcctactggtgaggtgttctattattcatgtgaatataatttcgtgtctccgagcaagagcttttggacgcggataacttgcaccgaagaagggtggtcccctactccaaaatgtctacggatgtgctcattcccatttgtgaagaacggccattccgagagcagcggcctgattcatctcgagggtgataccgtgcaaatcatctgcaatactgggtatagcctccaaaataacgagaagaatatctcctgtgtcgagagagggtggtcaactccaccgatttgcagcttcaccaagggcgagtgccacgtccccattctcgaggctaacgtcgacgcccagcctaagaaagagtcatacaaggtcggggacgtcctgaagttctcctgccgaaagaacctgatcagggtcggctctgattccgtgcagtgttatcaattcggttggagtccaaacttcccaacctgcaaggggcaggtgcggtcttgtgggcctccccctcagttgagtaacggtgaggtcaaagagatacgcaaagaggagtatggtcataacgaggttgtcgagtatgactgtaacccaaacttcattattaatggccccaagaagatccaatgcgttgatggagaatggactaccttgccgacctgcgtggagcaggtaaaaacctgtggctatatcccagagctggagtacggatacgttcagccctctgtgccaccatatcagcacggcgtcagtgtagaagtgaattgtaggaacgagtatgctatgatcggtaataacatgatcacgtgtataaatggcatctggacggagctgcctatgtgtgtagcaacacatcagctaaagagatgcaagatcgccggggtgaacatcaaaaccctcctgaagctgtctggcaaagaatttaatcacaatagccgaatccgataccgttgtagcgacatttttagatatcgccactctgtatgtatcaacggcaagtggaaccccgaggttgattgcacagagaagagagaacagttttgcccaccacccccccagattcccaatgcccaaaatatgaccaccacagttaattatcaagacggggaaaaggtcgcggttctgtgtaaggaaaactatctgctgcctgaggccaaggaaatcgtgtgcaaagatggacgctggcagagcctcccccggtgtgtagagtccacggcctattgcggcccacctccatcaatcaacaatggtgacacaaccagcttccccctaagcgtgtatccgcccggaagcactgttacctacaggtgccagagcttttacaaactccaaggttcggtcactgtgacatgcagaaataaacagtggagcgagccgccaagatgcttggacccatgcgtcgtgtccgaggagaacatgaataagaacaatatccaactcaaatggagaaatgacggaaaactatacgcaaagacaggtgacgccgttgagtttcaatgtaagttcccacacaaggcaatgattagcagcccgcctttccgggctatatgccaggaaggcaaatttgaatacccgatatgtgagtag

SEQ ID NO: 9047 - DNA, 2301 bp, synthetic construct
  misc_feature 1..2301: note = source = /note="Description of Artificial Sequence: Synthetic coding sequence"
  source 1..2301: mol_type = other DNA
atgatctggcggagccgggccggcgccgagctgttcagcctgatggccttatgggaatggattgctttatccctccactgttgggttctagccgtggccgcagtttccgaccagcatgcaacctcgccttttgattggctgctctctgataagggtccctttcacaggagccaggagtacaccgattttgtcgaccggagccggcaggggttctccacccggtataagatttacagggagttcggcaggtggaaagttaacaatctggcagttgaacgccgaaattttctgggctctcctcttccactcgccccagaattctttagaaacattcgcctgctcgggcgaagacctactctgcagcaaatcaccgagaatctaatcaaaaaatatgggacacattttctgctgtctgctacccttggaggtgaggagagtttgactatcttcgtcgataagcggaagctgagtaagcgcgctgagggtagcgactccactacaaatagctcatcagtaacactggaaactctacatcagctggctgcatcatatttcattgaccgagattctacactgcggagactgcaccatattcaaatcgcctctaccgctatcaaagtgactgaaacccgaacaggaccgctgggttgcagcaactatgataacttggactctgtctcgagtgtgctcgtacagagcccagagaacaagatacagttgcagggactccaggtgttgctgcccgattacctgcaggagcgcttcgtgcaggcagcattatcctacattgcatgtaactcagaaggggaatttatttgcaaagagaacgactgctggtgccactgcggtccaaagttcccggaatgcaactgccctagcatggacattcaggctatggaagagaacctgttgcggatcacagaaacatggaaagcctacaactccgacttcgaagaaagcgatgaattcaaactgtttatgaagaggctcccgatgaactacttcttaaacacaagtacaattatgcacctgtggactatggatagtaacttccaacgccggtacgaacaattagagaactcaatgaagcaactcttcctcaaggcccagaaaattgtgcataagctgttctccctttctaaaaggtgccacaaacaaccgcttatttctttgccccggcagaggacctctacctactggctgactcggatccagtccttcctctactgtaatgaaaatgggctgcttggctcattcagtgaggagactcatagctgtacatgtccgaacgaccaagtggtgtgtaccgcattcctaccctgtaccgtcggcgatgctagcgcatgcctgacttgtgcccctgacaaccgcacccggtgcggcacgtgtaacacaggatatatgctatcgcagggcctgtgtaaacccgaagtcgcagaatccacagatcattacatagggttcgagactgacttgcaggacctcgagatgaaatacttgctgcagaagacagatagaaggattgaagttcacgccatcttcatctcaaacgacatgagattgaatagttggtttgaccccagttggaggaaacggatgcttctgacacttaaaagtaacaagtataaatccagccttgtgcacatgatcctcgggctgagcttgcagatctgcctcactaagaattccaccctcgaaccagtcttggctgtgtacgtgaacccttttggaggtagtcactctgagagctggttcatgcccgttaacgaaaactcttttcccgactgggagcggacaaagctggatctgcctctccagtgctacaactggactctgactctgggcaataagtggaagaccttttttgagacagtgcatatttatctgcgcagtcgcatcaagtctaatggccctaatggcaatgaatcgatctattacgagccactggagttcatcgacccatcaagaaatctcgggtacatgaaaataaacaacattcaggtgttcggctactctatgcattttgatcctgaggctattcgcgatctcattctccagctggattacccttacacccaagggtcgcaggacagtgctctgctgcaactgctcgaaatcagagaccgcgtaaacaagctgtccccacccggacagaggcgcttggatcttttcagctgcctgctgagacacagactgaagttaagtactagtgaggtggtcagaattcagtccgccctacaggcatttaacgcgaagctgcctaataccatggactacgacacaactaagctctgttcttag

SEQ ID NO: 9048 - DNA, 1815 bp, synthetic construct
  misc_feature 1..1815: note = source = /note="Description of Artificial Sequence: Synthetic coding sequence"
  source 1..1815: mol_type = other DNA
atgcggcggtgcaacagcggcagcggccccccccccagcctgctgttgttactgctttggctcctggccgtgcccggcgccaatgcggctcctaggtccgccctgtactccccatctgatccgttgactctcctccaggcggacaccgttaggggtgctgttttggggagtagatctgcttgggcagtggaattcttcgcctcttggtgtggacactgtatagcattcgctcccacctggaaagcacttgcggaggacgtaaaagcctggagaccagcactctatcttgctgccctcgattgtgcagaggagacaaacagtgcggtttgtcgagatttcaacatacctggctttcccaccgtgcggttttttaaagcctttacaaagaacggctccggggctgtttttccggtggcaggggccgacgtccaaacactccgagaaaggcttatcgatgctctcgaaagccaccatgacacctggcctcctgcatgtcccccgctcgagcctgccaagctcgaagagattgacgggttctttgcccgaaataatgaggagtacctagccctaatttttgaaaaagggggatcatacctgggcagggaggtcgccctggatctctctcagcataagggagtcgcagtacgccgcgtgctgaacacagaggccaatgttgtgaggaagttcggagttactgacttccccagctgctacctgttgtttcgcaacggcagcgtttcaagagtgcccgtactgatggaatcccgctctttctatacggcttatctgcagaggctgtccggactcacccgggaggccgcccagactaccgttgctcccactactgccaataagatagcccctaccgtatggaaactggcagatagatccaagatctatatggctgatctggagagtgcgcttcactacatccttcgcattgaagtgggtagatttccggtgctggaggggcaacggctagttgcattaaagaagttcgtcgctgtgcttgccaagtatttccctgggcgccctcttgtgcaaaactttttgcactccgtgaacgagtggctgaaacgtcagaagaggaataagatcccgtattcatttttcaaaaccgctctcgacgatcgcaaggagggtgctgtgctcgcgaagaaagtgaattggataggatgtcagggctctgagcctcattttagagggttcccatgcagcctctgggtcctcttccatttcctgaccgtgcaggcggcccggcagaatgtggatcactcgcaggaagccgccaaagcgaaagaggtcctgcctgctatccgcggttacgtgcattactttttcggatgtagggactgcgcatcacatttcgaacaaatggcagcggctagtatgcatagggtcgggtcgcctaacgcagcggtgctgtggctctggtccagccacaacagggtcaacgctaggcttgccggagctccttctgaagaccctcaatttccgaaagtccaatggccgcccagagaactctgttctgcctgtcataacgagagactggacgttccagtctgggacgtcgaagcgaccctcaatttcctcaaggctcacttctctccttcaaacataatactggatttcccagccgcaggctcagccgcgagacgggatgtgcagaacgtcgcggcagctccggaacttgcaatgggggccttggagctggagagcaggaattctaccctcgaccccgggaagcctgagatgatgaagagcccaaccaacacaacccctcatgtgcccgctgaaggcccggagttgatctag

SEQ ID NO: 9049 - DNA, 2244 bp, synthetic construct
  misc_feature 1..2244: note = source = /note="Description of Artificial Sequence: Synthetic coding sequence"
  source 1..2244: mol_type = other DNA
atgcggcggtgcaacagcggcagcggccccccccccagcctgctgcttttattgctgtggttacttgccgttcccggcgcgaatgccgctccaaggtccgccttgtattccccatccgacccacttactctgttgcaggcggataccgtaagaggagcagtgctgggcagccgttctgcgtgggcggtagaatttttcgcctcctggtgtgggcattgtatcgcttttgctccaacttggaaagccctggcagaggatgtgaaggcatggagacccgccctgtatctggctgccttggactgcgctgaggaaaccaacagcgcagtgtgtcgcgattttaacatacccggttttcccacagtgcgcttcttcaaggccttcactaaaaatggttcaggagctgtgtttccagtggcaggggcagacgtgcagactctccgtgaacggctgatcgatgcgctggagtcccaccacgacacttggccgcctgcctgccctcctctggaacccgccaaattggaggagattgacggctttttcgcccgaaacaacgaggagtatctggccctgatcttcgagaaaggcggtagctacttggggagagaagttgccctggatttgtcccaacataagggcgtggcagtaaggcgtgttttgaatacagaggccaacgtcgtccgaaagttcggtgtcacggacttcccttcctgttacctgctctttaggaatggctccgtgtctagagtgcccgtcttgatggagtcgcgttctttctatactgcctacctacagagattatcaggcctaacccgggaagctgcccagactacagtggcccccaccaccgcgaacaaaatagctcccactgtgtggaagctggccgaccggagcaaaatctacatggctgatcttgagagcgccctgcactatatcctgaggattgaggtagggagatttcctgtcctggagggccagcgattggtggccctcaagaagtttgtggctgtactggccaaatactttccagggcgccctttagtgcagaacttcctccacagtgtaaacgagtggctcaagaggcagaagcgcaacaagatcccatacagtttctttaaaacagccttggatgacagaaaagagggggctgtccttgcaaaaaaagtgaattggattggctgccaaggctctgagccgcactttcgaggatttccatgctccctgtgggtgttgttccacttcctgaccgttcaggctgcacgtcagaatgtcgatcactctcaagaggcggccaaggctaaggaagtgctacctgctattcgagggtacgtccattacttctttggatgtcgggactgcgcgagccatttcgagcagatggcagccgcctccatgcatcgtgttggcagtcccaacgcagccgtgctctggttgtggtcgtcacacaatcgagtgaacgcccggctggcaggggcccccagtgaggatcctcagttccccaaagtgcagtggcctccacgtgagctgtgtagcgcctgtcataatgaaaggctggatgtccccgtgtgggatgtcgaggccacgcttaattttcttaaggcacacttcagtccgtccaacatcattctggattttcctgctgctggaagcgccgcccggagagacgtgcaaaacgtggccgccgcacccgagttggccatgggcgctctggagttggaatccaggaactctacgcttgacccgggcaaacccgagatgatgaagagtcctactaacaccaccccacacgtacccgcggagggacccgaagcaagtagaccaccaaagctgcatcctggcctacgggctgctccaggccaggaacctccagaacacatggctgagctgcaaaggaacgaacaggagcagcccctcggccaatggcatctgtctaaaagagatactggcgccgccttgctggctgaaagcagagccgagaaaaatagactgtgggggccccttgaggtccggagagtcgggcggagctccaaacagctcgtggacatccctgaagggcagctagaggccagggcaggacgcggcagggggcagtggctgcaggtgttaggcgggggattttcctacctcgacatctcattgtgtgtaggtttgtactccctctccttcatgggcctgctggccatgtacacatattttcaagccaagatacgagccctgaaggggcacgctggacacccagccgcatag

SEQ ID NO: 9050 - DNA, 1476 bp, synthetic construct
  misc_feature 1..1476: note = source = /note="Description of Artificial Sequence: Synthetic coding sequence"
  source 1..1476: mol_type = other DNA
atgaagaccttcacctggaccctgggcgtgctgttcttcctgctggtcgacacaggccattgcaggggcggacaattcaagattaaaaaaataaaccagagacgttacccacgggcaaccgacggaaaagaagaggccaagaaatgcgcttatacgttcctggttccagagcagcggattactgggccaatctgcgtaaataccaagggccaggacgcctccacgattaaggatatgattactaggatggatcttgaaaatctgaaagatgttctcagtcggcagaagagagagatcgatgtcttgcagctggtggtggatgttgatggaaatatcgtcaacgaggtcaaactgcttaggaaagaatctcggaacatgaacagtagggtgacacagctctacatgcagcttctccatgaaattatcagaaagcgagacaatagcctggagctttctcagctcgaaaataagatcctgaatgttactacagagatgttgaagatggctactcggtacagggaactggaagtgaagtatgcctcactgaccgacctggtgaataatcagagcgtgatgattactctgctggaggagcagtgcctgcgtatttttagccgacaggatacacatgtctctcctcccttggtgcaagttgtcccccagcacatcccgaattctcagcagtataccccaggtctgctgggtggcaatgaaattcagagggaccccggctatccgagggatctgatgccgcctccagatctcgcaaccagtccaacaaaatcaccttttaagattccccctgtcacgtttatcaatgagggtccctttaaagattgtcagcaagctaaggaagccggacattcagtgagcggcatatacatgattaagcccgagaattccaatgggccgatgcaactgtggtgtgagaacagcctggaccccggaggctggaccgtcatccagaagcggaccgatggctccgtcaatttttttcgcaactgggaaaactacaagaaggggtttggaaacatcgatggcgaatactggctgggcctcgagaatatttatatgctgtccaaccaagacaattataagcttctgatcgagttggaggattggtcagacaaaaaagtgtacgccgaatactcttcatttagactggagccagaaagtgaattctatcggctgagactcggtacataccagggaaacgctggcgacagcatgatgtggcacaatggtaagcagttcacaacccttgatagggataaggatatgtacgcaggaaattgtgcccactttcacaagggagggtggtggtataatgcatgcgcacatagcaacttgaatggcgtgtggtatcgtggaggccactatcggagcaagcatcaggacggaatattctgggcagagtatcggggtggtagctatagtctgcgagccgtccagatgatgatcaaaccaatcgactag

SEQ ID NO: 9051 - DNA, 2484 bp, synthetic construct
  misc_feature 1..2484: note = source = /note="Description of Artificial Sequence: Synthetic coding sequence"
  source 1..2484: mol_type = other DNA
atgatgtgcctgaagatcctgcggatcagcctggccatcctggccggctgggcactctgctccgctaattctgaattgggttggacccgcaagaaatccctggttgaaagagagcacctcaatcaagtcctgttggagggtgaacgatgctggctcggcgcaaaagtacgccgcccccgggcatcaccgcagcatcaccttttcggcgtgtatccatccagggccggcaattacctgagaccatatcctgtgggcgaacaagaaattcatcacaccgggcggtcaaagcctgacactgaaggcaacgccgttagcttagtgccaccggatctgaccgagaaccccgctggcctccgaggagctgtcgaagagcctgcagccccgtgggttggtgacagtcctatcggccagagcgaattgcttggcgatgacgatgcttatctgggcaaccagcgcagtaaagagtctttgggagaagctgggattcagaaggggtctgccatggcggcaaccactacaactgcaatttttacaaccttgaatgaaccaaaaccggaaacgcagcggcgcggttgggcgaagagtcgccagagaagacaggtctggaagcggcgcgctgaagacggtcagggggattctggcataagcagccatttccagccttggcctaaacactcactcaaacaccgtgtgaagaaatctccgcccgaggaatccaaccagaacgggggcgaaggatcctaccgcgaagccgaaacattcaatagccaggtgggactacctattctgtatttttcgggacggcgggaacgactactcctgagacccgaagtactcgccgaaattcccagagaggcctttaccgtggaggcttgggtaaaacctgaaggtgggcaaaataaccccgccatcattgctggggttttcgataactgtagtcacacagtttcagacaagggttgggctctgggaatacgatctggcaaagacaaaggtaagagagacgctcgcttttttttcagcttatgcacagacagagttaagaaggccacaattctgatttcacacagcaggtatcaacctggcacatggacccacgtagcagcaacttacgacgggcgccacatggctctgtatgtggatggcactcaggtggcatcaagtctggaccagtctggacctctgaacagcccctttatggctagctgccggagtctgcttctggggggcgacagttctgaggacgggcactatttcagagggcacttaggcacccttgtcttttggtcaaccgcgctgcctcagtcccactttcagcactcaagccagcactcctctggcgaggaagaagccacagatctggttttgacggcctctttcgaacccgtgaatactgagtgggtccctttcagagacgagaaatacccccggctcgaagttctccagggcttcgaacctgagcccgaaattctgtcacctttgcagccccccttatgcgggcagaccgtctgcgacaatgtggagctgatatcacagtacaacggatattggccactccgtggagagaaagtcataaggtatcaagtggtgaatatttgtgatgacgagggcctcaaccctatagtctctgaggaacaaataagactacaacatgaagccttgaacgaggcattctcaaggtacaacatttcctggcagctttcagttcaccaagtgcacaactctaccctgcgtcaccgcgtggtgcttgtcaactgtgaaccttccaaaatcggtaatgatcattgtgatcccgagtgcgagcaccctctcaccggatacgatggaggtgactgcaggctgcaagggcggtgttattcctggaatcgccgggacgggttatgtcatgtggaatgtaacaacatgctgaatgactttgacgacggcgattgctgcgacccccaggtggcggacgtgagaaagacatgtttcgatcctgactctcccaagcgggcttacatgtctgtgaaagaactgaaggaggccctccagctgaacagtactcacttcctgaacatttattttgccagctctgtacgagaggatctcgctggcgctgctacctggccctgggataaagatgcagtcacccaccttgggggcatcgttctgagccctgcatattacgggatgcctggccacaccgacaccatgattcacgaggtcggccacgtgctgggactgtatcatgtgtttaaaggagtgtctgaacgtgaaagttgtaatgatccttgtaaagagaccgtcccttccatggagaccggagatctatgcgctgacaccgcgcccacccccaagagcgaactatgcagagaacccgagccgacaagtgacacatgtggttttacgaggttccccggcgctccgtttaccaactacatgtcatacactgggattaccacagttcttttctgttttctacttagaatccacgggggtctctag

SEQ ID NO: 9052 - DNA, 5376 bp, synthetic construct
  misc_feature 1..5376: note = source = /note="Description of Artificial Sequence: Synthetic coding sequence"
  source 1..5376: mol_type = other DNA
atgatgtgcctgaagatcctgcggatcagcctggccatcctggccggttgggccctctgttcggctaatagtgaactgggctggacccgtaagaaaagcctggtagaaagagagcatcttaatcaggtgttactagagggggaaagatgctggctgggggcaaaggtacgccgcccacgggcgtcaccgcagcaccatctgttcggtgtttacccctccagggccggaaactacctccgaccatatccagttggtgagcaggaaattcatcacaccggtcgtagcaaaccagataccgaaggaaacgcggtgtcgctcgtccctccggatttaacagaaaaccccgctgggctccggggcgccgttgaagaacctgcagccccttgggtcggagattctcctatcggccagtccgagctcctgggtgatgacgatgcatacctgggaaatcagcggtctaaggagtccctgggtgaagctggcattcagaagggctcagccatggcagctacaaccactactgcgatatttacgaccttaaatgagccgaagcctgagacccagaggcggggctgggctaagtctaggcaaagacggcaggtgtggaaaagacgcgccgaggatggtcagggcgactccggcatctcctcccatttccagccctggcccaaacactctcttaagcacagagtgaagaagagtccacctgaagaaagtaatcaaaatggcggtgaaggttcctatagagaagccgagacctttaacagtcaggtgggcctgcccattctatacttttctggcagaagggagcgactccttcttcggcccgaagtcctggctgaaatccctagggaggccttcaccgtagaggcctgggtaaaacccgaaggcggacagaataaccccgctattatcgctggcgtttttgacaattgctctcacacggttagcgacaaagggtgggcactcgggatccgcagcgggaaagataagggcaagcgggacgcgcgcttctttttttctttgtgtactgatcgcgtgaaaaaggcaactattctcatttcccattctcgctatcagccaggcacttggacacacgtggcagctacatacgatggccgacatatggcattgtacgtagatgggactcaagtggcgtctagcctcgatcaatccggccctttgaactcaccattcatggccagctgtcggtcgctgctgttggggggtgacagttccgaagacgggcattacttcagaggtcatctgggcacccttgttttttggtctacagcactccctcaatctcattttcaacacagtagccagcatagcagtggggaagaggaggcaactgacttggtcttaacggcctcctttgaaccggttaacacagaatgggttccctttcgagacgaaaagtacccaaggctcgaggtacttcagggcttcgaacctgaaccagaaattttgtctccgttacaaccacctctatgcggccagacagtctgtgacaatgttgagcttatctctcagtataacgggtattggcctctgcgaggggagaaagtgatcaggtaccaagtcgtgaatatttgtgacgatgaggggctgaacccgatagtcagcgaggaacagatccggctgcagcacgaagccctcaacgaagcattctctaggtataacattagctggcagttatctgtgcaccaggtacataacagcacattgcggcaccgcgtggttctggtgaactgcgagcccagcaaaatcggcaatgaccattgtgatccagagtgcgagcacccgctgacagggtatgatggcggtgactgccgtctgcaagggcgctgttattcctggaataggcgggatgggctgtgccacgtggaatgcaataatatgctgaatgacttcgatgacggcgattgctgcgacccacaggtggcagatgtgaggaagacatgctttgatcccgattctcccaagagggcatatatgtctgtcaaggaattaaaagaggcactccaacttaacagcacacatttcttaaacatatatttcgcttcctcagtgcgtgaggatctggcaggggccgccacctggccctgggataaagacgcagtgactcacctgggggggattgtattgtctcccgcttattacgggatgcctgggcataccgacacaatgatccatgaagtgggccacgttctaggcctgtaccacgtgttcaagggcgtgagtgagcgcgaaagttgtaatgatccttgcaaggagactgtgcctagtatggagactggtgacctctgcgcggataccgcaccaactcctaaaagcgaactgtgtagagagccagagccgacttcagacacctgcggttttactcgattccccggggccccatttacaaattatatgtcctacacagacgacaactgtaccgacaacttcacacccaatcaggttgcacgaatgcactgctacctggacctggtctaccagcaatggacggagagtaggaaacccacccccatccctattccacctatggtaatcgggcagactaacaagtctctaacaatccactggctgccaccaatatcgggtgtggtgtatgatcgagccagtgggagcctctgcggtgcctgtaccgaggacggaaccttcaggcagtacgtccacaccgccagttcgcggcgcgtatgcgactcatcgggttattggacccctgaggaggcggtcggtccacccgacgttgaccagccttgtgagccgagcctacaggcttggagcccagaagtacacctgtatcatatgaatatgactgtaccctgcccgacggagggttgtagcctggaactcctttttcaacacccagtacaggccgacacgctgactctttgggttacttccttctttatggaaagcagtcaagtgctgtttgacactgagatcctgctagaaaataaggaatctgtccatctcggtcctcttgacaccttctgcgacattccactaaccatcaaactgcatgtggacggaaaggtgtcaggggtcaaggtctatacattcgatgaacgaattgaaattgatgccgcactgttgacctcccaaccgcactccccattatgtagcggctgtcgacctgtgcggtaccaggtgttaagggatccgcctttcgcttcaggactgcctgtagtagtcacgcactcccataggaaattcactgacgtagaggtgacacccggtcagatgtaccagtaccaggttctagctgaggcggggggcgaacttggcgaagcctctcctccactgaaccatatccatggagcaccatattgtggggacggaaaagtctccgaacgcctaggtgaagaatgtgacgacggggacctggtgagtggagatggttgtagcaaggtgtgcgaacttgaggaaggcttcaattgcgtgggcgagccttctttatgttatatgtatgagggggatggaatctgtgagccttttgagaggaaaacttctatcgtggattgcggtatttatacacctaagggctacctagaccagtgggctacccgcgcttatagctcacatgaggacaaaaagaagtgcccggtgagcctcgtcaccggcgagcctcactccttaatctgcacttcctatcaccctgacctccctaaccacaggccattgaccggatggtttccttgtgtggccagcgagaatgagacgcaagatgatcgtagcgagcagcccgagggttccttgaaaaaggaagatgaagtgtggctcaaggtgtgtttcaacagacccggcgaggccagagcgattttcattttcctgactacagatgggcttgtgccaggggagcatcaacaaccaaccgttacactgtacctgaccgacgtcaggggatcgaatcacagccttggtacctatggactgagttgccagcataatcctttaatcataaacgtgacacaccaccagaatgtgctctttcatcacaccacatcagtcctgctcaatttcagctcaccaagggtcggcatcagcgccgttgctctccgcactagctctagaatcggactgtccgctccttctaactgcattagcgaagatgagggccagaatcaccagggacaatcatgtatacaccggccttgcggtaagcaagactcttgccccagtctcttgctggaccacgccgacgtcgtcaactgtacctctattgggccggggctgatgaaatgcgccatcacatgccagagggggtttgccctacaagcttcttctggacagtacattagacccatgcagaaggagatcctgcttacgtgctcaagcggccactgggatcagaacgtgtcttgccttcctgtggattgtggggtacccgatccaagtctggtgaactacgcaaattttagctgctcagaagggacgaaatttcttaagaggtgtagtatcagttgtgtaccacctgcaaagctgcaggggctttcaccctggctgacatgcttggaggacggactgtggtcactgcctgaggtttattgcaagctggaatgcgacgccccccctattatcctgaatgccaaccttctgctaccccattgccttcaggataaccatgatgtcggtaccatctgcaaatacgagtgcaagcctgggtactatgtagccgaaagtgctgaaggcaaggttaggaataagctgctcaagatccaatgcctggaagggggaatctgggagcagggctcctgtatacccgtggtatgcgagcctccaccacctgtgtttgagggtatgtatgagtgcaccaatggattcagcctcgattctcagtgcgtccttaattgcaatcaagagcgggaaaaactgcccattttgtgtactaaggaaggtctgtggacgcaggagtttaagctgtgtgagaacctccagggagagtgtcccccacctccttctgagctgaatagcgtggagtacaagtgcgaacagggctatgggatcggcgcagtgtgctcaccactctgtgtaatccctccttccgaccccgtgatgctgccggagaacattaccgccgacacgctcgagcactggatggagcccgtgaaagtacagtccattgtctgtacaggtaggcgccagtggcatcctgatccggtgctggtgcactgtattcagtcctgtgaaccctttcaagcggacggatggtgcgacactatcaataatcgggcctactgtcactacgacggcggggactgttgtagctcgactttgagctctaagaaggtgattcccttcgccgcggattgtgacctcgatgaatgcacatgtagagatcccaaagcagaggagaatcagtag

SEQ ID NO: 9053 - DNA, 702 bp, synthetic construct
  misc_feature 1..702: note = source = /note="Description of Artificial Sequence: Synthetic coding sequence"
  source 1..702: mol_type = other DNA
atgaaggaccccctggccaaggacgagcggatctacgtgaccaactactattacggtaacacgctcgtagagtttcgcaacctcgaaaatttcaagcaggggcgatggtctaacagctataaattgccatactcatggatcggcacgggacacgtcgtgtataacggagcattttattataatcgagcattcactaggaatatcatcaagtacgatctgaagcagcgatacgtggccgcctgggccatgttgcacgacgttgcctacgaggaggcgacgccctggcgctggcaggggcattcagacgttgattttgccgtggatgaaaacggtctatggctcatatatccagccctcgacgacgaaggcttctctcaggaagttattgtgctgtccaaactgaacgccgctgacctgagcactcagaaggaaacaacttggagaaccgggctgcgacgaaacttctatggcaattgcttcgtgatttgtggtgtcctgtacgccgtcgacagttataaccagagaaacgcaaacatctcatacgcctttgacactcacacgaacacccagatcgttcctcgcttactctttgaaaacgaatattcctatacgacccaaatcgactacaatccaaaagataggctgctctacgcatgggataatggacatcaggtgacctatcatgtaatcttcgcctattag

SEQ ID NO: 9054 - DNA, 579 bp, synthetic construct
  misc_feature 1..579: note = source = /note="Description of Artificial Sequence: Synthetic coding sequence"
  source 1..579: mol_type = other DNA
atgctgaagaagatcagcgtgggcgtggccggcgacctgaacaccgtcactatgaaactgggctgcgttctaatggcctgggcattatatctctctcttggcgttctgtgggttgcacagatgttgctggctgccagctttgaaactctgcagtgtgaaggaccggtgtgtacagaagagtcgagctgccacaccgaagatgacctgaccgacgctcgcgaagccggtttccaggtcaaggcctatacttttagtgagccatttcatctcatcgtgagctacggcgctagcagctccgccgcaccacctaccttgaatcctgcccctcagaagagcgcagctccaggaaccgccccagaagaggcccctgggcccctgcccccccccccgaccccatcaagcgaagatcccggtttctcatctcctctcgggatgccagatccacatctttaccatcagatggggctcctcttaaagcatatgcaggatgtgcgtgtcttactaggacacctgctcatggaattgagggaactgtcaggtcaccgcaaacccggaacaacaaaggccacagcagaatag

SEQ ID NO: 9055 - DNA, 459 bp, synthetic construct
  misc_feature 1..459: note = source = /note="Description of Artificial Sequence: Synthetic coding sequence"
  source 1..459: mol_type = other DNA
atgctgctggccgccagcttcgagaccctgcagtgcgagggccccgtgtgcacagaggagagtagttgtcacaccgaagatgacttgaccgatgcccgcgaagcagggtttcaggtgaaagcctataccttttctgagccctttcacctgattgtcagctatggcgcaagctcttccgcggccccacccacgttgaaccccgcccctcagaagtccgcagctccaggaacagccccggaggaagctcccggtcctttacctccacctcctacgcctagctccgaagaccctgggtttagttcgccattgggcatgcccgatccacatctctaccaccaaatggggttgttgctgaagcacatgcaggatgtgcgggtcctcctggggcatctcctgatggaattgagggagctttccgggcatagaaaacctggcacaaccaaagccactgccgaatag

SEQ ID NO: 9056 - DNA, 1098 bp, synthetic construct
  misc_feature 1..1098: note = source = /note="Description of Artificial Sequence: Synthetic coding sequence"
  source 1..1098: mol_type = other DNA
atgaagctgggctgcgtgctgatggcctgggccctgtacctgagcctgggggtgctctgggtcgcccagatgcttctggcagccggttgtcacgccgccgcatccttcgaaactctccaatgtgaaggacctgtgtgtaccgaagagtcatcctgccacactgaggatgacctgaccgatgcgagggaggcaggcttccaggtgaaagcatatacattctctgaaccctttcacctgatagtgagttatgattggctgatattgcagggtccagctaagccagtcttcgaaggggatctgctggtgctgaggtgtcaggcttggcaggactggcctttgacgcaggttaccttctatagggacggaagtgcccttggccctccaggtccaaacagggagttcagcataacggtggtccaaaaggctgattctggccactaccactgctccggaatctttcagagccccggcccgggaattcccgagacagcctctgtggtcgccatcacagtgcaggaactgtttccagccccaattctgagggccgtaccttcagctgagccgcaggcaggctcacccatgactctttcctgccagacaaaactcccgttgcaacggtcagccgctaggctcctcttttccttctacaaggacggacgcattgtccagagcagggggctttcttctgaatttcagattccgaccgctagtgaagatcattctggctcttactggtgtgaggctgcaactgaagacaatcaggtgtggaaacaaagtccacaattggagatccgggtgcaaggcgcaagttcgtcggccgcccctccaacgctgaatccggccccgcagaaaagcgccgccccgggcaccgcaccagaggaggcaccgggacccctcccacctcccccgacgccgtcatctgaggacccagggttctcttctcctttgggcatgcccgacccccatttgtatcaccagatgggtttgctgctcaagcatatgcaagatgtgagggtgctcctgggccacctgctaatggagctccgcgaactttctggacatagaaagcccggcactacaaaagcaacagccgagtag

SEQ ID NO: 9057 - DNA, 711 bp, synthetic construct
  misc_feature 1..711: note = source = /note="Description of Artificial Sequence: Synthetic coding sequence"
  source 1..711: mol_type = other DNA
atgctgaagaagatcagcgtgggcgtggccggcgacctgaacaccgtgaccatgaaacttggatgcgttctgatggcttgggccctgtatttatctctgggtgtgctctgggtggcccaaatgctgctggagctgttccccgcccctatcctccgcgctgtgccttccgcagagcctcaagccggttcgcccatgacactgagctgtcagaccaaactccctctgcagcggagtgctgccaggctgctgttcagcttctacaaggacgggcgcattgtccagagcaggggactgagcagtgagtttcagattcccacagcctcggaggatcacagcgggtcgtactggtgcgaggccgcaaccgaggacaaccaggtctggaaacagtccccacagttggagatccgggtacagggtgcgagctccagcgctgctccacctactctaaatcccgcgcctcaaaagtctgccgctccaggcacagcccctgaagaagcacccggtcccctccccccccctccaacccccagctctgaagaccctgggttctctagtccgttgggaatgcccgatccacacctttaccatcagatgggcctgcttttgaaacatatgcaggatgtgcgagtgttacttggccatttactcatggagcttagggagctatccggtcatcgaaaaccggggacgaccaaagccactgccgagtag

SEQ ID NO: 9058 - DNA, 1149 bp, synthetic construct
  misc_feature 1..1149: note = source = /note="Description of Artificial Sequence: Synthetic coding sequence"
  source 1..1149: mol_type = other DNA
atgctgaagaagatcagcgtgggcgtggccggcgacctgaacaccgtcacaatgaagctggggtgcgtgctcatggcatgggctctgtacttgtctttgggggtactctgggtcgcacagatgttgttggctgccggctgtcacgccgctgctagctttgaaacactgcagtgtgagggacccgtgtgcacagaagaatcatcttgtcacaccgaggatgacttaacagatgcccgcgaggccggtttccaagtcaaggcctacacattttcagagccattccatctaatcgtgtcctacgactggctgatcctccagggtcctgcaaaacccgtctttgagggtgatctgcttgtgctccgctgccaagcatggcaggattggccgctcactcaagtaacattttaccgcgacggatccgccttgggaccccctggacctaatagagaatttagcatcacagttgtccaaaaggcggatagtgggcattaccattgcagcggcatctttcaatctcccggtcccggaatacccgagaccgcatcggttgtagcaatcaccgtccaggagctcttcccagcgccaatactccgcgcggtgccctcggcagagccccaggcgggtagtccgatgaccctttcgtgtcagactaagctgccactgcagagaagtgctgctcgccttctattttctttttacaaggatggtaggattgtacagagtcgggggctgagttccgagttccagatccccaccgcctcagaagaccattcaggatcgtattggtgtgaagcggctacagaagacaatcaggtatggaagcagagcccacagcttgagatccgagtgcagggggcatcatcttccgctgccccacctactctgaatcctgcacctcaaaagtctgccgcccccggcaccgcacctgaagaagctcctgggccattgccaccaccaccaactccctccagtgaggaccctgggttctcctctccgctgggaatgccagatccccacctgtaccatcagatggggttgttactcaagcacatgcaggatgtacgagtgttgttggggcacctcctcatggaactgcgggaactcagcggtcatcgcaagccgggaaccactaaggcaactgcagagtag

SEQ ID NO: 9059 - DNA, 738 bp, synthetic construct
  misc_feature 1..738: note = source = /note="Description of Artificial Sequence: Synthetic coding sequence"
  source 1..738: mol_type = other DNA
atgagccggctgcgggccctgctgggcctgggcctgctggtggccggaagccgcgttccgaggatcaagtctcagacaatcgcctgtcgttccggccccacctggtggggcccccagagactcaactccggtggaaggtgggacagcgaggtcatggcatctacagtcgtgaaatatctgtcgcaagaagaggcacaagccgtcgatcaggaattattcaacgaataccagttcagtgtcgatcagcttatggagctggccggcctgtcttgcgctaccgcgatcgccaaagcctatcccccaaccagtatgagccggtcaccgcccacagtactcgtgatatgtggacccggtaacaatggcggggacggcctcgtgtgtgcgcgccatctgaaactgttcggctacgaacccactatctattatcccaagcgaccaaacaagccactcttcactgctctcgtaacacaatgccagaaaatggacatcccgtttctcggggagatgccagccgagccgatgactatagatgaattgtatgagctagtcgtcgatgccatctttgggttttctttcaagggagacgtccgagaaccatttcactccattctgagtgtgctaaaaggtctgacagtccccattgcctctatcgacataccttcgggggcaggcatacagaaagtgggttgggggcgcctggggccctaccctccagattcctgccctcaccaagtgtag

SEQ ID NO: 9060 - DNA, 783 bp, synthetic construct
  misc_feature 1..783: note = source = /note="Description of Artificial Sequence: Synthetic coding sequence"
  source 1..783: mol_type = other DNA
atgagccggctgcgggccctgctgggcctgggcctgctggtggccggctcgcgtgtccctcgaatcaaaagtcagacgattgcctgtcgctctggccccacctggtggggtcctcagcgattgaactccggaggcagatgggatagcgaggtcatggcctctactgttgtgaaatatttgtcccaggaggaggcccaggccgtggatcaggagctctttaatgagtaccagttcagtgtagatcagctgatggagttggcgggtctcagctgtgctaccgccatcgcgaaggcttaccccccgacaagtatgtccagatctccaccaaccgtgctggttatctgcgggcccgggaataatgggggcgacgggttggtgtgtgcaaggcacctgaaattgttcgggtacgaacccaccatatattacccaaaaagacctaacaaacccctctttaccgccctcgtgacccaatgccaaaagatggatattccgttcctgggcgagatgccagcagagcttcagggaagatgtagcggaactgtcccgcaacatccagagtgtccggaagggacgcactgtgcgcattgccagcatcgccatagcctaagaatgggcagaggagaaggaaagtgctggagagatcctgctcggctcgcacatattccgcattctccacaaaagatctgcaatccagtctatagaagccttccactgccaggtgggtcattctgtgcaacctgtagtggggaagaagttccagctgaacccgccacattgccatag

SEQ ID NO: 9061 - DNA, 867 bp, synthetic construct
  misc_feature 1..867: note = source = /note="Description of Artificial Sequence: Synthetic coding sequence"
  source 1..867: mol_type = other DNA
atgagccggctgcgggccctgctgggcctgggcctgctggtggccgggtcaagagtgccccggataaagagtcagaccatcgcctgtcgcagtggcccgacatggtggggaccacagcgcctaaactctggtgggcgatgggactctgaggtcatggccagcaccgtggttaagtatctgtcccaggaggaggcccaggcggtagaccaggagctgttcaacgagtatcaattttctgttgatcagctgatggaacttgccgggttgtcttgcgcgaccgcaatagccaaggcttacccgcctaccagcatgtcacgtagcccccctactgttctggtgatctgcggaccaggaaataatgggggtgacggcctggtctgtgcacgccacttgaaactctttggttatgagcccacgatctactaccctaaaaggcccaataaacctttgttcacggccctagttacacagtgtcagaaaatggatatcccatttttaggcgagatgcccgctgagcctatgactatcgacgaactctacgagctggtcgtggacgctatttttgggttctcgttcaagggggacgtccgcgaaccatttcattcgatcctatctgttttgaaaggattgaccgtgcccattgcgagcatcgatattccgtctggctgggacgtcgaaaagggtaacgccggagggattcaacccgacctacttatcagtctcaccgccccaaagaagtccgccacccagtttactggtcgatatcactatctaggaggaaggttcgtgccgccagccctcgagaaaaagtaccagttaaacctgcctccctaccccgacacggaatgcgtgtatcgtctgcagtag

SEQ ID NO: 9062 - DNA, 879 bp, synthetic construct
  misc_feature 1..879: note = source = /note="Description of Artificial Sequence: Synthetic coding sequence"
  source 1..879: mol_type = other DNA
atgcacctgcggctgatcagctggctgttcatcatcctgaacttcatggagtacatcggatcccagaatgcttcgagaggcaggagacaacgacgcatgcatcctaacgtatcgcagggctgccagggggggtgtgcaacatgcagtgactataacggctgcctcagttgtaagccacgcttatttttcgccctggagcgcatcggaatgaaacagatcggagtgtgtttgtcaagctgtccgtcaggatactacggcactcgttacccagacattaacaaatgcactaaatgcaaagccgactgcgatacttgtttcaacaagaacttctgtacaaagtgtaaatcgggtttctacctacacttaggcaagtgcctcgacaactgtcccgagggcttagaggctaacaaccacaccatggagtgcgtgtcgatagtccactgcgaggtgtcggagtggaatccttggagtccgtgcaccaaaaaaggaaagacatgcggcttcaaacgcggcacagagacacgcgttcgtgagattatccagcatccatcagccaaaggtaatctctgcccgcctactaacgaaacccgcaaatgcaccgtgcagagaaagaagtgccagaagggcgaacgcggcaaaaagggcagggagaggaaaaggaaaaaacccaataaaggtgagtccaaagaggctatccccgatagcaaatccctggaaagttcaaaggagataccagagcaacgagaaaataagcaacagcagaaaaagaggaaagtgcaggacaagcagaagtccgggatagaggtgacgctggccgagggattgactagcgttagtcaacgtacccagcctaccccttgtaggagacgatacctgtag

SEQ ID NO: 9063 - DNA, 2871 bp, synthetic construct
  misc_feature 1..2871: note = source = /note="Description of Artificial Sequence: Synthetic coding sequence"
  source 1..2871: mol_type = other DNA
atggagacccaggagctgcggggcgccctggccctgctgctgctgtgcttctttacaagtgcgtcccaggacctgcaggtcatagacctccttacggtaggcgaaagccgccagatggtagccgtcgccgagaaaatccggacagcactgctgacggctggggacatctacttgttgtccacgttccggctgccccccaagcaggggggcgttctgtttgggctctattccagacaggacaatacccggtggctggaggcttctgttgtggggaaaataaataaagtgctcgtccggtatcaacgcgaagacggtaaagtacatgctgttaatctgcagcaagctggactcgccgatggacggacccataccgtacttctgcggctgaggggcccatccagaccatctcccgcactccacctgtacgttgattgtaagcttggggatcagcacgcaggcttgcccgcccttgctcctattccaccagcggaagtcgacggtctagaaatacgcacagggcagaaggcttacctgcggatgcagggctttgtggagtctatgaaaatcatactggggggcagcatggctcgagtcggagctcttagcgaatgtcccttccagggagacgagtctatccatagtgcagtaacgaatgctttgcacagcatcttgggcgaacagacaaaagctctggttacccagctcacactgttcaatcaaattctcgttgagcttagggatgatatcagggaccaggtcaaggagatgagtctgattagaaacacaattatggaatgccaggtctgtggcttccacgagcagcggtcacactgttccccaaacccttgcttcaggggtgttgattgtatggaagtctatgagtatcccggttataggtgtggcccctgtccgcccggcctccagggtaacggcacacattgctctgatatcaatgaatgtgctcatgcagacccttgtttcccaggatcctcctgcattaacacaatgccaggatttcattgtgaagcatgcccccggggctacaaaggaacacaggtgagcggcgtaggcatcgattacgcccgcgccagtaaacaggtatgcaacgacatcgatgaatgtaatgatgggaataacgggggctgtgaccctaattctatctgcactaataccgtggggtcctttaagtgtggaccctgtaggctgggcttccttggtaatcaatcccagggctgcctgccggcgaggacctgccactcccccgcccacagcccttgtcacatacatgcccattgcctcttcgaaagaaacggcgccgtgtcttgccaatgcaacgtcggatgggctgggaatggcaatgtatgtgggacagacaccgacatcgacggctatccagaccaggccctcccctgcatggataacaataagcattgcaagcaggataactgtttgttgacccccaactctgggcaggaggacgcagataacgatggtgtgggggaccagtgcgacgacgacgcagatggggacggcatcaagaatgtcgaagataactgtcggctgtttcctaacaaggatcagcagaactccgatacggattcattcggggatgcctgtgataattgccctaatgtcccaaacaacgatcaaaaagacacagatggaaacggggaaggtgatgcgtgcgataatgatgtcgacggcgatgggattccgaacgggctggataattgcccgaaggtgcccaatcccctccagactgacagagacgaagacggggtaggcgacgcttgcgactcatgtcccgaaatgtctaatccaactcagactgacgccgatagtgatctggttggagacgtttgcgataccaacgaggactcagatggcgacggacaccaggacactaaggataactgcccccagcttcctaattccagtcagctggatagtgacaacgatggactcggcgacgagtgcgacggtgacgatgacaacgacggaatccctgactacgtgccaccagggcccgataattgccgtctcgtccctaatcctaaccagaaggacagtgatggtaacggagtgggcgatgtgtgtgaagatgatttcgacaacgatgccgttgtagacccactggacgtatgccctgagtcagcagaggtgactcttaccgactttcgtgcataccagactgtggttcttgacccggagggagatgctcagatcgaccctaattgggtggttctcaaccagggtatggaaattgtgcagacgatgaattctgatcctggtctggcagtgggttacacggctttcaatggtgtggactttgaaggcaccttccatgtgaatacggtcacggacgatgactatgccggttttctgttctcttaccaggattctggtcggttttatgtggttatgtggaaacagacagaacagacttattggcaagccaccccatttagagccgtggcgcagcctggcctacagctgaaagccgttacctccgtgtcaggacctggcgaacatcttcgcaacgccttgtggcatacaggacacactcccgaccaggtgcggctgttgtggactgatccccgaaatgtgggctggcgcgataaaacgtcctacaggtggcagctgctccaccgaccccaggtcggttatatacgggtcaagctgtatgaaggcccccagttggtggctgactccggtgttattatcgacacatcaatgcgcggcgggcgcctgggcgtgttctgcttcagccaggagaacattatttggtccaacctgcagtaccggtgcaacgataccgtccctgaggattttgaaccatttagacggcagttgctgcaaggccgcgtatag

SEQ ID NO: 9064 - DNA, 1110 bp, synthetic construct
  misc_feature 1..1110: note = source = /note="Description of Artificial Sequence: Synthetic coding sequence"
  source 1..1110: mol_type = other DNA
atgctgccctggctgctggtgttcagcgccctgggcatccaggcctggggcgacagcagctggaacaagactcaagcaaaacaggtcagcgaaggattacagtatttgtttgagaacatcagccagctcaccgagaaagacgtctcaaccacggtgtcaaggaaggcgtggggtgctgaagcagtcggctgcagtattcaattgacaacacctgtgaacgtgctggtgatccaccatgtacctggactggaatgccatgaccagaccgtttgctcacagaggctccgcgagcttcaggctcatcatgtccacaataactccggctgtgacgtcgcatataacttcctggttggcgacgatggtcgcgtgtacgagggagttggatggaacatccagggcgtgcatacccagggctataacaatatctcactgggattcgcattttttggtactaaaaaggggcatagtccttctcctgcagcattaagcgcaatggagaacttaattacatacgccgtccaaaaaggccatctgtccagcagttatgtacagcccctgctgggaaaaggcgaaaattgcctggcaccgcggcagaagacctcccttaagaaggcgtgcccaggggtcgtaccacgaagcgtctggggtgcgcgcgagactcactgtcccagaatgacattgccagccaaatatggcattatcatccatacagccggacgcacctgcaacatctcagatgaatgtcggctgctggtgcgcgatattcagtccttctacattgaccgcttgaaaagttgtgatattggatataacttcctggtgggccaagacggcgccatctacgaaggtgttggttggaacgtccaagggagcagcacacccggctacgacgacatcgcactcggaatcacgtttatggggacgttcactggaattcctccgaacgccgcggctctggaggcggcccaggatctgatccagtgtgcaatggttaaagggtacttgacaccgaactatctcctggtgggccactccgacgtcgctcgcacactgtctccaggtcaggccctgtacaatataatttccacatggccccactttaagcactag

SEQ ID NO: 9065 - DNA, 675 bp, synthetic construct
  misc_feature 1..675: note = source = /note="Description of Artificial Sequence: Synthetic coding sequence"
  source 1..675: mol_type = other DNA
atggagaagatccccttcgtgctgggcggcaacctgcagggcggcgaactcgtggttgcgtatccatatgatctcgtgagatctccttggaagacacaggagcatacccccacacccgatgaccacgtgttccggtggctcgcctactcttacgcgtctacacatcggttaatgacagatgccagacgccgagtgtgccatactgaagacttccagaaggaagaggggacagtgaatggggcctcttggcatactgtggcaggctcgctcaatgatttctcctatctccacactaactgcttcgagctgtccatctatgtggggtgtgacaaatacccccacgaaagtcaactgcccgaagagtgggagaataatagggagtcccttatcgtcttcatggaacaggttcatagagggattaagggccttgttagggactcgcatgggaagggcataccgaacgccataataagcgttgaaggcattaaccacgatattaggacaggcagagtctcactacagaaattaagcttggcctgtcggcgggttagatgcgcattcgctctgtcctcatcctcaacaatgattgtccgcccaccccagccatatgggaccgtccctcactcatcaccagacccagttacgactaagatttcacccttgaggaatttctag

SEQ ID NO: 9066 - DNA, 285 bp, synthetic construct
  misc_feature 1..285: note = source = /note="Description of Artificial Sequence: Synthetic coding sequence"
  source 1..285: mol_type = other DNA
atgcccgtgatcgccggcggcatcctggccgccctgctgctgctgatagttgtcgtgctgtgtctgtattttaagatccataacgctctgaaggcagccaaagagcccgaggccgtagccgtgaagaaccacaatcctgataaagtgtggtgggctaagaattctcaggctaagaccatcgcaactgagagctgcccagcacttcagtgctgcgaaggctatcgcatgtgtgcttctttcgactccctgcccccatgctgctgcgatataaatgaaggactgtag

SEQ ID NO: 9067 - DNA, 285 bp, synthetic construct
  misc_feature 1..285: note = source = /note="Description of Artificial Sequence: Synthetic coding sequence"
  source 1..285: mol_type = other DNA
atgcccgtgatcgccggcggcatcctggccgccctgctgctgctgatcgtcgttgtgttgtgcctctactttaagattcacaacgcacttaaagctgcaaaggaacctgaagcggtcgcggtgaaaaatcacaatccagacaaggtttggtgggccaagaacagccaggctaagaccatcgccactgaatcttgtccggccttgcagtgttgtgagggttataggatgtgcgcgtcgttcgacagcctcccaccatgttgttgtgatattaatgagggcctgtag

SEQ ID NO: 9068 - DNA, 1026 bp, synthetic construct
  misc_feature 1..1026: note = source = /note="Description of Artificial Sequence: Synthetic coding sequence"
  source 1..1026: mol_type = other DNA
atggtgcccgccgccggcgccctgctgtgggtgctgctgctgaacctggggcctagagccgccggtgcgcaaggcttgacacagacaccaacagaaatgcagagggtatcccttcgctttggaggtcccatgactagaagctacaggtcgactgcgagaaccggcttgcctcggaagactcgtattatactcgaagacgaaaatgacgcaatggcagatgcagacaggctggcaggaccagctgctgccgagttgctggccgcgacagtgtctaccggtttctcaaggtccagcgccatcaacgaggaagacggatcctcggaagaaggtgtagttataaatgccggtaaagacagcacttcgcgggagttaccaagtgccaccccaaacaccgccggctcttccagcaccaggtttattgccaattcccaggagcctgagattcggctgacttcttcccttccaaggagccctgggcgctcaaccgaggatctgccagggagccaagctacactctcccaatggtctacgcccggaagcaccccctccagatggccaagtccttcccctaccgccatgccctcacctgaggaccttcgcctggtcctcatgccttggggtccttggcattgtcattgcaagagtggtacaatgagcaggagccgcagcgggaaactgcatggcctgtccggccgacttcgggtcggcgcactaagtcagctgagaactgagcacaagccctgcacctaccagcagtgtccttgtaacaggctgcgtgaggagtgcccactggacacctctctttgcaccgatactaactgtgccagccagtccactaccagtacgagaaccactaccacccccttccccactatccatctgagaagttcaccgagccttccccccgcctccccatgcccagccttggccttctggaaacgggtgaggattggtttggaagacatttggaacagtctctcatcagtcttcactgagatgcagcctattgatagaaaccagaggtag

SEQ ID NO: 9069 - DNA, 366 bp, synthetic construct
  misc_feature 1..366: note = source = /note="Description of Artificial Sequence: Synthetic coding sequence"
  source 1..366: mol_type = other DNA
atggacgtgctgttcgtggccatcttcgccgtgcccctgatcctggggcaggaatacgaggatgaggagcggctgggcgaggatgaatactaccaggttgtctattactacaccgtaacgccctcgtacgatgactttagcgcggattttacaatcgattatagcatattcgagtcagaagaccgccttaaccggctggataaggatatcactgaggcaattgaaactacaatctcactggagacggctagagccgaccaccccaagccagtgacagtcaagcccgtgactactgagcccgtcgaagagggatgctatgatagcctggacggttctctcgcccgcgggaactggaaaatcaagtag

SEQ ID NO: 9070 - DNA, 396 bp, synthetic construct
  misc_feature 1..396: note = source = /note="Description of Artificial Sequence: Synthetic coding sequence"
  source 1..396: mol_type = other DNA
atggacgtgctgttcgtggccatcttcgccgtgcccctgatcctgggacaggagtatgaagatgaggaacgactgggcgaggacgagtactatcaggtcgtgtattactacacagtgacacctagttatgacgacttttccgctgactttaccatcgattattcaatttttgagagtgaggaccgactcaatcgacttgacaaggatattacagaggccattgagacaaccatcagccttgagactgcaagagcagaccaccccaagcccgtcacagtaaagccggtgacaactgaacccagccccgacctaaacgacgcggttagctccttgcggtcgcccatccctcttctcttatcatgtgccttcgttcaagtggggatgtactttatgtag

SEQ ID NO: 9071 - DNA, 396 bp, synthetic construct
  misc_feature 1..396: note = source = /note="Description of Artificial Sequence: Synthetic coding sequence"
  source 1..396: mol_type = other DNA
atggacgtgctgttcgtggccatcttcgccgtgcccctgatcctgggccaggagtacgaggacgaggagagactgggagaagacgagtactaccaggttgtgtactattatacagtaacccccagctatgacgacttttcagccgattttacaatcgattactccatattcgagagtgaggatcggcttaatcggttggataaggacattaccgaggccattgaaaccactatcagtcttgaaaccgcgagggccgaccatcctaagcccgttactgttaagccagtgaccacggagcccagtcctgacctaaatgacgctgtttccagtctccgttccccgatccccctgctgctcagctgtgctttcgtgcaagtcgggatgtactttatgtag

SEQ ID NO: 9072 - DNA, 312 bp, synthetic construct
  misc_feature 1..312: note = source = /note="Description of Artificial Sequence: Synthetic coding sequence"
  source 1..312: mol_type = other DNA
atgagcggccggggcaagggcggcaagggcctgggcaagggcggcgccaagcggcacaggaaggttctgcgagacaacatacaggggattaccaagcctgctatccgtcggctcgctaggcgtggcggagtcaagcggatttcaggtctcatctatgaggagacccgcggtgtcctgaaagttttccttgagaacgtaatccgtgacgctgttacgtacaccgagcatgcgaagaggaaaacagttaccgcaatggacgtggtgtatgctctgaaaagacagggacgcacactgtacggctttggcggatag

SEQ ID NO: 9073 - DNA, 312 bp, synthetic construct
  misc_feature 1..312: note = source = /note="Description of Artificial Sequence: Synthetic coding sequence"
  source 1..312: mol_type = other DNA
atgagcggccggggcaagggcggcaagggcctgggcaagggcggcgctaaacgacacaggaaagtgttaagagataacatacaggggattacaaaacccgcaattcggcgcctcgcacgtaggggaggcgtgaaacggatctcaggcttgatctacgaagagacacgcggagtgctcaaggtgttcctcgaaaatgtgatcagagacgcggtgacctatacagagcacgccaagagaaagacggtcactgcgatggatgttgtctacgctttaaagagacagggccgtacgctctatggatttggcggatag

SEQ ID NO: 9074 - DNA, 1404 bp, synthetic construct
  misc_feature 1..1404: note = source = /note="Description of Artificial Sequence: Synthetic coding sequence"
  source 1..1404: mol_type = other DNA
atgctgggcatctggatcgtggccttcctgttcttcggcaccagcaggggaaaagaggtctgctatgaacggctcgggtgttttaaagacggtcttccttggacacgaaccttttcaacagagctggtcggactgccctggagccccgagaaaattaatacaagatttctcctgtacaccattcataatcccaatgcttatcaggagatctccgcggtaaactcttctacaatccaggcatcatattttggaacggacaaaattacacggatcaacatcgcaggctggaaaaccgacggaaagtggcagcgcgacatgtgcaacgtcttattgcaactcgaagacatcaactgcattaacctagattggattaatggtagccgagagtatatccatgcagtgaacaatttacgagtagtcggtgccgaagttgcatactttattgacgtgttgatgaaaaaattcgaatactcgccgagcaaggtacacctgatcggccactcgcttggggcccacctggctggagaggcaggctctagaatccctggactaggaagaatcacgggtcttgatcccgccggcccattttttcataacacaccgaaggaagtcaggcttgatcctagcgatgctaactttgtcgacgtcatacacacgaacgccgcccgaatcctgtttgagttgggagtgggtaccatcgacgcctgcggccacctggacttctaccccaacggcggcaagcatatgccagggtgtgaagacctcataacgcccctgcttaagttcaattttaatgcctacaaaaaggagatggcctcttttttcgactgtaatcatgcgcgttcgtaccagttctatgctgagagcatccttaatcctgatgccttcattgcctacccttgcagatcttacacatcatttaaggctggaaattgttttttctgttccaaggagggttgcccaacgatgggacactttgccgatcgttttcacttcaagaacatgaagaccaatgggagccattacttccttaacactggctcattgtctccatttgcccgatggcgccataagttgtcagtgaaactgtctgggtctgaggttacacagggcaccgtgtttttgagggtcggtggggctgtacggaagacaggggagtttgctattgtttccggcaaacttgaacctggcatgacatacacaaaactgatagatgccgatgtaaacgtgggaaatataacctcggtacaattcatctggaaaaagcatctcttcgaagacagccagaacaagctcggggcggagatggtcattaacacttcggggaagtatgggtacaaaagtacattctgctcccaggatataatgggcccgaacattctgcagaacctgaagccttgctag

SEQ ID NO: 9075 - DNA, 1287 bp, synthetic construct
  misc_feature 1..1287: note = source = /note="Description of Artificial Sequence: Synthetic coding sequence"
  source 1..1287: mol_type = other DNA
atgatcaccggcgtgttcagcatgcggctgtggacccccgtgggcgtgctgacatcactagcctattgcctgcaccagaggcgcgtggctctggccgaactgcaggaagctgatggccagtgtcccgtggacagatcgctgctgaagctcaagatggtacaggtcgtcttcaggcacggtgcaaggagtccactcaaacccctacctctggaagagcaagtggaatggaatccccagctgcttgaggtaccgcctcagacacagtttgattatactgttaccaaccttgccggaggtccaaagccatattctccatacgattctcagtaccatgaaacaaccctcaagggcgggatgttcgcaggccagctgactaaggtgggcatgcaacagatgtttgcactcggcgagcgacttcgcaaaaattacgtggaagacataccctttctctcacccactttcaacccacaggaggtgttcatacggtcaaccaacatcttccgcaacctagagtctactaggtgtttgcttgctggcttatttcagtgtcagaaggagggcccgattattatacacaccgatgaggcagactcggaggtgttatatcccaattatcagtcatgttggtcattaagacagcgcacccgcgggcggcggcagactgccagtctgcagccaggaatctctgaggacctgaagaaggttaaagatcgcatgggcatagactcttccgacaaggtcgacttttttatcctgttagacaacgtggctgccgaacaggcacataatctcccttcttgtcctatgctgaagcggtttgctcgtatgattgaacaacgggcggtggacacgtccctgtatattctgcctaaagaggacagggaatccttacagatggcagtcggcccattcctgcacatactggagagtaatctgctcaaagccgttgactcggctacggcaccggacaagatcagaaagttatacctgtacgccgcccacgatgtgaccttcataccattgctgatgaccctgggtatcttcgatcacaaatggcccccattcgccgttgatcttacgatggaactataccaacacctagagtccaaggaatggttcgtgcagctctactatcatgggaaggaacaagtgcctcgaggatgcccggacggtttatgccctctggacatgtttctgaatgccatgtccgtgtataccctgtcgcccgagaagtatcatgccctatgcagtcaaacacaggttatggaggtaggcaatgaagaatag

SEQ ID NO: 9076 - DNA, 711 bp, synthetic construct
  misc_feature 1..711: note = source = /note="Description of Artificial Sequence: Synthetic coding sequence"
  source 1..711: mol_type = other DNA
atgtgcgtgacctaccacaacggcaccggctactgcaagtgccccgagggcttcttgggggaatattgccagcatcgagacccctgtgaaaagaatcgctgtcagaacggcgggacatgcgttgcgcaggccatgcttgggaaagccacctgtcgctgcgcttctggttttacgggtgaagattgtcaatacagcacctcccacccatgctttgtgagccggccttgcctcaatggcggcacctgccacatgctgtcccgggacacctatgagtgcacctgtcaagtgggctttacaggcaaggagtgccagtggacagacgcatgtcttagtcacccctgcgccaatggcagtacctgtactactgttgccaaccagttttcctgcaagtgccttacgggctttactggtcagaagtgtgaaacggacgttaacgagtgtgatatccctggacactgccagcatggaggaacgtgtttaaatctccccggatcttaccaatgtcagtgtttgcagggctttaccggccagtattgcgacagtctctacgtgccatgtgctccttccccttgcgtcaacgggggcacctgtagacagacaggggatttcacattcgagtgcaactgcctcccagagacggttcgccgaggcactgaattgtgggaacgcgacagagaagtttggaatggaaaggaacatgacgagaactag

SEQ ID NO: 9077 - DNA, 990 bp, synthetic construct
  misc_feature 1..990: note = source = /note="Description of Artificial Sequence: Synthetic coding sequence"
  source 1..990: mol_type = other DNA
atggtgaccaaggccttcgtgctgctggccatcttcgccgaggccagcgccaaaagctgtgcgccaaacaaggccgacgttatcctggtcttttgttatcctaagacaattatcaccaagattccagagtgcccgtacgggtgggaggtgcaccagctggccttgggcgggctctgttacaacggagtccatgagggcggctactaccaattcgtgattccagacctgagtccaaagaataaaagttactgcggcacccagtccgaatacaagccccctatctatcacttctactcccacatcgtgagtaacgacaccacagtaattgtaaagaatcaacctgtcaactattccttttcctgtacataccacagtacctaccttgtgaatcaggctgcattcgatcagcgagttgctacagttcatgtgaaaaacgggtctatggggacctttgaaagccaactgagcttaaatttctacacgaatgccaagttttccatcaagaaggaggctccgtttgtactcgaggcctcggagattggctcagatctgttcgccggcgttgaagcaaagggcctgagtatacgcttcaaagtggttctgaacagctgttgggctactccctctgccgactttatgtatccgctccaatggcagctgatcaataaaggttgccctactgatgagaccgtcctggtacatgaaaacggcagggaccatagagccaccttccagttcaacgcctttcggttccagaatatccccaagctttccaaagtctggctccattgcgagactttcatctgtgatagtgagaaattatcttgtccagtgacttgtgacaagcggaagagactcttacgtgaccagactgggggcgttctggttgtcgagctgagtctcagaagccgggggttctctagcctttatagttttagtgacgttcttcaccatctgatcatgatgcttgggatctgcgccgtgctctag

SEQ ID NO: 9078 - DNA, 1161 bp, synthetic construct
  misc_feature 1..1161: note = source = /note="Description of Artificial Sequence: Synthetic coding sequence"
  source 1..1161: mol_type = other DNA
atggcccagtggcactgcagccagcggacccaggccggcggccacggggtgggcgagcggctcgcccagtgtcaggatcagtcatccagacacgccgccgagctacgggacttcaagaacaaaatgttaccactgttggaggtggcagaaaaggaacgggaagcattgagaacagaggctgacaccatcagcggcagggtcgatagactggaacgagaggtggactacctggaaacccagaatccagcgctgccctgcgtcgaatttgacgagaaggttacggggggtccagggaccaaagggaagggacgacggaatgaaaagtacgatatggtaacagactgtggctatactatctcccaggtacgttcgatgaaaatcctgaaacgcttcgggggacccgctggattgtggaccaaggatcccctgggacagactgagaagatctacgtactggacggaacacagaacgatactgcgttcgtgttccctaggctgcgagatttcactctggctatggcggcccgaaaggcatcccgggtgagggtgcctttcccgtgggttggaactgggcagttagtctacggcggtttcctatacttcgcgcgccggcccccagggcggcctggcggaggaggcgaaatggagaacactttacaactcatcaagtttcatctcgcaaaccggactgtggtcgactcttccgtgttcccagctgaagggctcattccaccctatgggctcacggccgacacatatatcgacctagccgcagacgaggagggattgtgggccgtctacgcaacccgcgaggatgaccggcacctgtgtttagctaaactcgacccgcagacactggacaccgagcagcagtgggacacaccatgtccgagagaaaatgccgaggcagcctttgtgatctgcggcactttatatgtcgtctacaatacccgtccagccagcagagctcgcatacagtgctcctttgatgcctcaggaacactaaccccagagagggccgccctaccgtactttccccggcgttatggtgcgcatgcgtctctgagatacaacccccgggagcgccagctgtacgcctgggacgatgggtaccagatagtatataaactagagatgaggaagaaggaggaagaagtctag

SEQ ID NO: 9079 - DNA, 510 bp, synthetic construct
  misc_feature 1..510: note = source = /note="Description of Artificial Sequence: Synthetic coding sequence"
  source 1..510: mol_type = other DNA
atgagcgagcgggtggagcggaactggagcaccggcggctggctgcttgccctgtgtctggcatggctgtggacgcacctgacattggctgccctccaaccgcccacggctacagtgctagtccagcaggggacgtgcgaagtgattgctgcccatcgctgttgcaaccggaaccgaatcgaagagcgttcccagactgtgaaatgctcttgcttttctggccaagtggcagggactaccagggctaagccttcttgcgttgacgacttactgctcgctgcccattgcgcacgacgggatccgagagccgccctgcgtctgctcttgccacaacccccgtcttcttgtcgcgacggtggggtaaggtggagccctgcctgcaggggcaggagcgtgcggtgttccaggacatgccgagatggcgcagccgcagttgatactaaatcaaaacccccaaggtcccacgactcgtcgtggggaagccggcccggccaggagcggctggattag

SEQ ID NO: 9080 - DNA, 693 bp, synthetic construct
  misc_feature 1..693: note = source = /note="Description of Artificial Sequence: Synthetic coding sequence"
  source 1..693: mol_type = other DNA
atgcggctggccggccccctgcggatcgtggtgctggtggtgagcgtcggcgtgacatggattgtggtaagcatactcctgggagggcctgggagtggattccccagaatccagcagctgttcacctctcctgagtccagcgtgaccgcggccccgcgtgcacggaagtataaatgcgggctgccccagccgtgtcccgaggagcacctcgccttccgggtggtatccggggcagcaaacgttatcgggcccaagatttgtttagaagacaagatgttgatgtcctcagttaaggacaacgtcggtagagggctcaatattgccctcgtgaacggggttagcggggagctgattgaggcaagggcgtttgacatgtgggctggagatgttaacgacttactgaagtttatccgacctttgcacgaggggacattggtattcgtcgcctcgtatgatgaccccgcaaccaaaatgaatgaggagactcgcaaacttttttcagagctcgggtcaagaaacgccaaggaattggccttccgcgacagctgggtgtttgttggggctaaaggggtgcagaacaagagtcctttcgagcagcatgtgaaaaatagcaaacacagtaataaatacgaggggtggcccgaagccctagaaatggaaggctgcattcctaggaggtctactgctagctag

SEQ ID NO: 9081 - DNA, 1176 bp, synthetic construct
  misc_feature 1..1176: note = source = /note="Description of Artificial Sequence: Synthetic coding sequence"
  source 1..1176: mol_type = other DNA
atgctgcggcccggcggcgccgaggaggccgcccagctgcccctgaggagagcatccgcacccgttccagtaccgtctcccgctgctccagacgggagcagagcctccgcccgactgggcctggcttgcctcttactgctgctcctgcttacactgcccgcaagggtggacacatcctggtggtatatcggagctctcggcgcccgggtaatttgtgataacatacccgggctcgtgtctcggcaaagacagctgtgtcagcggtatcccgacattatgaggagcgtgggcgagggcgccagagaatggattagggagtgccaacaccagttccgccatcatcgctggaactgcacaacgctggaccgcgatcatacggtgtttggccgggttatgttaagatcttcacgcgaagccgcatttgtgtacgccatctcctcagccggggtagtgcacgccatcacccgcgcctgctctcagggggagctctcagtgtgcagctgcgatccctacactaggggacggcatcatgaccagaggggtgatttcgactggggcggttgctccgacaacatacattatggcgtacggtttgcgaaggcatttgttgacgctaaagaaaagcgcttgaaagacgccagagccttgatgaacttgcacaataatcgttgcggaaggacagcagtgagacgcttcctgaagcttgaatgtaagtgccacggagtgagtggatcctgcacattacgcacatgttggagggccctttccgatttccgacgcactggggattacttgagaagaagatacgatggcgcggtacaggtgatggccacccaggatggagccaacttcacagccgcgcgccaggggtaccggagggccacacgaaccgacctggtgtatttcgataatagccctgactattgcgtgctggacaaggcagctggaagcctcggaacagccggccgagtttgctcaaagaccagtaaaggaactgacggatgcgagataatgtgttgtggtaggggttatgacacaactcgcgtgacaagagtcacccagtgtgagtgcaagtttcattggtgctgtgctgtgaggtgcaaagaatgccggaataccgtggatgtccatacttgtaaggctcccaagaaagcagaatggctagaccagacttag

SEQ ID NO: 9082 - DNA, 1119 bp, synthetic construct
  misc_feature 1..1119: note = source = /note="Description of Artificial Sequence: Synthetic coding sequence"
  source 1..1119: mol_type = other DNA
atgctggacggcctgggcgtggtggccatcagcatcttcggcatccagttgaaaaccgagggcagcctgcggacagcagttcccggcattcccacccaatctgcatttaacaaatgcctacaacgatacattggcgcgctgggcgctagggtgatatgcgacaatattcccggtctggtgagtaggcagcgacaactttgtcagcggtacccagatattatgaggtctgtgggggagggggcacgggaatggatccgagaatgtcagcatcaattcagacatcatcgatggaactgtaccacactggatcgtgatcataccgtcttcggtagggtaatgctaagatccagtcgggaggcagctttcgtgtatgctatttcctctgctggtgtggtgcacgctattacacgtgcatgtagccaaggagagctgtctgtgtgtagctgtgatccttatacgcgaggacggcaccacgaccagcgaggggattttgactggggtggttgcagtgataacattcattatggagtgaggttcgcaaaagccttcgtcgacgctaaggagaagaggctaaaggatgccagagctctcatgaatctccacaataatagatgtggccgaaccgccgtgcgacgcttcctgaagttagagtgcaaatgtcacggtgtttcaggcagttgtacactccggacatgttggagggcgttgagcgatttcagaagaaccggagactatctgaggcgccggtacgacggagctgttcaagtcatggcaacacaggatggggcaaacttcaccgcggctcgacaaggttataggagggccacccgaaccgatcttgtatattttgacaacagcccagactattgcgtgctagataaggcagccggctctctgggcactgccggtcgagtgtgttccaagacttctaaggggaccgacggctgcgagattatgtgctgtgggagaggctacgacacaacccgcgtgacacgtgtgacccagtgtgagtgcaagttccactggtgctgtgccgtccggtgcaaggaatgccggaatacagtggatgtccatacctgcaaggcccctaaaaaggccgaatggttggaccagacctag

SEQ ID NO: 9083 - DNA, 1242 bp, synthetic construct
  misc_feature 1..1242: note = source = /note="Description of Artificial Sequence: Synthetic coding sequence"
  source 1..1242: mol_type = other DNA
atggagaacatgctgctgtggctgatcttcttcacccccggctggacactgattgatgggagtgaaatggagtgggatttcatgtggcatctgcgcaaggtgccaagaatcgtttccgagcgaacatttcatttaacaagcccggccttcgaggcagatgcgaaaatgatggtgaatacagtctgcggaatcgagtgccagaaggagttgccaaccccctcccttagtgaactggaggattacctctcttatgagactgtctttgagaacggaaccagaacactcaccagggtgaaggtgcaggacctagtgttggagcccacccaaaacatcacgaccaagggggtgtccgtgcggaggaaaagacaggtttacgggactgacagcagattttccatactggataaacggtttctgacgaactttccatttagtacagctgttaagctttctacagggtgtagcggaatcctcatctcaccccagcacgtattgacagccgcccactgcgttcacgacggtaaagactatgttaagggctctaaaaagctcagagtgggcctcctaaaaatgcggaacaagagtgggggtaaaaagcgcagagggagtaagagatctcggagagaggccagcggcggagatcagagagaaggaacgcgtgaacacctgcgtgaacgggctaagggagggcggcgccgaaagaagtctggccgtggtcagcggatcgccgaaggtcgcccttctttccaatggacccgcgtcaagaatactcacatccctaaagggtgggccagaggcgggatgggagacgccactctggactacgactacgccttactcgaattaaaacgcgctcacaagaaaaagtacatggaactcggcatatcgccaactatcaagaaaatgccagggggaatgatacactttagcgggtttgataacgacagagccgaccagttggtctatcgtttttgcagtgtctctgatgagagcaatgacctgctgtatcagtactgtgatgccgagagcggctctactgggagtggagtgtatttaagacttaaagatcctgataaaaagaattggaagaggaaaattattgctgtctactccggacaccagtgggtagatgtccacggggtacagaaagactataacgtagccgtacggattacacctctcaagtacgcgcaaatttgcctgtggatacacggcaatgacgcaaattgtgcatatgggtag

SEQ ID NO: 9084 - DNA, 1143 bp, synthetic construct
  misc_feature 1..1143: note = source = /note="Description of Artificial Sequence: Synthetic coding sequence"
  source 1..1143: mol_type = other DNA
atgggcgccaccaccatggaccagaagagcctgtgggccggcagcgcttacaagttggtgtgttatttcactaattggagccaggacagacaggagcccgggaagttcactcccgaaaatatagatccgtttctatgttcgcacctgatctatagcttcgccagtattgaaaacaacaaggtgattattaaagacaagagtgaagtgatgctgtatcagacgattaactctctaaagacaaagaatccgaaactgaagatcttgttgtccattggaggatatctttttgggtcaaaaggctttcaccctatggttgacagtagtaccagtcgcctggaatttataaactccataatcctatttctgcgaaatcataattttgacggcttggacgtcagctggatctacccagaccagaaggaaaacacccatttcacggtgctgatccatgagcttgccgaggcatttcagaaagatttcacaaagagcacaaaagagaggcttttgctgactgctggtgtcagtgcaggcaggcagatgatagataattcataccaggttgaaaagctggccaaggacctggacttcattaatttgctgagtttcgattttcatggtagctgggagaaacccctgatcacagggcataattcacccttgagtaaggggtggcaggaccgcgggccctctagctactacaacgtggagtatgctgtagggtactggatccataagggcatgccaagcgaaaaagttgtcatgggcattccaacatacggacactcgttcaccttagccagcgcggagaccaccgtgggcgccccagcctcagggccaggagctgctggacctatcactgagtcctccggatttctggcttactacgaaatttgtcagtttctcaagggagcaaagatcaccagactccaagatcagcaggtgccatacgcagtgaaaggaaaccagtgggtggggtacgatgacgtcaagagtatggagaccaaagtgcagttcttgaaaaacttgaatctgggtggggcaatgatatggtctatcgatatggacgacttcacagggaaaagctgtaatcagggcccctatccactggttcaggccgtgaaaagaagtttgggatccctgtag

SEQ ID NO: 9085 - DNA, 1173 bp, synthetic construct
  misc_feature 1..1173: note = source = /note="Description of Artificial Sequence: Synthetic coding sequence"
  source 1..1173: mol_type = other DNA
atgggcgccaccaccatggaccagaagagcctgtgggccggcgtggtggttttactgctgctgcaaggcggctccgcgtacaagctggtctgctacttcaccaattggagtcaggatagacaggagcccggtaagttcacccctgaaaatatcgaccctttcctctgctcccatctgatctacagtttcgcgagtattgagaacaacaaggtcatcataaaagacaaaagtgaagtgatgctataccaaacaattaatagcctaaaaacaaaaaaccccaagctgaagatcctgttatccatcggcggctatttgtttgggagtaagggcttccacccgatggtagactcttccacaagcaggctagagttcattaactccattatactttttctgaggaaccataatttcgacggcctagatgtgagctggatctatcccgatcagaaagaaaatacccactttaccgtgctaatccacgagctggccgaagcctttcagaaggatttcacaaaatcgaccaaggaacgcttattgctcaccgccggggtgtctgctgggcggcagatgattgacaactcttaccaagtggagaaattggccaaagacttggatttcattaatctcctgtcctttgatttccacggctcctgggaaaagccacttattactgggcacaatagcccgctgagtaagggctggcaggatcgtggaccctcatcatactataacgtggagtacgccgtgggctactggatccataaaggaatgcccagcgaaaaggtggtgatgggcattccgacatatggtcactcattcactctcgcctctgcagaaactacagtgggagcacccgcaagcggtccaggtgccgctggacccataaccgaaagttcagggtttctggcatactacgagatctgtcagttccttaaaggggctaaaatcactcggctgcaggatcagcaggtgccatacgcagtgaagggaaaccaatgggtcggctacgatgatgttaaatcaatggaaacgaaagtgcaatttctgaagaatcttaatctgggcggtgccatgatttggagcatcgacatggacgattttaccgggaagagttgcaatcagggcccctatcctctggtacaagctgttaagcgaagcttggggtcactgtag

SEQ ID NO: 9086 - DNA, 2202 bp, synthetic construct
  misc_feature 1..2202: note = source = /note="Description of Artificial Sequence: Synthetic coding sequence"
  source 1..2202: mol_type = other DNA
atggccggcggccgggagacctgcctgcccctgatcggcttcatcctcatctgtctaaagatggtggcatcagccaaaagtgcccccgagatcccaacaattgatcaggcctacagcaaattgtctaattccattaccgttgaatgggctacggtgcccggcgccacgagctacctcctgacagctgaggatggggacaccgtgatcgagacaactgtcgccaattcccccggaactgtgacagggttgaaagccgcaacctggtacgaaattacaattaggagtatctctgccgcaggccgttcacaggccagcccgccgaagcaagccaagactgtgctggccgctccgatcctcgaggtttcttcacccagttccgatagtattttggtgcagtgggaagcagtttatatggccatagcattctccgtgagcatcatgagggccaacggacttggctcaatttggaaggagaacactaccaatacatccctgacctttacttccctcgaggccggaacattgtacactatcaaagcttacgcatggaatgccaatcggataccaggagatgactcaacctgcaatcaacggacttcacccagggcacccgccaatattcaggtctcttttgattccggggctctgaaggcatctttttcctgggccagagccgaaggtgcctttaattacaccgtgatggcactctccgatagctctgagctcacatgtagcaccacattctcttcctgtactatatcttccttacagtgtggcactgaatatctcattagtgttctcgcctccaatgacgccggcagttcaaagagcagttccgccatgacgctgaagaccgtggcttgcgcgcccgggcgagtcacgatccaggaggaccccccgggccacctgtctgttgcatggtcatccgtcgatctgggcgattattatgtggtctttgttaaaagtgacgatgggctcgaggtgcattgtaatacctctctgacccagtgtaactttctttcagaatgtggcttcacctattttatcagcgtcttcgtttataacaaagccgggcagtccccactgggcgatatttttaactacactaccgctccctgctgtccctctgacattaaccccgtccttgtgagctccgatagggtggaaattgtctggagcccagtgcgcggtgcagagttgtacgaaacaaaagctgttgacggctacaacatggttgaatgtaacgacactactccggcttgcaccctcagcgctctcgagtgcgacacaaaatataatattactgtgtacagttttaacgaggtccgagggtcaaatatgagttgcacaccccagtttataactaccgccccctgtagccccgagatcaaaaacgtgtcccgcgatgctttctctatgattaatgtgcactggaggtcgactaacgacgatgcgacctataccgtgactgcccaaggggaaaaggggttatatcagtgcagctctacaggggaatcttgtaccatgcgtggtcttccctgtgggagcgtgttctctgtcacagcagttgctgagacccaggcaggacgctccctcccttcttatagtgtccctttggagacagttccctgctgccccacaggattgactgtgacacagattacccagtctgttataaatgtgtcctggactatcggaagggtggcccagacacacgttgctgtgctagaaagccacacaggccagtccaaatgccacacacaccagaaccattgcctgttaggctgtataacatgcgggattaattatacagtgaccctaaaggccatatctgctaccggactgactgccgactgcagctaccaatcctacttttctggagcttgctgcccattaggcgttaagttatatagactggggcccaacggtatcagaatctactggcaggcctcccggggctccgctaattatagcaccgatctctatggcagtaaaggcattttcacatgcacccctagtgctggcctttctttctgcgatgtgactgagattccatgcggggatgtgtatactgttatggtttcaccagtggcaaaaacgggcttaaaattgactttctgtccgaaaaagatttactctgtaacctgttctggcagcaccttgggaatggtcatctataggggtaagcggaacgaggagtag

SEQ ID NO: 9087 - DNA, 555 bp, synthetic construct
  misc_feature 1..555: note = source = /note="Description of Artificial Sequence: Synthetic coding sequence"
  source 1..555: mol_type = other DNA
atgcggggccagggccggaaggagagcctgagcgacagccgggacttggacggctcttatgatcagctgaccgattcggtggacgacgagttcgaattgagtaccgtctgtcaccgcccagaaggcttggaacagctgcaggagcagactaagttcacccgcaaagaacttcaggtgctctacagagggttcaagaacgagtgcccctcaggtatagttaacgaagagaacttcaagcagatctactcccagttttttccccagggagattcatctacttatgctacattcctgttcaatgcctttgacactaatcacgacggttctgtctcctttgaagagatgctggatattatgaaatcgatctatgacatgatggggaagtatacgtatcccgcccttcgcgaagaagcacccagagaacatgtggagagttttttccagaagatggacagaaacaaagacggtgtggtcacaattgaagagtttatagaatcttgccagaaggacgagaacatcatgcggagcatgcagttatttgacaacgtgatttag

SEQ ID NO: 9088 - DNA, 759 bp, synthetic construct
  misc_feature 1..759: note = source = /note="Description of Artificial Sequence: Synthetic coding sequence"
  source 1..759: mol_type = other DNA
atgcggggccagggccggaaggagagcctgagcgacagccgggacctcgacggaagctacgaccaactcacggggcacccgcccgggcccaccaaaaaagcgctgaaacagaggtttctgaaactgctgccctgttgcggaccccaggcgctcccctccgtgtcagagtctaacgtggacgatgaatttgaactctcaaccgtgtgccatagacccgagggcctggaacagctgcaggagcagactaaattcaccagaaaagaactgcaggtcttgtatcgagggttcaaaaatgagtgtccttccgggatcgtaaacgaggagaactttaaacagatctacagtcagttctttcctcagggcgattcaagcacttatgccacctttctgttcaacgcttttgacaccaatcacgacggctccgtaagcttcgaagactttgttgctggcctttctgtgattctccgcggaactgtcgatgacagactgaattgggctttcaatctgtatgacttgaacaaagatggatgtatcaccaaggaagagatgctcgatataatgaagtcaatctatgatatgatgggaaagtatacctaccccgctctgagagaggaagcaccacgggaacacgtggagtctttttttcagaagatggacagaaataaagacggggtggtcaccatcgaagaatttatagagagctgtcagaaggatgagaatattatgcgtagcatgcagttgttcgataatgtgatttag

SEQ ID NO: 9089 - DNA, 1377 bp, synthetic construct
  misc_feature 1..1377: note = source = /note="Description of Artificial Sequence: Synthetic coding sequence"
  source 1..1377: mol_type = other DNA
atgcaggccaccagcaacctgctgaacctgctgctgctgagcctgttcgccggcctagatccttcaaagactcagatcagccccaaggagggatggcaggtgtacagctccgcccaggaccctgacggcaggtgtatttgtactgtcgtagctccggaacagaatttatgcagtagagatgctaaaagcagacagttgagacaactgctagagaaggttcaaaatatgtcacaatccatagaggtgctcaatctcaggacccagagggattttcagtatgtcctaaaaatggaaacccaaatgaagggactgaaggctaagtttcgacagatcgaggacgaccgaaagaccctgatgacaaagcacttccaggagctaaaggaaaaaatggatgagttgttgcctttaattcctgtgcttgagcagtataaaaccgacgccaaactgatcacccagttcaaggaagagattcggaacctgagcgccgttttgaccgggattcaagaggaaatcggggcctacgactatgaggaactccaccagcgcgtactatccctggaaacaagactcagagactgtatgaagaaacttacatgcggaaagctgatgaaaataactggtcccgtgacagtgaaaacatccggtacccgtttcggcgcctggatgactgacccgttagcttctgaaaagaataaccgggtttggtacatggatagctataccaacaataaaatagtgcgtgagtataaaagtatcgccgactttgtgagcggcgcagagtctaggacttataatctgccctttaaatgggcagggaccaaccacgtcgtctacaatgggtctctgtacttcaataaatatcagtctaatattattattaagtacagcttcgacatgggacgcgtgctagcccagaggtcccttgagtacgccggcttccacaacgtgtatccatacacatggggaggcttttccgacatcgatctgatggctgacgaaattggcctgtgggccgtgtatgccactaaccagaacgcaggaaatatcgtcatatcccagctcaatcaggatacactcgaggtgatgaagagctggtcgaccggatacccaaagaggagtgccggggagtcgtttatgatttgcggcactctgtacgtgacaaattcacacttgacaggcgccaaagtctattacagctatagcacaaagacttccacatatgagtacaccgacatcccatttcacaaccagtactttcatatttccatgctagactataacgctcgcgacagagctctgtacgcatggaacaacgggcaccaggtcctctttaatgtgaccctttttcacattatcaaaaccgaggatgacacttag

SEQ ID NO: 9090 - DNA, 915 bp, synthetic construct
  misc_feature 1..915: note = source = /note="Description of Artificial Sequence: Synthetic coding sequence"
  source 1..915: mol_type = other DNA
atgctgccccccccccggcccgccgccgccctggccctgcccgtgctgctgttactcctcgtggtacttacacccccacctacgggagcccggccgagtccagggcccgattatttgcggcgggggtggatgagactcctcgccgaaggggagggatgtgcaccatgccgaccggaagaatgtgctgcgcctcgcggatgtctagccggcagagtgcgggacgcatgtggatgttgctgggagtgtgctaacctggagggccagctgtgcgatctcgacccctccgcccacttttacgggcactgcggggagcaactggaatgtcggctggacacggggggagatttaagtcgtggtgaggtgccagaacccttgtgcgcttgccgttctcagagtccactgtgcgggtcagacggtcacacctattcccagatctgcaggttacaggaggcggcccgcgcacgacccgacgcaaatctcacagtggcccatcccggcccctgcgagtcaggacctcaaatcgtgagtcatccgtacgacacttggaatgtgacagggcaggacgtcatctttgggtgcgaagtgttcgcgtaccccatggctagtatcgaatggcgtaaggatggattagacattcagctgccaggggatgacccgcacatcagcgtgcagtttcgcgggggccctcagcgctttgaggtcacaggctggcttcagatccaggcggtgcgtccgagtgacgaaggcacgtatagatgtctcggcagaaatgcgctgggccaggtcgaagcaccggcttccctgactgttctcactccagatcagttgaatagcacaggcattccacagctgaggagtctcaatctggtgcccgaggaagaggccgagtcagaagaaaacgatgactactactag

SEQ ID NO: 9091 - DNA, 327 bp, synthetic construct
  misc_feature 1..327: note = source = /note="Description of Artificial Sequence: Synthetic coding sequence"
  source 1..327: mol_type = other DNA
atgacccccagccggctgccctggctgctgagctgggtgagcgccacagcttggcgtgccgccagatcacctcttctctgccactcgctccgcaagacctcttccagtcagggaggcaagtcagagttggttaaacagtctctgaaaaagccaaagctgccagaggggcggtttgatgcccctgaggacagccatctggagaaagagccattagagaagtttccagatgacgtgaacccagtgaccaaggaaaagggcggtcctcggggcccagaacccaccaggtatggagactgggagcggaaggggagatgtatcgatttctag

SEQ ID NO: 9092 - DNA, 663 bp, synthetic construct
  misc_feature 1..663: note = source = /note="Description of Artificial Sequence: Synthetic coding sequence"
  source 1..663: mol_type = other DNA
atggccggcctgagccggggcagcgcccgggccctgctggccgcccttttagcctccacattattggccctcctggtgtccccagcacgcggacgaggagggcgggatcacggtgactgggatgaggccagccggcttccacccttgcctccccgcgaggatgccgcacgtgtagcccgattcgtaacccatgtgagtgattggggcgccctggcaaccatctctactctcgaggcagtacgagggcggcccttcgcggatgtgctgagcctgtcagacgggccccctggcgcgggctcaggggtgccttacttctatctctctcccctgcagttgagcgtatccaacctgcaagaaaacccatacgcaacgctgaccatgactttagctcagaccaatttttgcaaaaagcacggtttcgacccacagtcaccactgtgcgtgcacattatgctgagtggaacagtgacaaaggtcaatgaaaccgagatggatatcgcaaaacactccctgttcataagacaccccgagatgaagacatggccgtccagtcacaattggttctttgcaaagctaaacattacaaatatctgggtgttggactatttcggcgggcccaaaatcgtcacaccagaagagtactacaatgtcaccgtccagtag

SEQ ID NO: 9093 - DNA, 2760 bp, synthetic construct
  misc_feature 1..2760: note = source = /note="Description of Artificial Sequence: Synthetic coding sequence"
  source 1..2760: mol_type = other DNA
atgggcctgttccggggcttcgtgttcctgctggtgctgtgcctgctacaccagagtaacaccagcttcatcaaactgaataacaatgggtttgaagatatcgtgattgtgatcgatccgagcgtgcccgaggacgagaaaattatcgagcagattgaagacatggtaaccacggcatccacttacctttttgaggctacggaaaagaggttctttttcaaaaacgtctcgattttgattccggagaattggaaggaaaatccacagtataagcgccctaaacatgagaaccacaagcacgctgacgtcatcgttgcacctccgaccctcccaggtagagacgagccctacacgaagcagtttaccgaatgcggtgagaagggtgaatacatccactttaccccagatctcttgttaggcaaaaaacaaaatgagtatggtcctccgggcaagctgtttgtgcacgagtgggcacacctgagatggggcgtcttcgacgagtataatgaggaccagccattctatagggcaaagtcaaaaaagattgaggccacacggtgttctgctggaatatccggaagaaatcgcgtgtataaatgtcaaggcgggtcatgtctgtctcgggcttgtagaattgactccacaacaaagctgtacgggaaggactgtcagttcttccctgacaaagtgcagactgagaaagcgtctattatgttcatgcagtccatcgattccgttgtggagttttgtaacgagaagactcacaaccaggaggcgccttccctccagaatatcaaatgcaatttcagatctacctgggaagtgatttcgaactccgaagatttcaaaaataccatacctatggttacacctccccctcctcctgtttttagtctgctgaagataagtcagcggattgtctgcctggtgttagataaaagcggaagcatggggggaaaggatcggctaaaccgtatgaatcaggccgcaaagcactttctcctacagacagtcgaaaatggttcatgggtgggcatggtccacttcgactcgactgcaactattgtcaacaagctcatacaaattaaatctagcgacgaacgcaacaccctaatggcaggcctgccgacctaccccctggggggcacgagtatctgcagcgggattaaatatgcttttcaggtcatcggagagttacattcccaactggacgggagcgaagtactgttgctgacagacggcgaggacaatacggctagttcctgtattgacgaagtgaagcagtctggcgcgatcgtccactttattgccctcggccgcgccgctgacgaagccgtaattgagatgagtaagatcactgggggcagccacttttacgtgtccgatgaagcacaaaacaacggcctcatagacgccttcggcgctctcacatccggcaatacagacttgtcccagaaatccctgcagcttgaatccaagggtcttacccttaactctaacgcctggatgaatgatacagtcattatcgacagcaccgtaggcaaggacacattttttttgattacctggaattccctccccccttcgataagcttgtgggaccctagcggcaccatcatggaaaacttcacagtggacgcaacctctaaaatggcctacctgtcaattcctggcactgccaaggtgggcacatgggcctacaacctgcaggccaaggcaaacccagagactcttaccatcaccgtgacatcaagagcggccaactccagcgtaccacccatcactgtgaacgcaaagatgaacaaagacgtgaatagcttccccagccctatgattgtgtacgccgaaatccttcaaggatacgttcctgtcttgggtgctaatgtcaccgcgtttatagagagccagaatgggcacaccgaggttttggagctcctggataacggcgcaggggccgactccttcaagaacgacggagtgtactcacggtacttcacggcttacaccgagaacgggcggtactccctcaaggtgagagcccatggaggggccaatactgcaagactaaagttaagaccccctctgaacagagctgcctatatcccagggtgggtggtgaatggagagattgaggccaacccacctcgccctgagattgatgaggacacacagacaaccctggaggacttttcccggacagccagcgggggcgccttcgtggtttcacaggtgccatctctaccattaccagaccagtaccccccctctcaaattaccgatcttgacgccaccgtgcatgaggataaaatcattttgacttggactgctcctggcgacaatttcgatgtgggaaaagtgcaaagatatatcatccggattagtgccagcatcctagacctgcgagactcattcgatgacgcattgcaggtcaatacaacagacctgagtcctaaagaggccaatagtaaagagtccttcgctttcaagccagaaaacatcagtgaggagaacgctacacatatcttcatagccattaagtcgatcgataaatccaacctgacatctaaggtttctaacatcgcacaagtcacactctttattccacaggccaatcccgatgatatagatccaacacccactccaacaccgactcccacccccgataaaagtcacaactccggtgtgaatatctctacgttggtcctttccgtgataggctcggtggttatcgttaatttcatcctgtccaccaccatttag

SEQ ID NO: 9094 - DNA, 1938 bp, synthetic construct
  misc_feature 1..1938: note = source = /note="Description of Artificial Sequence: Synthetic coding sequence"
  source 1..1938: mol_type = other DNA
atggcccccagcgccgaccccggcatgagccggatgctgcccttcctgctgttgctgtggtttttacccatcaccgaggggtctcagagggccgaaccaatgtttactgccgtgaccaactcggtgctcccccctgattatgacagcaatcccactcaactcaactacggggtggccgtgaccgacgtagatcacgacggcgactttgaaatcgttgtggccggttacaatggccccaacctcgtgttgaaatacgatagagcccaaaagcgcctcgtgaacatcgcggtagatgagcggtccagcccttactacgccttgcgcgatagacagggcaatgcgattggagtgactgcgtgcgacatcgatggggatggccgggaagagatctacttcctgaatactaacaacgccttctcaggagtggctacttatacagataaattgttcaaattccggaacaatcgctgggaagacatcctgtcggatgaggttaacgttgctcggggcgtcgcctcactcttcgccggaaggtccgtggcatgtgtggatcgcaagggtagtggccgatactcgatctatattgccaactacgcttatggaaatgtgggtccagatgcccttattgagatggatcccgaggcatctgatctttccagggggattttagctctgcgcgatgtggcggctgaggctggcgtaagcaaatatacgggaggacgaggcgtctcagtcggtcctatcctgtcttcctctgcctcggacatcttttgtgacaacgaaaatgggccgaacttcctgtttcataatcggggtgacgggacgtttgtcgacgccgccgcctcagctggagtagacgatccacaccagcatggcagaggtgtggctctggcagattttaaccgtgacggcaaggtcgatatcgtgtatggtaattggaacggaccccacaggctgtatttacagatgagtacacatggaaaggtaagattccgcgatatagccagtcctaagttttcgatgccctcaccggtgcggactgtcattacggccgactttgacaatgaccaagaacttgaaatcttcttcaacaatatcgcatatagaagctctagcgcaaacaggctatttcgggtgatacgcagggagcacggtgatcctcttattgaagaactgaatcctggggatgcattggagcctgagggccggggaaccggcggagtggttactgactttgacggtgacggaatgcttgatctcattctctcccatggggaatccatggcccaacccctgtcagtgttccgcggcaaccagggcttcaataacaattggctccgggtagttccgaggacccgcttcggcgcctttgccagaggggcaaaggttgtgctgtatacaaaaaaaagtggagcccacctgagaatcatcgacggcgggtccggatatctttgtgagatggaacctgttgcacactttggactgggaaaggatgaagcatcaagtgtggaagtgacttggccagatggaaaaatggtttcacgcaacgtggccagtggagagatgaactccgttctagagattctttacccgcgcgatgaggacaccttgcaggatcccgctcctctggagtgcgggcagggcttttcccaacaggagaacggccactgcatggacactaatgaatgtatccagttcccgtttgtatgtcctagagacaaacccgtgtgcgttaatacatatggtagttaccgatgtcgcactaataaaaaatgctccaggggatacgagccgaacgaggacgggaccgcctgtgtcgctcaggtggcctttctgggcgggtactcatcagcggccagcaggatcagtgagcctttgtcgagagcctcttacttgagtctcgggcttggcctgtgcctgcagctctacgctctctag

SEQ ID NO: 9095 - DNA, 1986 bp, synthetic construct
  misc_feature 1..1986: note = source = /note="Description of Artificial Sequence: Synthetic coding sequence"
  source 1..1986: mol_type = other DNA
atggcccccagcgccgaccccggcatgagccggatgctgcccttcctgttacttctgtggtttttacccatcactgagggatcgcagcgtgccgaacctatgtttaccgcagtcactaactccgtgttgccccccgattatgattctaatccaacacagttgaattatggggtggcagtgacagatgtggatcatgatggagacttcgaaatcgtcgtggcagggtacaacggccctaacctggtgcttaagtacgatagggctcaaaagcggctcgtaaacatcgcagtggatgagcgtagctctccttactatgcgttacgcgaccgccagggtaacgctattggcgtgacagcgtgcgacattgacggcgacggaagggaagaaatctatttcctcaatacgaacaatgccttcagcggggtggccacatacactgacaagctgttcaaattcaggaataaccggtgggaggacatcctgtccgacgaagtgaacgtagctcgtggagtcgcctcactgtttgctggccgaagtgtggcttgcgtcgacaggaagggttccgggagatatagcatttatatcgcgaattatgcttacggtaacgtaggcccagacgcccttatagagatggacccagaagcttcagaccttagcagaggcatcctcgcactccgcgatgtggcagcagaagccggcgtctccaaatatacggggggtaggggcgtctcagtgggacctatccttagcagtagcgcatccgacatattctgtgacaatgagaacggtcctaactttttatttcacaacaggggggatggaaccttcgtggacgccgccgcttccgcgggggtcgacgatccgcatcaacacggtcgcggcgtggctctggcagattttaatcgagacggaaaagtcgacattgtatacggcaattggaatggacctcataggctgtatctgcaaatgagcacccatggcaaggtgaggttccgggacatcgcaagtcctaaattctccatgccctcccctgtgaggacagttatcactgccgacttcgacaacgatcaggagctggaaatcttcttcaacaacatcgcatacaggtcatctagcgcgaacaggctgttccgggtgatcaggcgcgaacacggcgatccgttgattgaagagctgaatcccggtgacgctctggaacctgagggtaggggtactgggggggtagtgacagactttgacggagacggtatgcttgatctgattctctcccacggggaatccatggcgcaacccctgtcggtgttcagaggaaatcagggatttaataataactggttgcgcgttgtccccaggacacggtttggggcatttgctagaggtgccaaggtggtgttgtataccaagaaaagtggcgcacatctcaggattattgatggcggaagcggatatctctgcgagatggaacctgtcgctcatttcggcctcggaaaggacgaggcttctagcgtggaagtgacttggcctgacggcaaaatggtatcacggaacgtggcctctggggaaatgaattccgtgcttgaaatactttatcctagggatgaggacacacttcaagatccagctccacttgagtgtgggcaaggcttttcccagcaagaaaacggtcactgcatggacaccaatgaatgcatccagttcccatttgtctgccctcgcgacaagccagtgtgtgttaacacttacgggtcctataggtgccgcacgaataaaaagtgttcaagaggatacgagccgaatgaggacggaactgcatgtgtagggacacttggtcaatcgcccgggccacgccccactactccgaccgccgcggccgcaacagctgccgctgccgctgccgcaggcgccgccactgccgcccccgtgctggttgatggagacctgaatctcggctcggtcgttaaggagtcctgcgagccctcctgttag

SEQ ID NO: 9096 - DNA, 1230 bp, synthetic construct
  misc_feature 1..1230: note = source = /note="Description of Artificial Sequence: Synthetic coding sequence"
  source 1..1230: mol_type = other DNA
atggccctgacccccggctggggcagcagcgccggccccgtgcggcccgagttgtggctattgctctgggccgccgcttggcgactgggggcctccgcttgtcccgcgctctgcacgtgtaccggcacaaccgtggattgccatggcacggggctacaggcaatcccaaagaacatcccaaggaacactgaacgcctggaactgaatggaaataatattactcggattcacaagaatgactttgccggcctgaaacagcttcgtgtcttacaactgatggaaaaccagatcggggctgtggaacggggggcctttgatgacatgaaggagctggaacgccttcgtctcaatcggaatcagctgcacatgctccccgaactgttattccagaacaaccaggcactgagcagattagacttgagcgagaacgctatccaggcaattcctagaaaagcattcaggggggccaccgatctcaagaacctgcaactcgacaagaatcagataagctgcatcgaggagggggctttccgggctctcagaggtctggaggtcctgacccttaacaataataatattaccacaattcccgtcagtagctttaaccacatgcccaaactccggacctttcggcttcatagtaatcacctgttctgtgattgccaccttgcttggctctctcagtggctgagacaacgtccaacaattgggctgtttacccaatgctcagggcccgcctccttgcgggggcttaatgtcgccgaagtgcaaaaatctgagttctcgtgcagcgggcagggagaggccggacgggtgccaacatgtaccctgagcagtggttcatgccctgctatgtgtacgtgtagcaatggtattgtggattgccgcggcaagggattaacggcgatccctgccaacttgccggagactatgaccgagatccgacttgaattgaatggaattaaatccattccccccggagccttttcaccatatcggaagcttagacggattgacctgtcaaacaaccagattgcagaaatagctcccgacgcctttcagggcttgcgaagtctgaactcactccacacggggccggtcacgtgcccacatactaccgggacgcactctagtcactgcagggctttcgctgtcgcggtcccacacagtaggaacgatctggaagcaatgtttgaggaggaagtgccacgcattttctatagcgcgtag

SEQ ID NO: 9097 - DNA, 1143 bp, synthetic construct
  misc_feature 1..1143: note = source = /note="Description of Artificial Sequence: Synthetic coding sequence"
  source 1..1143: mol_type = other DNA
atggccctgacccccggctggggcagcagcgccggccccgtgcggccggagttgtggctcctcctgtgggcagccgcatggcgcctaggagccagtgcatgcccggcactttgcacctgcacaggtacgactgtggattgccacggaactggccttcaggcaattccgaaaaacatacctcggaacacagagagattggaacttaacgggaacaacattactcgcatacataaaaatgactttgcaggactgaaacagctgcgggttctgcagctgatggagaatcaaattggagccgtggagcgcggcgcattcgatgacatgaaggagctggaaaggttagatctctcagagaacgctatccaggcaatccctcggaaggctttcaggggggcaactgatctgaaaaacctgcagctcgataaaaaccagattagttgcatcgaagaaggcgcctttcgggctttacgcggtctggaagttcttacgttgaataataataacatcactaccattcccgtatcaagcttcaaccatatgcccaagctacgcacctttcgcctccacagtaatcacctgttttgcgactgccacttggcctggctgtcccagtggctgagacagcgaccgactattggactgttcacacagtgctcagggccagctagccttagaggcctaaacgtggcagaggtccagaagagtgaattctcgtgtagtgggcagggagaagccggacgtgtgcctacctgtaccctcagctccggatcttgccccgcgatgtgtacttgtagtaacggcatagtggactgcaggggtaaaggcctcacagccattcccgctaacctccctgagaccatgactgaaatacggctcgagttaaacggaattaaatcaattcctcccggggcttttagcccttacaggaaactgcgacgtatcgatctgtccaacaaccagatagccgagatcgcccccgacgccttccagggcttaagatccttaaacagtctagtgctctacggtaataagattacagatctgccccgtggggtgttcggcggactttatacactccagctgctgctgttgaacgcaaataagatcaactgtatccgtccagacgcatttcaagacttgtag

SEQ ID NO: 9098 - DNA, 2448 bp, synthetic construct
  misc_feature 1..2448: note = source = /note="Description of Artificial Sequence: Synthetic coding sequence"
  source 1..2448: mol_type = other DNA
atggccctgacccccggctggggcagcagcgccggccccgtgcggcctgaactctggctcctcctgtgggcagccgcgtggcgactcggtgcaagtgcctgcccagccctgtgcacttgtaccggcacaaccgtagactgtcacggaacgggactacaggcaattcccaagaatatccctcggaatactgaacgcctcgagctgaatggtaacaacattactcggatccataagaatgatttcgccggcctgaaacagttgagggtactacagttgatggagaaccagattggagccgtcgaacgcggtgcgtttgacgatatgaaagaattggagcgtcttcggctgaaccgtaatcagctgcatatgctgcccgaactgctttttcaaaacaatcaggctctcagtaggctggacctcagtgaaaacgcgattcaggccataccgaggaaagcgtttcgcggtgccactgacttaaagaacctgcagctggacaagaatcagatcagctgcatcgaggagggcgctttccgtgcactccgagggctggaagtgttaacactcaacaataacaacatcaccacaatccctgtcagctccttcaatcacatgcccaagctgcggacatttcgcctgcattccaaccacttgttctgtgactgtcatttagcctggctttcccaatggttgaggcagcgacctacaatcggcttgttcacacagtgttccgggccagcatccctgcgtggactcaatgtggctgaagtccagaagagtgagttttcatgcagcggccagggcgaggctgggcgagttccaacctgcactctgagcagcggttcctgtcctgcaatgtgcacctgctccaacggtattgtggactgtcgggggaaaggtcttacagccatacctgcaaatctgccagaaaccatgaccgaaatcaggctggaactcaatgggattaaatccattccaccgggggcgttcagcccttatcggaagttacgaagaatttgcccgctgagcttttgctccccatgcagggacctgagcaacaatcagattgctgaaattgctcctgacgcgtttcaaggattgcggtccctgaattcacttgtgctgtacgggaataaaatcaccgacctgccacggggagtatttggtggcctgtatacactacaattgttgttgttaaatgccaataaaattaattgcatacggcccgacgcattccaggacctgcagaacctctcccttttgagtctctacgataataaaatccagagcctggccaaaggtaccttcacttcactgcgggctatacagactcttcacctcgcgcaaaaccccttcatttgcgactgcaacctgaaatggttagccgactttctgcgcacaaaccctatcgagacgtccggggctcgctgcgcctcccctcggaggttggctaataagaggatcggacaaatcaagtctaaaaaattccgctgcagcgcaaaggaacagtacttcattcctggtactgaagattaccagctgaacagcgagtgcaattccgacgtagtgtgcccccacaagtgtcggtgtgaagccaatgtcgttgagtgctcttcactaaaattaactaaaatccctgaacggataccgcaatccacagcagagctgaggctaaacaacaatgagatctcaatactcgaggctactggtatgttcaaaaaattaactcacctgaaaaagattaacctgtctaacaacaaggtaagcgaaattgaagacggagcgtttgagggggctgcatcggtaagcgagcttcatctgacagctaaccagctcgagagcatcagaagcgggatgttccgggggctggacggcctacggacgctgatgctcagaaacaatcgaatatcttgcatccacaatgacagttttacaggcctgagaaacgtgcggctgctctcactctacgataaccagattaccactgtatcaccgggagccttcgatactctccaaagcctttccactctcaacctgctggcaaatccctttaattgtaattgtcagctggcatggctcgggggatggttaaggaaacgcaagatcgtaacaggtaatccccgatgtcaaaatcctgatttcctccggcaaatccccctacaagatgtcgccttcccggacttcaggtgcgaggaggggcaggaggaaggtggctgtctgcctcgcccccagtgcccacaagagtgcgcgtgcctagacaccgttgtccgttgtagcaataaacacctgagggctttacccaagggtataccaaagaacgttaccgagctctacctggacggaaaccagtttactctggttccggggcagctgagtacctttaaataccttcaattggtgatcctaagctacaatgctctgcaatgcatcccacccttagcatttcagtag

SEQ ID NO: 9099 - DNA, 4386 bp, synthetic construct
  misc_feature 1..4386: note = source = /note="Description of Artificial Sequence: Synthetic coding sequence"
  source 1..4386: mol_type = other DNA
atggccctgacccccggctggggcagcagcgccggccccgtgcggcccgagttgtggctcctgctgtgggccgccgcttggcgcctaggggccagcgcatgtcctgccttatgcacttgcactgggacaacagtggattgccatggaaccggactgcaggccataccgaagaacatacctcggaacactgagcgcctggaactaaacggcaataacataacccggattcataaaaatgattttgcaggcctgaagcagcttagggttcttcagcttatggaaaaccagatcggcgcagtagaaaggggcgctttcgacgacatgaaagagcttgaaaggttgcgccttaatcgcaatcaactgcacatgttacccgagctcttgtttcaaaataatcaggcactgagcagactggacctctctgaaaacgctatacaagccatcccacgtaaggcctttcgcggggctactgaccttaaaaatcttcagctggataagaatcagatctcctgtatcgaagagggcgcattccgcgctctcagaggcctggaagtgctgactctaaacaataacaatatcaccacaattcccgtgtcatctttcaaccacatgcccaaattgaggacctttcgcctgcattcaaaccacctgttttgcgactgtcacttggcctggttaagccagtggcttcggcagagaccaacaatagggctgtttacccagtgtagtgggcctgcctctctgcgtggccttaacgtggctgaggtgcagaagtctgagttttcttgctctggacagggggaagccggacgggtccctacttgtactttaagttccgggagttgccccgcaatgtgtacttgctctaatggcattgtggactgtcggggaaaagggctcactgccatcccagctaatcttccggaaaccatgaccgagattcggttagagctcaatggaattaaatcaatcccacccggggccttcagcccttaccgaaagttgcggcgcatagacttgagcaacaatcagatagccgaaattgctcctgacgcattccagggcttgcgcagtctcaactctcttgtcctgtatggcaacaagatcacagacctgcctaggggtgtttttgggggtctttatactctgcagctgctcctgttaaacgccaataagatcaactgcattcggccagacgcctttcaagacttacagaacctgtctctactttcactgtacgataacaagatacagtcactcgccaaagggacctttacatcactgcgcgctatccagacacttcatctggctcagaaccccttcatttgtgactgcaatctgaagtggctggcagattttcttcgtacaaaccccatcgagacttcaggagctagatgcgctagccctaggcgtctcgccaacaagcggataggccaaatcaagtctaagaaatttaggtgcagcgccaaagaacagtattttataccaggcacggaagattaccagctgaatagtgagtgcaactcggacgtggtgtgcccacacaaatgtagatgcgaggccaacgttgtggagtgttcttcattgaagctcaccaaaattcccgagcgcattccacagagcacggctgagcttcggctcaataataatgaaataagcattctggaggctaccggaatgttcaaaaagctgactcaccttaaaaagattaatttatctaataacaaagtgtctgaaatagaggacggagcatttgaaggcgcagcctctgtctccgagcttcacctcaccgcaaaccagttggaatccattcggagtggaatgttcaggggcctagacggtctgcggaccctgatgcttcgcaataataggatttcctgcattcacaacgactcctttacaggcttgaggaatgtgaggctgttgagtttgtatgacaatcagattaccacagtctctcccggggcattcgacaccctgcagtccttgagtaccctgaacctgctcgccaatcctttcaactgtaattgccagctggcctggctgggcggctggctccggaagagaaaaatcgtcacaggaaacccacgatgccagaatccagacttccttcgccagatccctctccaggatgtggcctttccagattttcgctgcgaggagggacaggaggaaggaggctgcctgccaagaccacagtgtccccaggagtgcgcctgcctggataccgtcgtccggtgctcaaacaaacatttacgggcgttgcctaaagggatcccaaaaaacgttaccgaattgtatttggatggaaatcaatttaccttagtgcccgggcagctgtcaaccttcaagtacctgcagttagtggacctgagcaacaacaagatcagtagcctgtcgaacagctcctttactaatatgagccagcttacaacactcatactctcctacaacgcattgcagtgtattccccccctcgcattccagggactccggtctttacgcctcctctcactgcacgggaatgacatttcaacgttgcaagaaggcatctttgcggacgtcacatctctgtcacatctggcgataggcgctaaccctttatactgcgactgccacctaagatggctgtcctcctgggtgaagacagggtataaagaacccggcattgccagatgcgcggggccccaggacatggaaggtaaactgcttctaacgacgccagccaaaaagttcgaatgtcagggcccacccactctagccgtgcaggccaagtgcgacctctgcctctctagtccctgccagaaccagggtacttgtcacaatgaccctctcgaagtctacagatgcgcctgtccgtctgggtataagggaagggactgtgaggtctccttggactcctgctcctccggcccttgtgagaacggcggcacttgtcacgcccaggagggtgaagatgctccgttcacgtgttcttgccccaccggcttcgaaggacccacctgcggcgtcaacaccgatgattgcgtggaccatgcttgtgcaaacggtggagtctgtgtcgacggtgttggcaattatacgtgccagtgcccacttcagtacgaaggaaaagcctgcgaacagttagtggacctgtgcagccccgacctgaatccatgtcagcatgaagcccaatgcgtcggtacccccgacggacccagatgtgagtgcatgcccggctacgccggggacaattgcagtgagaatcaggacgactgtcgggaccacaggtgtcagaacggggctcagtgtatggatgaggttaactcctatagttgcctgtgcgccgagggctatagtggccaactttgtgagattcctcctcatctgcccgcgccaaaaagcccgtgtgaggggacagaatgccaaaacggtgcgaactgtgtggatcagggcaaccggcctgtgtgccagtgtctgccgggttttggtgggccagaatgcgagaaacttctttctgttaatttcgtggatcgagatacttacctgcagtttacagatttacaaaactggcctcgggctaacattacgctccaagtaagcactgccgaagataacggcattttgctgtacaatggggacaatgaccatatcgcagtcgagttgtatcaagggcacgtaagagtgtcttacgacccgggctcttaccccagcagtgccatatactccgcggaaactataaacgacggccagttccacacggttgagctggtggctttcgatcagatggtcaacctgagcatagatggcggatccccgatgacgatggacaatttcgggaaacactacacgctgaactcagaagccccgttatatgtgggcggcatgcctgtggacgtgaattccgcagcctttcgcttatggcagattctcaatggcactggctttcacggctgcatcaggaatctttacattaacaacgaactccaggacttcacaaagacgcagatgaagcccggggtcgtccccggttgcgaaccctgtagaaagttatactgtttgcatgggatatgccagccgaacgccacccctggacccatgtgtcactgcgaggctgggtgggttggactccactgcgaccagccagcagacgggccttgccacggacacaagtgtgtacatggccaatgcgtgccactggatgctctttcgtattcttgtcagtgccaggatggttattctggggctctatgtaatcagagccctagtgccggtgggactctgtcaggaacctttacccgatccagaggcgctatgccaagcgcaaggcctcgtgccccgtgccatgggtggtccgctggcgcaagggctcaggctcgcgcagcagctagagcctttggttag

SEQ ID NO: 9100 - DNA, 570 bp, synthetic construct
  misc_feature 1..570: note = source = /note="Description of Artificial Sequence: Synthetic coding sequence"
  source 1..570: mol_type = other DNA
atggaggccaccggcaccgacgaggtggacaagctgaagaccaagttcatctctgcatggaataatatgaaatatagctgggtgctcaagactaaaacatacttcagtcgtaatagtcccgtgctactgttgggaaaatgttaccacttcaaatatgaggacgaggacaagactctccctgctgagtcaggctgcacgatcgaggaccacgtaattgccggcaacgtcgaggaatttcgaaaagactttatctctaggatatggctcacctatcgggaagagtttcctcagatcgaagggagtgcactgactacggactgcgggtggggatgtacgttgcgtactggacaaatgctcctcgcccaggggctgatactgcattttctgggccgcgcctggacctggcccgatgcactgaatatagagaactctgattccgagtcttggacatcccacaccgtgaaaaaattcacagcaagtttcgaggcttcgcttagcggagaacgggaattcaaaacacccaccatctcattgaaagagaccatcggtaagtatagtgatgaccactag

SEQ ID NO: 9101 - DNA, 1377 bp, synthetic construct
  misc_feature 1..1377: note = source = /note="Description of Artificial Sequence: Synthetic coding sequence"
  source 1..1377: mol_type = other DNA
atggaggccaccggcaccgacgaggtggacaagctgaagaccaagtttatatcagcctggaataatatgaagtactcctgggtactaaaaacaaaaacttactttagtaggaatagtcccgtattactcctgggtaagtgttatcattttaaatacgaggatgaggacaagacccttccggctgaatccgggtgcaccattgaagaccacgttatcgcaggaaacgtggaagagttcagaaaggatttcatcagccggatttggctcacatatcgcgaagagttccctcagattgaaggctctgcactgacaacagactgcggctggggctgtactttgagaactgggcagatgctcctagcccaaggactgattttgcattttctcgggcgtgcctggacctggccagatgctctgaacattgagaattctgattcggaaagctggaccagccacactgtcaagaagttcactgcctcttttgaggccagtctgtctggagaacgggaatttaaaaccccaacaattagcctcaaagaaaccatcgggaaatatagtgatgaccacgaaatgcggaacgaagtgtaccatagaaaaattatctcatggttcggggacagtccattggccttgttcgggttacaccagctcattgagtatgggaagaaaagcggcaagaaagcaggtgactggtacggcccggcggtcgtggcccatatactgcgcaaggccgtggaggaagcgcgccatccagacttgcaggggatcactatctatgtggcccaggactgcacagtctacaatagtgacgtgatcgataagcaaagcgcctccatgaccagcgataacgccgacgacaaggccgtgatcattctcgtcccagtgcgcctcggtggagaaaggacgaacaccgattatctggagtttgtgaaagggatcctgtccctagagtattgtgttgggatcatagggggtaaacccaagcaaagctactacttcgcgggatttcaggatgactccctaatatacatggaccctcattactgccagtcgttcgtagatgttagcatcaaagactttccgctcgaaactttccactgtccttccccgaagaagatgtcctttcgtaaaatggaccctagctgtacaatagggttttactgcaggaatgtacaggattttaaacgcgcttccgaggaaattaccaaaatgctaaagttttctagtaaagagaagtatcccctttttacatttgtcaatggccacagcagggattatgatttcacgtctaccacaactaacgaggaggaccttttttccgaagatgagaagaaacagctgaagcggttcagcactgaggagtttgtcttactgtag

SEQ ID NO: 9102 - DNA, 8178 bp, synthetic construct
  misc_feature 1..8178: note = source = /note="Description of Artificial Sequence: Synthetic coding sequence"
  source 1..8178: mol_type = other DNA
atggagcagaccgactgcaagccctaccagcccctgcccaaggtgaaacacgagatggatctggcctacacttcatcgagcgatgagtctgaggacggccgcaaaccccggcagagctataactctagggagaccttacatgagtacaatcaggaactgcgaatgaactacaactctcagtctcggaagagaaaagaagtagagaaatcaacccaagagatggagttttgtgagacaagtcacaccctgtgcagcggataccaaaccgatatgcattctgtctctcgtcatgggtatcaactcgagatgggctctgacgtggacacggaaacagaaggcgccgcctcacctgaccatgctcttcggatgtggatccgtggaatgaaatcagagcactctagttgtctgtcttcacgggctaacagcgccttatctttgaccgacaccgatcatgagcgtaaatcagacggagaaaatggtttcaagttctcccctgtgtgttgtgatatggaggcacaggccggaagtacacaggacgtgcagtcctccccacataaccagtttacctttcggccactgcccccgcccccacctccgcctcacgcgtgcacttgtgcgagaaaacctcccccagcagccgactcactgcaaagacgttctatgacaactcgaagccaaccttcccctgcagcccctgcgcccccgacctccacccaggattcggtgcacctgcataacagctgggtcctgaactctaatatccctctggaaaccaggcactttcttttcaaacatggatctggttcgtccgccattttctctgcagcttcccagaattacccactgacctccaataccgtatactctccacccccccgccccctcccaaggagcaccttttcccgtcccgctttcacctttaataaaccctatcgatgctgtaactggaaatgcaccgccctctcagccactgccatcaccgttaccctggctttactcctggcgtatgtaatagcggtacatcttttcggactgacctggcaactgcagcccgttgagggagagctgtatgccaacggggtgagtaagggaaaccgtggaactgagtcaatggacactacatattcaccaattggcggcaaggtctccgacaaatccgaaaagaaagtgtttcagaaaggtagagcgatcgacacgggggaagttgatataggagctcaagttatgcaaactataccacccgggttgttttggagatttcagattacaattcaccacccaatctatttgaagtttaatatttcattagccaaggatagcctgcttggcatttacggcagacgcaacattccacctacccatacccagtttgattttgttaaattgatggatggtaaacagctggtcaaacaagatagcaagggatcagatgatacacagcacagtcctcggaatctgattctgacatccctgcaggagaccgggttcattgagtacatggaccaaggcccatggtacctggcgttctacaatgatggtaagaagatggagcaggtcttcgttcttactactgcaatagagatcatggacgattgtagtacgaattgcaacgggaatggagaatgcatatcaggtcattgtcactgttttccggggttcctaggccccgattgcgcgcgcgacagttgccctgtgctgtgtggtggcaacggcgagtacgagaaaggacattgcgtgtgccggcatgggtggaaggggcccgagtgtgacgttcctgaagagcaatgtatcgatccaacgtgttttggccacgggacctgcatcatgggggtgtgcatctgcgttcctggctacaaaggagagatctgcgaagaggaggactgtttagatcctatgtgtagcaaccatgggatttgtgtaaaaggggaatgtcattgtagcacagggtggggcggggtcaactgcgagacacccttacctgtttgtcaggaacagtgttccgggcacggaaccttcctgctagacgccggcgtttgcagctgcgatccaaagtggacagggtccgattgttccaccgaactctgcaccatggagtgcggatcgcatggggtgtgctctcgcgggatatgccagtgtgaggaggggtgggttgggccaacgtgcgaggagcgctcctgccacagccactgtaccgagcacggacaatgtaaggatggaaagtgtgagtgtagccccggatgggaaggggatcattgcacaatcgcgcactacctcgatgccgtgcgcgatggctgtccaggcctgtgtttcggcaacgggaggtgcacgttagaccagaacggatggcattgcgtttgccaagttggctggtcaggcacaggctgcaacgtcgtgatggagatgctgtgtggagataatctggacaatgacggcgacgggttgaccgattgcgtggaccctgactgctgccaacaaagcaactgttatatatctcctctctgtcagggttccccggatcctttagacctcatccagcaatcacagacactgttcagtcagcacaccagccgactgttttatgataggatcaaattcctgatcggtaaggactcaacccacgtgatccctccggaggtgagctttgattcgaggcgcgcatgtgtgatccgggggcaggtagtggccatagatggcacacctctcgtgggagttaacgtgtcatttctgcatcacagcgattatggcttcactatcagccgccaggatggtagcttcgatttggtggccatcggaggcattagcgtgattctcatctttgacagatctccttttttgcctgaaaagcgcaccctctggctgccctggaatcaattcatagtggtggagaaagtgacaatgcagcgggtagtatccgacccacctagctgtgatattagcaactttatctctcctaatccaatcgttcttccttctccgctaaccagttttggagggtcttgccctgaacggggtacgatagtaccagaactccaagtcgtccaggaggagattcctattccaagctctttcgttcgactgtcctatctaagctcccgtactcctgggtacaaaacactactgagaatccttcttactcattctacaatacccgtcggcatgattaaggtgcacctgaccgtggctgttgagggcaggctgacccaaaagtggtttcctgccgctatcaacttagtgtacacctttgcatggaataaaacagatatctacggccagaaggtttgggggctggccgaggcccttgtgtctgtggggtacgaatacgaaacctgtcccgattttattctgtgggaacaacggacagtggtgctacagggcttcgagatggatgcaagcaacctggggggatggagtcttaacaaacatcatatcctcaatccgcagtcaggcatcatccataaaggtaatggcgagaacatgttcatcagccagcaaccgcctgtgataagcaccattatggggaacggccaccagagaagcgtggcttgcactaactgtaatggccccgcacataataacaagttgtttgcccctgttgcgctagcaagcggacctgacggctcagtctacgtgggcgatttcaactttgtgcgaaggattttccctagcggcaactcagtttctattctggagttgtctactagtcctgcacataagtattatttagctatggaccctgtatcagagtctctgtacctctctgacactaatacacggaaagtgtataagttgaagtctctggttgaaactaaggacctctctaagaacttcgaagtggtggccggaactggggaccagtgcctacctttcgatcagtctcactgcggagacgggggccgcgcttctgaggctagcttgaactctcctcggggtataactgtagatcgccatggctttatatacttcgtggacggtactatgatccgcaagattgatgaaaacgcagttattacaactgttataggctctaacggactgacaagcacgcaacctctaagttgcgatagcgggatggatatcactcaagtgcgtttggagtggcccacagacctggccgtgaatccaatggacaattccttgtacgtcctggacaacaatattgtgcttcagatctctgagaatcgccgcgtaaggatcattgccggcagaccaatccattgccaggtgcctgggatcgatcatttcttggtgtctaaggttgccatccatagcacattggaatcagctcgtgcaattagcgtgagccactctggccttctttttattgctgagaccgatgagagaaaggtcaatcgcattcagcaagtcacaacaaatggcgagatttacattatcgcaggcgcgcccacggattgtgactgcaagatcgatcctaactgtgactgcttttccggcgacggaggctatgcgaaggatgcaaagatgaaagccccgtctagcttagcagtcagtcccgacggcactttatacgtggcagatctggggaatgtgcgcatcaggaccatcagccgaaaccaggctcatctgaatgacatgaacatctacgagattgcgagccctgctgatcaggagctgtatcaatttacagttaacgggacacacctgcatacattgaatctcataaccagagactacgtgtataactttacctataactccgagggcgacctaggggctatcacctcctcaaacggcaactctgtccacatccgacgtgacgcagggggcatgcccctttggctggttgtgccgggcggccaggtttactggctgactattagtagtaatggagtgctcaagcgggtatccgcccagggatacaatttggccctgatgacctaccctggcaatacaggattgctggctacaaaatctaacgagaacggctggacaactgtgtacgagtacgatccagaaggacaccttaccaatgctacctttccaacaggcgaggtgtcatccttccactccgacttggaaaagctgaccaaagtggaactcgacacttctaatagggagaatgtgcttatgtctacaaacttaactgccacctctacaatctacatcttgaaacaggagaacacgcagtcaacatacagggtgaaccctgacggatctttacgcgtgacctttgctagcggcatggaaattggattatcaagcgagccacatatcttggcgggagctgtgaaccctacgctcggcaagtgcaacatttccctgccaggggagcataatgctaacttaatcgagtggcgtcagagaaaggaacaaaataaagggaacgtttcagcgtttgaacgacgcctcagagcccataatagaaacttactcagtatagattttgatcacattactaggactggcaagatctatgatgaccacagaaaattcactctgcggatcctttatgatcagaccgggcgccccatactctggtcacctgttagccggtataatgaggtcaatattacttatagtccctccggccttgttacgttcatacagaggggaacctggaatgaaaaaatggaatatgaccagtccggcaagattatctctcgtacctgggcagatggtaaaatctggagttacacttaccttgaaaagagtgtaatgctcctgcttcacagccagcggaggtatatcttcgagtacgaccagccagattgccttctgtctgtgactatgccttccatggtgcgacacagcttacagactatgttatcggtgggatactatcggaatatctatacacctccagacagcagtacaagtttcattcaggattactcaagggacgggcgacttctgcaaaccctccatctgggcactgggcgacgcgtgctctacaagtatactaagcaggctcggctgtccgaggtgctctacgacactacacaggttaccttgacatatgaggaaagctctggagtaataaagaccatccatcttatgcatgacggatttatctgcacgatccgttatcggcagacaggcccattaatcggccgacagatctttcggttctccgaggaaggattggtcaacgcccggttcgactattcgtataacaacttcagggtcaccagcatgcaggccgtcataaatgagacgccactgccaatagacctctataggtacgttgatgtgagcggaaggactgaacagttcggaaagtttagcgtaattaactatgacctgaatcaggtgattacgactacagtcatgaagcacaccaaaatctttagcgcaaacgggcaagttatcgaagttcagtatgagatcttaaaagcaatagcctattggatgaccatccagtacgacaacgttggcaggatggttatctgtgatatccgcgtgggagtcgatgccaacattacaaggtacttctatgagtacgatgctgatggacagttgcaaacggtctccgtcaacgacaaaacccagtggaggtactcttacgacttgaatggcaatattaacttgctgagccatggaaagtccgcaagactgaccccactgcgctacgacttaagggatcgtatcactcgcctgggtgagatccagtataagatggacgaagacggctttctgcggcagagggggaacgacattttcgagtacaattccaacgggctgctgcagaaggcttataacaaagccagcgggtggacagtgcagtattattacgatggtctcggaaggcgcgtggcctccaaaagtagcttgggccagcaccttcagtttttctatgcggacctgacaaatcccatccgcgtgactcatctttacaatcacacaagcagcgaaattactagcctgtattacgatctccagggccatctcattgccatggagctgagctctggtgaggagtactacgtggcctgtgacaatacaggaaccccccttgctgtcttctcttctagggggcaggtcattaaggagatcctgtacacaccctatggtgatatctaccacgatacctacccagattttcaggtgattattgggtttcacggtggcctgtatgacttccttaccaagttagtgcacctcggacagcgagattatgacgtcgtcgccgggagatggacaactcctaaccatcacatatggaagcagttgaacctgttaccaaagcccttcaacctgtattcatttgagaataactaccctgtgggtaagatacaggatgtcgccaaatacaccaccgacatccgttcatggctcgagctctttggattccagctgcacaacgtgttgcccggattccccaaaccagagctggagaacctggagctgacctacgaactgctcaggctacagaccaaaactcaggagtgggatcccggcaaaactatacttgggattcagtgcgagcttcagaaacagctcagaaactttattagtctcgatcagctgccgatgaccccccgttacaatgacggcagatgcttggaagggggcaaacagcctaggttcgctgcggtgccatctgtcttcggaaaaggaattaagttcgccataaaagatggcatagtgacagcagacattattggtgtggccaatgaggattctagacgactcgctgccatccttaataacgctcattacctcgagaatttgcactttacgattgaagggagagacacccattatttcatcaagctgggcagcttggaggaggatctagtcttaattggaaatacgggggggaggcggatcttagaaaatggcgtgaatgttacagtctcacagatgacctctgttcttaatggtcgcaccaggagattcgccgacatccagctgcagcacggcgcactttgctttaacataagatatggaacaactgtggaggaagagaagaatcacgtactggaaatcgcacgtcaacgggccgtggctcaagcatggacgaaggagcagagaagattgcaggagggggaggaaggcattcgggcctggacagaaggagagaagcagcagctgctgtctaccggccgggtccagggatatgatggctacttcgtcctgtcagtggaacagtacctggaactgagcgactcggcgaacaacatacattttatgagacagtccgaaatcggaaggcgatag

SEQ ID NO: 9103 - DNA, 204 bp, synthetic construct
  misc_feature 1..204: note = source = /note="Description of Artificial Sequence: Synthetic coding sequence"
  source 1..204: mol_type = other DNA
atgaagatccagctgttcttcttcatcctgcacttctgggtgaccatcctccccgccaaaaaaaagtacccggaatacggttcactagatctgcggcgagagtgccgcatcggcaatggccagtgcaagaatcagtgccacgaaaacgaaatccggatcgcatattgtatccgaccggggacgcattgttgcttacagcagtag

SEQ ID NO: 9104 - DNA, 831 bp, synthetic construct
  misc_feature 1..831: note = source = /note="Description of Artificial Sequence: Synthetic coding sequence"
  source 1..831: mol_type = other DNA
atgaagcagatcctgcaccccgccctggagaccaccgcctgcaccaatcactttaacgcggatccatgctccaccgggttcgtgttcccggctatgaccctgttccccgtactactctttctggttgctggcctgctgccctcctttccggccaatgaagacaaggatcccgccttcaccgcactgttgaccacacagactcaggtgcagagggagattgtaaacaaacataacgaactccgtcgcgccgtgagcccccccgctcgaaatatgctgaaaatggagtggaacaaggaggccgccgccaatgcccagaaatgggccaaccagtgtaactacagacactccaatccgaaggaccggatgactagccttaagtgcggcgagaacttatatatgtcatcagccagctcatcctggagccaagctatacagagttggtttgacgaatataatgattttgatttcggcgttggccctaaaaccccgaatgcagtggtcggacattatacccaggttgtgtggtactcctcatacttggtgggctgcggaaacgcgtactgccctaaccagaaagtgctcaagtattattatgtgtgccagtactgtccagccggaaactgggccaatcgactttacgttccttatgagcagggagccccttgtgctagctgtcccgacaactgtgacgacggattgtgcacgaatggatgtaagtacgaggacctgtatagcaattgcaaatccctcaaattaactctcacctgcaagcatcagctggtgagagatagctgtaaagcatcctgcaactgctccaatagtatctactag

SEQ ID NO: 9105 - DNA, 1350 bp, synthetic construct
  misc_feature 1..1350: note = source = /note="Description of Artificial Sequence: Synthetic coding sequence"
  source 1..1350: mol_type = other DNA
atgctggccgagtggggcgcctgcctgctgctggccgtggccctgttgggaccaggtctgcaggctcaagccatggagggcgtaaaatgtggaggagtgctctcagcaccaagcggaaatttttcatccccaaacttccccagactgtatccatataacaccgagtgttcctggctcatcgtcgtggctgaaggatcttcagtcctccttacctttcatgcctttgatttggagtaccatgatacatgctctttcgacttcttagagatctacaacggagctagcccagacaaagggaatttgttgggacggttttgtgggaaggtgccccccccaccatttaccagttcttggcacgtgatgtccgtgattttccattctgataagcacgtggctagtcacggcttctccgccggataccagaaggacgtttgcggtggtgtgctgaccggactgtctggggttctgacctcgcctgagtatcctaataattacccaaactccatggaatgccattgggtgattagggccgctggccccgcccacgtcaagcttgtgttcgttgacttccaggtggagggcaatgaggagtgcacatatgactacgtcgcagtattgggcggccccggacccactcgcgggcatcactactgcggttccacccgcccgcctactctcgtgtctctgggccacgaattgcaggtcgtgttcaaatctgatttcaacatcggcggcagggggtttaaggcctactatttttcaggggaatgccaggaggtttacatggcgatgagaggtaacttctcttcccctcagtatcccagctcttaccccaataatatccgatgccattggacaatccggctgcccccgggctaccaggtcaaggttttctttctggacctagacctggaggagcctaactctctcactaaaacgtgcgacttcgaccacctcgcagcatttgatggcgcttccgaggaggctccactgctggggaattggtgtggacatcatctccccccacctgtcacctcaagccacaatcagctgctccttctgctgcacaccgaccgctctaccactcgacggggatttagcgtagcgtacattggcggccagctcggatgtggttcaggctccaccgaaggcgagggggaagctctgcagccccagtccttacagagcccgtcctcaatcccacctgtgtgccctgcccctcccatgaacgggctcttacagctgctccttcactggttacacccttgccctctcagcggcccactgaggctggacggaacagctcctgcttgtttccactattgccgcgcttctttcccctccttctag

SEQ ID NO: 9106 - DNA, 1434 bp, synthetic construct
  misc_feature 1..1434: note = source = /note="Description of Artificial Sequence: Synthetic coding sequence"
  source 1..1434: mol_type = other DNA
atgaccagcaagttcctgctggtgagcttcatcctggccgccctgagcctctccactacgttctcattacagcctgatcagcagaaagtactactcgtcagtttcgatggtttcagatgggactatttgtacaaagtgccaaccccgcacttccactacattatgaagtatggcgtgcatgtgaagcaggtgacaaatgtgttcattaccaaaacatatccaaatcattacacactggtgactggcctctttgcagaaaaccatggtattgtggctaatgacatgttcgatcccatacgcaacaaatccttttccctggaccacatgaacatttatgattcaaaattctgggaggaagccacgcccatctggattacgaaccagagggctggacatacaagcggcgccgcaatgtggccaggtacagatgtcaagatccataagcgctttcccacccactatatgccttataatgaatccgtgagctttgaagaccgagtagccaaaattatagagtggtttacatctaaagaaccgattaatcttggattactgtattgggaagaccccgatgatatgggacatcacctcgggcctgattcaccactgatgggacctgtgatcagtgatatcgataagaaattagggtaccttattcagatgctcaaaaaagcgaagttatggaatacactgaacctgattattacgtcagaccacggaatgacacagtgctctgaggagcgactcattgagctagatcagtatctggataaagatcactacactctgatcgaccagtctccagtggccgctattctcccaaaggagggtaaattcgatgaagtgtacgaagcgttgacacatgcacacccgaacctgacggtttataaaaaagaagacgtacctgagcggtggcattataagtacaattcacgcatccagccgatcattgccgtggcagacgaggggtggcacatcttgcagaacaagtcggacgacttcctgctgggtaaccacgggtacgacaatgcgctcgccgacatgcaccccattttcctggcacacggtcctgcattccggaagaatttttctaaggaggccatgaatagtaccgatctgtacccccttctttgtcatttgctgaatatcacagccatgcctcataacggatccttttggaacgttcaggatctgttgaattctgccatgcccagggtggtgccatacacacagtccactatcctcctgcccgggtccgttaaacctgccgagtatgaccaggaaggatcctatccatactttatcggagtgagcctgggtagtatcatagtaatcgtcttcttcgtaattttcataaagcatctcatccactcccaaattccggcattacaagatatgcacgctgaaattgcacagccactccttcaggcgtag

SEQ ID NO: 9107 - DNA, 1479 bp, synthetic construct
  misc_feature 1..1479: note = source = /note="Description of Artificial Sequence: Synthetic coding sequence"
  source 1..1479: mol_type = other DNA
atgggcagcgccccctgggcccccgtgctgctgctggccctgggcctgcgggggttacaggctggagctcggcgggcacctgatcccggattccaggagcgatttttccagcaacgacttgaccatttcaactttgagaggtttgggaataaaactttccctcaaaggttcctggtcagcgatcgattttgggttagaggagaaggccctattttcttttatacaggaaatgagggcgatgtgtgggccttcgcaaataacagtgccttcgtggccgaattggcggctgagcgcggtgccctgctggtcttcgcagagcaccgctattacggaaagtccctgccatttggtgctcagagcacccagagaggccatactgagctgctcacagtggagcaggcgttagcagactttgccgaacttctccgagcgctgcgcagggaccttggcgcccaggatgcccccgcaatcgcgtttggcgggagctatggcgggatgctctccgcctatttgcgtatgaaatacccgcaccttgtggcaggcgccctagccgcctccgcacccgtgctcgccgtggccgggctaggcgatagtaatcagttttttcgagatgttaccgctgacttcgagggtcagtcccctaaatgtacacaaggtgtgagggaggctttcagacagattaaggatctgttcctgcagggcgcatacgataccgtgcgctgggagttcggtacttgccaaccccttagtgatgagaaggatctgactcagctgtttatgtttgcaaggaacgcctttaccgtgctggcaatgatggactatccttatccgacggatttcctgggacctctcccagcaaatcctgttaaagtaggctgcgatagactgctgagcgaggctcagcgcataaccggcctgcgtgccctcgctggcctggtctataacgcctccggttccgaacactgctatgacatctatcggctataccattcctgtgccgacccaacaggctgcgggactggccccgatgctcgagcttgggattatcaggcctgcaccgagatcaatctgacttttgcttcaaacaacgtgacagacatgtttccagatctgccctttaccgacgagctcagacagcgttattgtcttgatacctggggcgtttggccacgtcccgattggctgctaacatcattctggggcggcgatttgcgggcagcctcgaacattattttctccaacggtaacctggacccttgggctggcggtggcatcagacggaatctgtctgcaagcgtgattgctgttacaatacaggggggcgcacaccacttagatctgagggcatcccacccagaggatccagcaagtgtggtagaggctcggaagctggaggcgactatcataggggagtgggtgaaggccgctcgcagggagcaacagcccgccttgaggggaggtcctaggctgtcattgtag

SEQ ID NO: 9108 - DNA, 2850 bp, synthetic construct
  misc_feature 1..2850: note = source = /note="Description of Artificial Sequence: Synthetic coding sequence"
  source 1..2850: mol_type = other DNA
atgatcctgagcctgctgttcagcctgggcggccccctgggctggggccttctgggagcatgggcacaggcatcatccacatcactttccgacctccaaagctccaggaccccaggtgtgtggaaggctgaagcagaagatacaggaaaagaccctgtgggccgcaactggtgtccctacccgatgtccaagttggtgaccctgcttgcactgtgtaaaaccgaaaagtttcttatacactctcagcagccttgtccgcagggggctcctgattgccaaaaggtgaaggttatgtaccggatggcccataagcccgtttatcaggtgaagcagaaggtactgacgtcactcgcctggcgatgctgccctggatataccggccccaactgtgagcaccatgactccatggcgatccctgaacccgctgatcccggtgattctcatcaggagccccaagacggtcccgtctctttcaagcctgggcatctggcagccgtgatcaatgaggtggaggttcagcaggagcagcaggagcacctgctgggcgatctccagaatgatgtccatagagtggccgacagcctgcctgggctttggaaagcgttacctgggaacctgactgcagcagtaatggaggcaaatcagactggccacgagtttcccgacagatccttggagcaagtgctgctgccacatgttgatacatttctgcaagttcactttagcccgatttggcgttctttcaatcaatctcttcatagcctcacccaggccatccgcaacctatcccttgatgtagaagccaacagacaggccatatctcgcgtgcaggactccgccgtggccagagcagattttcaggaattgggagctaaattcgaggctaaggtgcaggaaaacacgcagagggtggggcagctcaggcaggacgtggaggaccggctgcacgctcagcattttacactgcataggtccatctcagagttacaagctgacgttgataccaaattaaagcggctgcacaaagcacaggaagcccccggcaccaacggcagccttgtcttggcgactcccggagccggagcccgccccgaacctgactccctccaggctagacttgggcaattgcagagaaacttaagtgagttacacatgacaactgctcggcgcgaagaagaactgcagtataccctggaggatatgagggctacgctaactcgccacgtggacgaaatcaaagaactgtactcggagtccgatgaaacattcgaccagatatctaaagtggaacgccaggtagaagagttgcaagtgaaccacactgccttgagagaactgagggtgatcctgatggagaagtccctgataatggaggaaaataaagaggaagtggagaggcagctgctcgagctcaatctgaccctacagcatctccaaggcgggcacgccgatctaatcaagtacgtaaaagactgcaattgccagaagctgtatttagacttggatgttatcagggagggtcagcgcgatgctacgcgggcactggaagaaacccaggtgtctttggacgagcggaggcagctggacgggagttctcttcaagcactgcagaacgcggtcgatgccgtgagtctagctgtggatgctcacaaggcggaaggcgagcgcgcaagggctgccaccagtcgtttaagaagtcaggtgcaagcactagacgacgaagtcggggcgctgaaagcggcggccgccgaagctaggcacgaggtgagacagctacatagtgcttttgctgccttgttggaagatgctctcaggcacgaggccgtcctggccgctttattcggcgaagaagtgcttgaggaaatgtccgagcagacccctggccctctgcccctgagttacgagcagatccgggtcgccctgcaggacgcagcatcaggcttgcaggaacaggcactcgggtgggacgagctggcggccagggtcacagctctcgagcaagcaagtgagccccccagaccagctgagcacttggagcctagccacgacgctggccgcgaagaggcggccaccaccgccctggccggactggcccgggagcttcagtcactgtctaatgacgttaagaatgtgggcagatgttgtgaggcagaggctggagcaggggccgcgtctttgaacgccagtctccacggcctgcacaacgcactttttgctacacagcggtcccttgagcagcatcagcggttatttcacagtctcttcgggaatttccaaggcttgatggaagccaacgtgtccctggacttgggtaagctgcagacgatgctgtcccgcaaggggaagaaacagcagaaggacttggaagcccctaggaagcgcgacaagaaagaagccgaacccctcgtggacattcgggtcactggacccgtccctggagctcttggagcagcactctgggaagccggctcccctgtagctttttacgctagtttctctgagggaaccgccgcactgcaaaccgtcaaatttaatacgacctatatcaatattggatctagctacttccccgagcacggctatttcagggcccccgaacgtggagtgtatttatttgccgtttcagttgaattcggcccaggaccgggcaccggccagctcgtcttcggtgggcaccaccggactcccgtttgcaccaccggccagggctctggttccaccgcaacagtatttgctatggctgaactgcagaagggcgagagggtctggtttgagctgactcagggatccattaccaagcgctcgctgagtgggactgctttcgggggctttctgatgtttaagacatag

SEQ ID NO: 9109 - DNA, 246 bp, synthetic construct
  misc_feature 1..246: note = source = /note="Description of Artificial Sequence: Synthetic coding sequence"
  source 1..246: mol_type = other DNA
atgcggctgctggtgctgagcagcctgctgtgcatcctgctgctgtgtttctcgatctttagcacggagggaaaacgtagacctgcgaaggcctggagcggaaggcgaactcgactctgctgccacagggtcccatcgccgaattcaaccaacctaaagggacaccatgttagactgtgtaagccctgcaaattggagcccgagcctcggctatgggtagtccccggtgctctgccacaggtctag

SEQ ID NO: 9110 - DNA, 690 bp, synthetic construct
  misc_feature 1..690: note = source = /note="Description of Artificial Sequence: Synthetic coding sequence"
  source 1..690: mol_type = other DNA
atgagcttcctgcaggaccccagcttcttcaccatgggcatgtggtcaataggcgcaggtgctttaggggccgctgccttggccctgctcctggcgaataccgacgtcttcctgtcaaaaccccagaaggcagctctcgagtatctggaagatattgatctcaagactcttgagaaggaaccaagaactttcaaagctaaagagctgtgggagaaaaatggcgccgtgatcatggctgtaagaaggccagggtgttttctgtgccgggaagaggccgcagatttgtcctctcttaaatccatgctcgatcaactcggggtgccattgtacgccgtcgttaaggagcatatccgaactgaggtaaaggacttccagccttatttcaagggcgagatcttccttgacgagaaaaagaaattctacgggcctcagcggaggaaaatgatgttcatgggcttcatacggctcggcgtgtggtacaacttttttagagcctggaacgggggattttctggcaatcttgaaggcgaagggtttattctcggaggcgtgtttgttgtgggttcgggtaagcagggaattctgctagaacacagggaaaaggagttcggggataaagtgaacctgctgagcgtgctggaggccgccaagatgattaaaccacagactctcgcatcggagaagaaatag

SEQ ID NO: 9111 - DNA, 657 bp, synthetic construct
  misc_feature 1..657: note = source = /note="Description of Artificial Sequence: Synthetic coding sequence"
  source 1..657: mol_type = other DNA
atgggcatgtggagcatcggcgccggcgccctgggcgccgccgccctcgcgctgctgctggctaacaccgacgtattcctaagcaagccacagaaggcggccctggaatatctcgaggatatagacctgaagacactggaaaaggaacctagaaccttcaaagccaaggagctgtgggagaagaatggggccgtgatcatggcggtgagacgacccggttgcttcctttgtagggaagaggcggctgatttgtcctctctcaagagtatgctcgaccagctgggggttcccttatacgcagtggtaaaggaacacatacggacagaggtcaaggactttcagccctattttaagggggagatctttctggatgaaaaaaagaagttctacggtcctcagaggcgcaaaatgatgttcatggggtttattaggttgggcgtctggtacaatttctttcgcgcctggaacgggggattttctggtaacctggagggcgagggctttattctgggtggggtcttcgttgttggcagcgggaagcagggaatactattggaacacagggagaaggaatttggcgacaaagtgaacctcctttcggtcctggaggcagcaaaaatgattaaaccccagacccttgcatccgagaaaaagtag

SEQ ID NO: 9112 - DNA, 690 bp, synthetic construct
  misc_feature 1..690: note = source = /note="Description of Artificial Sequence: Synthetic coding sequence"
  source 1..690: mol_type = other DNA
atgagcttcctgcaggaccccagcttcttcaccatgggcatgtggtccatcggtgccggggctctcggggccgccgcattggctctgctattggctaatacggacgtcttcttaagtaagccccaaaaggcagcactggaatacttggaggatatcgatcttaaaaccctggaaaaagaacccaggacctttaaagcaaaagaattatgggagaagaacggagcggtgataatggccgtgaggcgccccggctgcttcttatgtagagaggaggcagcggatctatccagtctcaagagtatgctcgaccagctgggcgtcccgttatatgcagtggtgaaggagcatatcaggaccgaagtgaaggacttccagccgtattttaagggggaaatctttctcgatgagaaaaagaaattttacggaccacagcggagaaaaatgatgtttatgggctttattcgcctgggtgtatggtataatttctttcgggcctggaatggaggattctctggcaatcttgaaggggaggggtttattctcgggggggtctttgtagtgggtagtgggaaacagggtatcctcctagaacacagggagaaagaattcggcgacaaagttaatctcctgtcagtgttggaagctgccaagatgattaaaccacagacccttgcttccgaaaaaaagtag

SEQ ID NO: 9113 - DNA, 690 bp, synthetic construct
  misc_feature 1..690: note = source = /note="Description of Artificial Sequence: Synthetic coding sequence"
  source 1..690: mol_type = other DNA
atgagcttcctgcaggaccccagcttcttcaccatgggcatgtggtctatcggggccggcgccctcggcgcggccgctttagctcttctgctagccaatactgatgtgttcctgtcaaaaccccaaaaagccgctttagaatacctggaggacattgacctgaagacactggagaaggaaccaaggacgtttaaggcgaaagagctttgggagaagaatggggctgtcatcatggcagtcaggagaccgggttgctttctctgtcgggaagaagccgcagatttgtcttctctcaagagtatgctcgaccaattgggtgtgcccctatatgcggtggtaaaggagcacattcgaacagaggtgaaagacttccaaccatattttaagggagaaatcttcctcgatgagaagaagaagttttacggtccccagaggcgtaaaatgatgttcatggggttcatccgcctcggggtctggtacaatttctttagagcatggaacggggggttctctggcaacttagaaggcgaaggcttcatactaggtggggtgttcgtggtgggttccggtaaacaagggatcctcctggaacaccgcgaaaaagagttcggggacaaagttaacctcttgtccgtgttggaagccgccaaaatgattaaacctcagactctagcctcagagaagaagtag

SEQ ID NO: 9114 - DNA, 1248 bp, synthetic construct
  misc_feature 1..1248: note = source = /note="Description of Artificial Sequence: Synthetic coding sequence"
  source 1..1248: mol_type = other DNA
atgagccccttcctgtacctggtgctgctggtgctgggcctgcacgcaaccattcactgcgcaagtccagagggaaaagtgactgcttgccattctagccagcccaatgctacactgtacaaaatgagctccattaatgccgacttcgcgtttaacttatacagaaggtttacggtcgagacgccagataagaacatcttttttagccctgtgagcatatcagccgctttggtgatgttgtcatttggggcctgctgtagcacccaaacagagatagtggagacactgggattcaatctgactgatactccaatggttgaaatccagcacggctttcagcacctgatatgctctttaaactttcctaagaaggaactggagctgcagatcggcaatgcactgttcattggcaaacatctcaagccattggccaaatttttaaacgacgtcaagacactgtacgagactgaggtgttctccacagactttagcaacatctctgccgccaaacaggaaataaattcgcacgtcgagatgcaaactaaaggcaaggtagtcggcttgattcaggatctcaaacctaatactatcatggtcctggttaactatatacacttcaaagcccagtgggctaaccctttcgacccatccaaaaccgaagacagtagttcatttctgattgataagacaaccaccgttcaggtgcccatgatgcatcagatggagcaatattaccacttggtcgatatggaattaaactgtaccgtgctgcagatggactatagtaaaaatgctttagcgttgtttgtgctcccaaaggaggggcagatggagagcgtagaagccgccatgagtagtaagaccctcaagaagtggaaccgtctgttacaaaagggctgggtggatctattcgtcccaaagttctcaatcagcgccacatatgacctgggggccactctcctgaagatgggcattcaacacgcctatagcgagaatgctgatttttcgggactgactgaggacaatggcctgaaactttctaatgcggctcataaggctgtactgcacataggcgagaaagggactgaagccgccgccgtcccagaggtggaactctctgatcaacccgaaaacacctttctgcacccaattattcagatcgatcggtcctttatgctgttgattctggagcgttctaccagaagtatcctctttttgggtaaagtcgtaaacccaaccgaggcctag

SEQ ID NO: 9115 - DNA, 240 bp, synthetic construct
  misc_feature 1..240: note = source = /note="Description of Artificial Sequence: Synthetic coding sequence"
  source 1..240: mol_type = other DNA
atggccccccagaccctgctgcccgtgctggtgctgtgcgtgctgctcttgcaagctcagggcggttacagggacaagaagcggatgcaaaaaacacagttgtcccctgagatcaaggtgtgccagcagcagcctaagttgtatctttgtaagcacctctgcgagtctcatcgggattgtcaggccaataacatatgctgctctacttattgtggtaacgtgtgcatgagtatcttatag

SEQ ID NO: 9116 - DNA, 486 bp, synthetic construct
  misc_feature 1..486: note = source = /note="Description of Artificial Sequence: Synthetic coding sequence"
  source 1..486: mol_type = other DNA
atgggcctgagcggcctgctgcccatcctggtgcccttcatcctgctaggggacattcaggagccagggcacgccgagggcatcctgggcaaaccttgcccgaagattaaggtggagtgcgaagtggaggaaatcgaccagtgcaccaagccccgtgattgtccggagaatatgaaatgctgtccctttagtcgcgggaagaagtgcttagacttcagaaagatctatgcagtctgccaccgtcgacttgccccagcctggcctccttatcatacaggcggcaccataaagaaaacaaagatatgttcagaattcatttatggtggctcccaagggaacaacaacaacttccagacagaagccatctgccttgtgacatgcaaaaagtatcacaagtcagccctgttatacacaatccggagatctctgaacaatctgcaagatttggcccataatccaggactgtcccccagagttcccgactag

SEQ ID NO: 9117 - DNA, 261 bp, synthetic construct
  misc_feature 1..261: note = source = /note="Description of Artificial Sequence: Synthetic coding sequence"
  source 1..261: mol_type = other DNA
atgggcctgagcggcctgctgcccatcctggtgcccttcatcctgcttggcgatatccaggaacccgggcatgcagagggaattcttgggaaaccctgccctaagatcaaagtggaatgtgaagtggaggagatagatcagtgtacaaagccccgggattgtcccgaaaacatgaaatgctgccctttcagtcgaggtaaaaaatgtctcgacttcagaaaagtctctctgacgctataccataaggaagagcttgaatag

SEQ ID NO: 9118 - DNA, 375 bp, synthetic construct
  misc_feature 1..375: note = source = /note="Description of Artificial Sequence: Synthetic coding sequence"
  source 1..375: mol_type = other DNA
atgcccgcctgccggctgggccccctggccgccgccctgctgctgagcctgctgctttttggctttaccctggtttcgggcaccggtgcggaaaagacaggtgtttgcccggaactgcaggccgatcaaaattgcactcaagaatgcgtgtcggactcagagtgtgccgacaatctcaaatgttgctcagcaggctgcgctactttctgttctctgcctaatgacaaggaagggtcttgtcctcaggtcaacatcaacttcccacaactcgggttgtgtcgtgaccaatgccaagtcgactcccaatgcccaggccagatgaagtgctgcaggaatggatgcggcaaggtctcttgtgttacacctaacttttag

SEQ ID NO: 9119 - DNA, 1428 bp, synthetic construct
  misc_feature 1..1428: note = source = /note="Description of Artificial Sequence: Synthetic coding sequence"
  source 1..1428: mol_type = other DNA
atggccgacatgcagaacctggtggagcggctggagcgggccgtgggacgcctcgaagcggtgagccacaccagtgatatgcacagaggctacgccgattcaccatctaaggctggggcagcgccgtatgtgcaggctttcgattcactgctggctggccctgtcgcagagtatctgaaaatatcaaaagaaatcggaggcgacgtgcagaaacacgctgagatggtgcacacaggactgaagctcgagcgcgctttgctggtcactgctagtcagtgtcagcagcctgcagagaacaaactgtccgacctattggccccaatcagcgagcagataaaggaggtgatcacattccgcgaaaagaaccggggctcaaaattgtttaaccatctgagcgccgtgtctgaaagtatccaggccctgggttgggtcgctatggcaccaaaacccggcccatatgtaaaggaaatgaatgatgctgccatgttttacacaaatcgggtgctaaaggagtataaggatgtggataaaaagcacgtggattgggttaaagcttacttgtccatttggactgagctgcaggcatacatcaaagaatttcataccaccggcctggcctggagcaagacgggacctgtcgcaaaggaactctcgggcctaccatcgggaccatcagccggatcgtgccctcccccgccacccccatgtccacctcctcctcccgtctccacaatcagttgtagttacgagtccgccagcaggtccagcctgttcgcacagatcaatcaaggggaatcaattacccacgcacttaaacatgtctctgacgacatgaaaacccataagaacccggctctgaaagcacagtcagggcccgtacggtctggccctaaaccattttccgcaccaaaaccacagacaagccccagtcccaaacgcgcaacaaagaaagaacccgccgtgttggagctggaggggaagaagtggagggtcgaaaatcaggagaatgtgtccaatctggtcattgaggacacagaactgaaacaagtggcgtacatttacaaatgcgtgaacaccaccttgcagataaaaggaaaaataaactcaataaccgtagacaactgcaagaaactcggcttggtgtttgatgatgttgtgggtattgtggaaatcatcaactcaaaggatgttaaagtgcaagtgatgggcaaagtcccaacaatcagcatcaacaagaccgatggctgccatgcatatctgtcgaagaattctctggactgcgagatcgtgtctgcaaaaagctcggaaatgaacgtcctgatcccaaccgaggggggcgattttaacgagtttcctgtgccagagcagttcaaaacattgtggaacggacagaagctggttaccacagtgaccgagatcgccggctag

SEQ ID NO: 9120 - DNA, 438 bp, synthetic construct
  misc_feature 1..438: note = source = /note="Description of Artificial Sequence: Synthetic coding sequence"
  source 1..438: mol_type = other DNA
atggccgacatgcagaacctggtggagcggctggagcgggccgtgggcagactcgaagcggttagtcacaccagcgatatgcaccgtggctacgccgacagcccgtctaaggctggcgccgccccatatgtgcaggcttacattaaagaattccacactaccggtttggcctggagcaaaactggacctgtagctaaggagctctcaggattaccatctggcccatccgcaggctcctgtcctcctcctccgcctccctgtccccctccaccccccgtaagcacaatctcttgcagctatgagtcggcttctaggtcttctctgtttgcacagatcaaccagggagagagcatcacccacgcactcaagcacgtgtctgacgatatgaaaactcacaagaatcccgccctgaaggctcagtccgggccagtgagatag

SEQ ID NO: 9121 - DNA, 1428 bp, synthetic construct
  misc_feature 1..1428: note = source = /note="Description of Artificial Sequence: Synthetic coding sequence"
  source 1..1428: mol_type = other DNA
atggccgacatgcagaacctggtggagcggctggagcgggccgtggggcggctcgaagccgttagccatacctccgacatgcaccgaggttatgcagatagcccctcaaaggcaggagccgctccctacgtgcaggcttttgacagcctgctggcgggcccagttgcggagtatctcaaaatctctaaagagataggtggcgacgttcaaaagcacgccgagatggtgcacactggtctgaagctcgagcgcgcactattagtaaccgcttctcaatgccagcagcccgcggaaaacaagttgtcagatttgctcgccccaatatctgaacagatcaaagaagtcatcacttttcgggagaagaatagagggagcaagttgtttaatcatctttcagccgtatcagagagcattcaggccctggggtgggtcgccatggcacccaagcctgggccctacgtgaaagaaatgaacgacgcagccatgttttataccaaccgagtcctgaaggagtacaaagacgtcgacaagaagcatgtagattgggtcaaagcctacttaagtatttggaccgaactgcaggcatacataaaagaatttcatactacaggactcgcatggtcaaaaactgggcccgtggctaaagaattgtcaggccttccaagcggcccctccgcaggcagctgcccgccaccaccacctccgtgcccaccacctccgcctgtatctacaatcagctgctcatacgaatctgcttcgcgatcatcgttgttcgcccagattaatcagggtgagagcatcacacacgccctcaagcacgtttcagatgacatgaagactcataagaatcctgctcttaaagcacagtcgggtcccgtgcgctcaggcccaaagccgttctccgcaccaaagccacagacctctcctagccccaagcgcgcaacaaagaaggagccggctgtgcttgaactggaaggaaaaaaatggcgagtggaaaatcaggaaaatgtgagcaatctcgtgatcgaggacacagaactgaaacaggttgcatacatctataagtgcgtgaacacgacactgcagatcaaaggtaagattaatagcatcacagtagataattgcaaaaagcttggattggtgttcgatgatgtcgtaggcatcgttgaaattatcaatagtaaagacgtcaaggtgcaagtcatgggcaaagttcccacaatcagcattaataaaaccgatggctgtcatgcctatctcagtaagaattccctggactgcgagattgtgagtgccaagagtagcgagatgaatgtgctgatccccactgagggcggtgacttcaatgagtttcccgttcccgaacagtttaaaacactgtggaacggccaaaaattggtgaccacagtcacagagatagctggctag

SEQ ID NO: 9122 - DNA, 1425 bp, synthetic construct
  misc_feature 1..1425: note = source = /note="Description of Artificial Sequence: Synthetic coding sequence"
  source 1..1425: mol_type = other DNA
atggccgacatgcagaacctggtggagcggctggagcgggccgtgggacggcttgaagcggttagccatacaagtgatatgcacaggggatatgccgattcaccatccaagggggccgccccctatgtccaagcattcgattccctccttgcagggcctgtcgcagagtacctcaagatctctaaagagataggcggcgacgtacaaaagcatgccgagatggtccataccggactaaaactggagagggcgttgctggtaaccgctagccagtgccagcaacctgcggaaaacaaactgagtgatttactagccccaatctctgagcagatcaaagaagtcatcaccttccgagaaaagaatcggggctcaaaactctttaatcacttatccgccgtttctgaaagtattcaggccctggggtgggtggctatggcccccaagcctggcccttacgtgaaagaaatgaatgacgcagcaatgttttatacaaatagagtccttaaggagtataaggatgtggataagaaacatgtggactgggttaaggcatacctgtctatctggaccgagcttcaggcttacattaaagagttccacaccactggccttgcatggagcaaaactgggcccgtagctaaggagttgtctgggctgcccagcggtccatccgcaggcagttgcccaccaccgcctcccccatgtccacctccaccacctgtatccaccatctcatgttcttacgaaagtgcttcacggagttctctctttgcccagattaaccagggcgagtctatcacgcacgcactcaagcacgtgtcagacgacatgaaaacccacaagaatccagctctaaaggcccagtcagggcccgtcagatctggacctaagcccttcagcgcccccaaaccacagacatcccctagtccaaaacgagcgacaaaaaaggagccagccgtgctggagctcgaggggaagaaatggcgggtcgaaaatcaggagaatgtgtcaaatcttgttatcgaggacaccgagctcaaacaggtcgcctatatttacaagtgtgtgaacaccactctccaaataaaggggaaaattaattctattactgtggataactgcaagaagctcgggttggtgttcgacgatgtggtcgggattgtcgagattattaacagtaaagacgtgaaagtccaagtcatggggaaggtgcctacaatttcaatcaacaaaacggatggatgtcatgcctatctcagtaagaattctctggactgcgagatagtttcggcgaaatccagcgaaatgaatgttctaatcccaacagaaggaggggactttaatgagtttccagtgccagaacagtttaagacgctttggaacggccagaagctggtgactacagttacggagatagccggctag

SEQ ID NO: 9123 - DNA, 1425 bp, synthetic construct
  misc_feature 1..1425: note = source = /note="Description of Artificial Sequence: Synthetic coding sequence"
  source 1..1425: mol_type = other DNA
atggccgacatgcagaacctggtggagcggctggagcgggccgtggggaggttggaggcggtgtcccacacaagtgacatgcacagaggttacgccgacagtccatctaaaggcgccgccccctacgtgcaagcattcgactctctgctggccggaccagtggccgagtacctgaaaatttccaaggagatcgggggtgatgtgcaaaagcacgcagagatggttcataccggtcttaagctagaacgggcattactcgttaccgcatctcagtgtcagcagccggccgagaataaactgtcagatctcttagcccccatcagtgagcagataaaggaggtgatcacattcagagaaaagaatagaggatctaaattgtttaatcatctgtcagccgtgagcgaaagcatacaggcactgggttgggtcgctatggcccccaagcctggcccttacgtaaaggaaatgaatgatgccgccatgttttataccaacagggtcctgaaagagtacaaagatgttgataaaaagcatgtggactgggtgaaggcatatttgagcatctggaccgagctccaggcgtacatcaaagagttccatactactggcctggcatggtcaaaaaccggaccagtggcaaaggaattaagcggcctgccatcagggcccagtgctggatcatgtccaccaccaccgccgccatgcccaccacctccaccagtgtccaccatctcttgtagctatgaaagcgccagccggtcgtctctgtttgcccagattaatcagggcgagagcattacacatgccctgaaacacgtctccgacgacatgaagacccacaaaaacccagctctgaaagcccagagtggtcccgtgcgctctggccctaagccattttcagcacctaagcctcagacatctccgtcccctaaacgggctaccaagaaggaacccgccgtcctggaactagagggaaagaaatggcgcgtggagaatcaggagaatgtgtcaaacctggtcatcgaagacaccgagctgaagcaggtggcctacatttataaatgtgtgaatacgaccttgcaaataaaggggaaaatcaactcaattacagtggacaactgcaagaaattgggactggtatttgacgatgtggtcgggattgtggaaattataaatagcaaggacgtaaaggtgcaagtcatgggcaaagttcccacaattagcatcaacaagacagacggatgccacgcatatctgtcgaagaattctttagactgcgagatcgtttccgccaagagtagtgaaatgaatgtgcttatccctaccgagggaggcgatttcaatgaattcccagtgcccgagcagtttaagacgctttggaatgggcagaagcttgttaccacggtaacagaaatagctggatag

SEQ ID NO: 9124 - DNA, 1428 bp, synthetic construct
  misc_feature 1..1428: note = source = /note="Description of Artificial Sequence: Synthetic coding sequence"
  source 1..1428: mol_type = other DNA
atggccgacatgcagaacctggtggagcggctggagcgggccgtgggtaggctggaagctgtcagtcacaccagtgatatgcataggggttacgcggactcaccttcaaaggcgggggccgccccctatgttcaggccttcgattccctcctggccggccctgtggctgagtatttgaaaattagcaaggagatcgggggcgacgtccaaaaacacgccgagatggtacacacaggtttaaagctggaaagggcattgctcgtgactgcctcccagtgccaacagcccgcagagaacaagctgagtgatctgctggcacctatctctgagcagatcaaagaggttatcacttttcgggaaaagaacagggggagcaagctcttcaaccacctgtcagctgtgtcagaatccatccaagcattgggctgggttgcaatggcacccaaaccagggccatatgtgaaggaaatgaatgacgccgcgatgttttacaccaatcgggttttaaaggagtataaggacgtggacaagaagcacgtcgattgggtgaaagcctatctgtccatatggaccgagctgcaagcctacattaaagagtttcacacgacggggctggcatggtccaagaccggacccgtcgcgaaggaattgtccggcttaccctctggaccaagtgcggggtcctgtcctccccctccgcccccatgtccccctcctcctcccgtctccacaatcagctgttcctacgagtccgcatcacgctctagcttgtttgcccagatcaatcagggggaatccataacgcacgccttgaagcatgtgagcgacgatatgaagacgcacaaaaaccccgctttgaaagcccagagcggccctgtgcgctcaggaccaaaaccattttccgcccccaagccccagacatcaccaagtccaaagagggccaccaagaaggaacctgccgtcctcgaactggaggggaagaagtggcgggttgaaaatcaggagaacgtgagtaacctggtaatagaggatacggagctcaagcaggtggcttacatttataaatgtgtgaacaccaccttacaaataaagggcaagattaattctatcaccgtcgataactgcaagaaattgggcctggtcttcgatgatgtggtgggcatcgtggagataatcaacagtaaggacgtaaaggttcaagtgatgggcaaggtgccgaccatctccatcaacaaaaccgatggctgccacgcctacctcagtaaaaactcgctggattgcgaaatcgtgtccgcaaaatcttccgaaatgaacgtccttattcccaccgagggtggagatttcaacgagttcccagttcccgagcaattcaagactctgtggaacggtcagaagcttgttacaaccgttacagaaatagcgggttag

SEQ ID NO: 9125 - DNA, 1209 bp, synthetic construct
  misc_feature 1..1209: note = source = /note="Description of Artificial Sequence: Synthetic coding sequence"
  source 1..1209: mol_type = other DNA
atgaccgccctgcccggccccctgtggctgctgggcctggccctgtgcgccctcgggggaggcggacctggtttgcggcccccaccaggctgtccccagcgcagacttggagcccgtgagcgtcgcgatgtgcagagagagatcctcgcagtgctgggcttgcctggtcgcccccggcctcgtgctccccccgccgcgagtaggctgcctgcatctgccccactgttcatgctggacctttatcacgccatggccggggatgacgacgaagacggagcgcccgctgaaaggcggttaggacgcgcagacctggttatgtcatttgtcaacatggtggaacgagatagggccctcggccaccaggaaccacactggaaggaattccgcttcgacctgacacagatccctgctggcgaggctgttacggccgctgaattccgaatctacaaagtcccatctatccacctgctgaaccgaaccctacatgtgtcaatgttccaggttgttcaagaacagagtaatagggagagcgatctttttttcctggatctgcaaaccctccgcgcgggggacgaagggtggcttgtgctggatgtcacagccgcgagcgactgctggttgcttaagcggcataaggacctggggctgagactgtacgtcgagacagaggacgggcacagcgtggatcccggtctggccggcttgctgggccagagggcccctcgaagtcaacagccatttgtggtgactttcttcagggctagccctagcccaattcgtacaccacgcgcagtgcgccctttgcggcgacgtcagcccaagaaaagcaacgagctgccccaggcaaatagactcccaggaatctttgacgacgttcacggctcccacgggaggcaggtatgtaggagacatgagctgtatgtgtctttccaagacctgggttggctggattgggtcatagctccacagggatactccgcgtactactgcgagggagaatgttccttccctctggactcctgcatgaatgccaccaatcacgctattcttcagtcccttgtccatctgatgatgccggacgcagtgcctaaggcgtgctgtgccccaaccaagctttctgccacaagtgtgctctattacgattccagcaacaatgtcattctgcggaagcacaggaacatggtggtcaaggcgtgcggatgccactag

SEQ ID NO: 9126 - DNA, 804 bp, synthetic construct
  misc_feature 1..804: note = source = /note="Description of Artificial Sequence: Synthetic coding sequence"
  source 1..804: mol_type = other DNA
atggccgccatccggatgggcaagctgaccaccatgcccgccggcttaatctacgcctcagtgtctgtacatgccgcaaaacaggaagagtccaagaagcagttagtgaagccggaacagctaccgatttacaccgcccctccccttcagtcaaagtacgtggaggagcaacctgggcacctgcagatgggcttcgcttccatccggactgcaacgggctgttacattggctggtgtaagggggtttatgtctttgtaaaaaacgggatcatggacacagtccagtttggaaaggacgcctatgtgtatctgaaaaatccgccccgggactttcttccgaaaatgggcgtaataacggtctcggggctggctggattggttagtgcccgcaagggctccaagttcaaaaagatcacttacccgctcgggcttgccaccctcggggccacagtatgctatccagtgcaatcagttatcattgcaaaagtgacggctaaaaggtacatgctgcaggcgtctaaattccttgagcagctcaaccactgtgggcagaaggcagctaaaaagtcgcacagccttaacttaaagaagacaaaattaggatcaagctcagagatcgaggtacctgccaagactacccacgtcttgaagcactccgtgccgttgccaacagaactctcctctgaggccaaaacaaaatccgagtcaacctccggagctacccagttcatgcccgacccaaagctgatggatcatggtcagagtcacccagaggatatcgatatgtattccacccgctcttag

SEQ ID NO: 9127 - DNA, 807 bp, synthetic construct
  misc_feature 1..807: note = source = /note="Description of Artificial Sequence: Synthetic coding sequence"
  source 1..807: mol_type = other DNA
atggccgccatccggatgggcaagctgaccaccatgcccgccggcctcatttacgccagtgtgtcagttcacgctgctaagcaggaagagtcaaagaagcagcttgtaaagccggagcagctccctatctatactgccccacccctgcagtccaaatacgttgaggagcagcccggccacctccagatggggttcgcctccattcggaccgccactggctgctacatagggtggtgcaagggagtttatgtgtttgtcaaaaatggaatcatggacacagtccaatttgggaaggacgcctatgtctaccttaaaaaccctcccagggactttttgcctaagatgggagtgattaccgtgagcggactggctgggctggtaagcgcacggaaaggatcaaaattcaaaaaaattacatatccactgggcctggccaccctgggagccacagtgtgttacccagtgcagtcagtgataattgctaaggtcaccgccaagaaggtgtatgcaacgagccagcaaatattcggcgctgtcaaatcactttggactaagagttctaaggaggagtcgctgcccaagcccaaagaaaagaccaagctcggctcttcctccgagatcgaagtgcctgctaaaaccacacatgtgctgaaacattctgtccccctcccaactgaactgtccagcgaagcaaaaacaaaatctgagtctacgtctggagccactcagttcatgccggatccgaaattaatggaccacgggcagagccaccccgaggacattgacatgtatagcacgcggtcgtag

SEQ ID NO: 9128 - DNA, 3672 bp, synthetic construct
  misc_feature 1..3672: note = source = /note="Description of Artificial Sequence: Synthetic coding sequence"
  source 1..3672: mol_type = other DNA
atggcccccctgcgggccctgctgagctacctgctgcccctgcactgcgctctatgcgctgctgcaggcagccggacgccagagctgcacctgagcggtaaactaagcgactacggagtcacagttccttgctcaaccgacttcagagggcgattcctgagtcacgtggtcagcggacccgcggccgcgtccgccgggagcatggtggtcgatacaccgccaacgctgcccaggcactcttcccacctacgggtggcgcggagccccctgcacccaggcgggaccttatggcctggtcgggttgggaggcacagcctttacttcaatgtcacagtgttcggcaaggagctgcacctgagactcagacctaaccggcgccttgttgtgcccggatcctctgtcgagtggcaggaggacttccgagagcttttcagacagcccctgcgtcaggaatgtgtctacaccggtggggtgactggcatgccaggggccgctgtggcaatctctaactgcgatggtcttgcgggtctgattcgaactgactccaccgacttttttatagagccccttgagcgcggtcagcaggaaaaagaggcaagcgggcgtacacacgtcgtgtacagaagggaagccgtgcagcaggaatgggcagagccagacggcgatctgcacaatgaggcatttggtcttggggatctcccaaacctcttgggtctggtcggggatcagctcggagacacagagcgaaaaagacgacacgcgaagcctggcagctattctatcgaagtgctgctggtggtcgacgactctgtggtacggtttcacgggaaggagcacgtgcagaattacgtgctcacactgatgaacatcgtagatgaaatctaccacgacgaatctcttggcgtgcacatcaacatagccctggtgcgcctgatcatggtgggctataggcagtccttgtcactgattgagagaggcaaccctagtaggagccttgaacaggtctgccggtgggcccacagtcagcaacggcaggatccttctcatgccgagcaccacgatcacgtcgtgttcctcacaaggcaagactttgggccgtcagggtatgcccctgtcaccgggatgtgtcaccctcttcgttcctgtgctctgaatcatgaagacgggttctcgtctgcctttgtgatcgcccacgagacgggccatgtgctcggaatggaacacgacggccaaggtaatggctgcgcagatgagactagcttgggttcagtgatggcccctctcgtgcaggccgcctttcatcggtttcactggtcccgctgcagtaaactggaactgtcaagatacctccctagctatgactgtctgctggacgatccattcgacccggcctggcctcagccacccgagcttcctgggataaactatagcatggacgagcagtgccgctttgactttggatccggatatcaaacgtgccttgcctttcgaacctttgaaccctgtaagcagctctggtgctctcacccggacaatccctacttttgcaagactaaaaaaggcccaccattggatggcaccgaatgtgcacctggaaaatggtgtttcaagggccactgtatctggaaatctcccgaacagacgtatggccaggacggtggatggtcctcctggacgaaattcggctcttgttctcgctcctgtggaggtggcgtgaggtcccgctctaggtcttgcaataacccgagcccagcatacggaggcaggctgtgcttaggcccaatgtttgagtatcaagtctgtaattccgaagaatgcccagggacctacgaagacttcagggcacagcagtgcgccaagcgaaactcttactacgtgcaccagaacgccaaacacagctgggtgccgtatgaaccagatgatgacgcccagaagtgtgaactcatttgccagagcgccgatactggtgatgtggtttttatgaaccaggtcgtacatgatggtacccggtgctcctacagagatccttatagtgtctgcgctcgcggggaatgtgtgcctgtgggatgcgacaaagaagtggggtcaatgaaggctgatgacaagtgtggcgtgtgtggaggagataacagccattgcaggaccgtgaagggcactctcggaaaggcatcaaaacaagccggggcattgaaactggtccagatacctgccggggcccgccacatccaaattgaggccctcgagaagagtccccacagaatcgtcgtgaaaaaccaggtgaccgggtcctttatcttgaatcctaagggtaaggaagccacatcgagaacctttaccgctatgggcctggaatgggaagatgctgttgaggatgctaaggagagcctgaagacttctggccctcttcccgaagccattgcgatcctcgcgctaccccccacggagggcgggcccaggagctctttggcctacaaatatgttatccacgaagacctgctccccttgatcggcagtaacaatgtgctcctggaggagatggacacttacgaatgggctctcaagagctgggccccttgctctaaagcttgtgggggaggcatccagtttaccaagtatggatgccggaggcgccgggaccatcacatggtccagcgacatttatgcgaccataaaaaaagacccaagcccattaggcgtcgttgcaatcaacatccgtgttctcagcccgtttgggtgacggaagaatggggcgcttgttcacgcagttgcggcaagctgggtgttcaaactcgtggcattcaatgtctgctgccactgtccaatggcactcataaggtgatgccagccaaggcttgtgctggcgacaggcccgaggcgcggagaccctgtttgagagtcccttgtcccgcgcagtggcgattgggggcctggtcccaatgttccgccacatgcggcgagggtattcagcagcgtcaggtcgtgtgtagaaccaacgccaacagtcttggccactgtgaaggtgatcgacccgatactgtgcaggtatgtagtctcccggcctgcggtggcaatcaccagaactcgacagtaagggcagatgtctgggagctaggcacccccgagggacaatgggttcctcagagcgagccccttcacccgatcaacaagatcagtagcactgaaccctgcacaggggatcgttctgtattctgccagatggaggtcctcgaccgctattgcagtattccgggttatcatcgcctttgctgtgttagttgcatcaagaaggcttccggacctaaccctggccccgaccctgggcctacctccctgcctcccttctcaacccctggttcaccactacccggtcctcaagatccagcagacgccgcggagccacccggcaaaccgaccgggtccgaagaccatcaacacggccgggcaacccagcttcccggcgcattggataccagttcgcctgggacgcaacacccctttgcgccagagacaccaataccaggagcctcgtggtctatctctcccactacgcctgggggcctcccgtggggctggactcagacaccaaccccggtgcctgaagacaaggggcagcccggcgaagatcttagacaccccggtactagcttgcccgctgcgtcacccgtcacttag

SEQ ID NO: 9129 - DNA, 3681 bp, synthetic construct
  misc_feature 1..3681: note = source = /note="Description of Artificial Sequence: Synthetic coding sequence"
  source 1..3681: mol_type = other DNA
atggcccccctgcgggccctgctgagctacctgctgcccctgcactgtgccctgtgcgcggctgctgggtcccggacaccagagctgcatctgtccggcaagctttcagactacggagtgacggtaccctgtagcactgacttccgcggtagattcctttcgcatgtggtgtctggtcccgccgccgcgtctgccggatcaatggtcgttgacaccccacccaccctcccgagacacagctcccatctgcgggtggctcgcagtccactgcaccccggtggcaccctgtggccaggaagggttggccgacacagtttatatttcaacgttacagttttcggcaaagagctgcacctgcggctgaggcccaacaggcggcttgttgtacctgggagctctgtggagtggcaggaagattttagagaactgtttcggcagccactgcggcaggaatgtgtgtacaccggtggcgtaactggaatgcccggcgccgctgtcgccatttcaaactgcgatggactcgccggactgatcaggaccgactccacagatttcttcattgagccactggagcggggccagcaggaaaaggaggcctcggggcggacacatgtggtctaccgaagggaggccgtgcagcaggaatgggcggagccagatggggatcttcacaatgaagcatttgggttaggtgatcttcctaacttactgggcttggtgggcgaccagctcggggacacagaacggaaaagaaggcacgcgaaacctgggtcctacagcatcgaggtgttgctcgtcgttgacgactccgtcgtccgcttccatgggaaggaacacgttcagaactacgtcctcaccctgatgaacattgtcgatgaaatctaccatgacgagagtttgggagtccatattaacatcgcactggtgcgcctgatcatggtcgggtaccggcagtctctctctctgattgagaggggtaacccctccaggtcattggaacaggtgtgcaggtgggcccatagccaacagcggcaggacccctcccatgccgagcaccacgaccacgtagttttcctgaccaggcaagactttggtccgagcgggatgcaaggatatgcccccgttactggaatgtgccatcccctgaggtcttgcgctctaaaccacgaagacgggttctcttccgcatttgttatcgcccacgaaaccggccatgtgttgggtatggaacatgacggccagggaaatggctgtgctgatgagactagccttggctccgtgatggccccccttgtgcaggccgcttttcacagatttcactggagcaggtgctcaaaacttgagctgtctagatatctgccttcatatgattgtctgctggacgatccgtttgacccagcatggccccaacctccagagcttcctgggattaattacagcatggacgagcagtgcaggttcgactttggctccggctatcaaacctgtcttgccttccggacattcgagccgtgtaaacaactgtggtgctctcaccccgataatccatatttctgcaagacaaaaaaggggcccccactggacgggactgagtgcgctcccggcaaatggtgctttaaaggacattgcatctggaaaagtcccgagcagacctatggccaggatggtggctggtcgtcttggacaaagttcggatcgtgctccagatcctgtggagggggagtacggtcacgatcccgatcatgcaacaacccgtctccggcctatggcggaagactgtgcttgggccccatgtttgagtatcaagtctgcaactcagaagaatgtccaggcacatatgaggattttcgcgctcagcagtgtgccaaacgcaacagctattatgtccatcagaacgccaagcacagttgggtcccttatgagcccgacgatgatgcccagaaatgtgagctaatttgccagagtgctgataccggagacgtggttttcatgaatcaggttgtgcatgatggcacccgatgttcatatcgcgacccttactcggtctgcgcccggggagagtgtgtgcctgtgggttgcgataaggaagtggggtcaatgaaggctgacgacaaatgtggagtgtgtggaggagacaacagtcactgtcgtaccgtgaaaggcaccctgggcaaagcaagcaagcaggctggagccctcaaattggtgcagataccagccggcgccagacacatccaaattgaggccctggaaaagagtccccacagaatagtagttaaaaaccaagtgactggctctttcattctgaatcccaagggaaaagaggcaacatctcggacttttacagcaatgggcctagagtgggaggacgccgtggaggatgcgaaagaaagtctgaaaacttccggtcccctgcccgaagctatagccattctggcattgccacccacagaaggcggtccgagaagctccctcgcgtacaagtatgtgattcacgaggatctcttgccactgatcggctccaataacgttctacttgaagagatggacacctacgaatgggccctaaagtcttgggctccatgttctaaagcctgtggaggcggtattcagttcactaagtatgggtgccgacggcgacgtgaccaccacatggtgcagcgtcatttgtgcgaccataaaaaacgtccaaaaccgatccggcgccgatgcaaccagcatccctgctcccagccagtatgggtaactgaagaatggggagcttgtagccggtcctgcgggaaactcggcgtgcagacccgtggtattcaatgcttactgcctctgtcaaacgggactcataaagttatgcccgctaaagcctgcgcgggcgatagacctgaggctcgcaggccctgcctcagagtaccgtgtcccgcccaatggaggctgggagcttggagccagtgcagcgcgacgtgcggagaggggatacagcagcgacaagtggtgtgcagaacaaatgccaacagtctgggacactgtgagggggataggccagacactgtccaggtctgcagtcttccagcctgtggtgggaaccaccagaactcaacagttagggctgacgtgtgggagcttggcacgcccgaagggcagtgggttccacaaagtgaacctctccaccccattaacaaaatcagttctactgagccctgtacaggcgaccggtccgtgttctgccagatggaggttctcgacagatattgttcaatcccaggataccacagactgtgttgcgtctcatgtatcaagaaggcatcaggtcccaatcctgggccggatccgggtcccacaagcctgccccccttttctaccccagggtcacccctgcccggtccccaggatcccgcagacgccgctgaacccccaggcaagccaacgggcagcgaggaccaccagcacggacgggctacccagctcccaggcgccttggatactagctcacctggaacacaacaccccttcgccccagaaacccccattccaggcgcctcttggtctataagccccactaccccaggaggccttccatggggctggacacagacccctactccagtaccggaagacaaaggacagccgggggaggaccttagacatcccgggacatctcttccagccgcctctccagtgacttag

SEQ ID NO: 9130 - DNA, 762 bp, synthetic construct
  misc_feature 1..762: note = source = /note="Description of Artificial Sequence: Synthetic coding sequence"
  source 1..762: mol_type = other DNA
atggccgccgccacccggggctgccggccctggggcagcctgctgggcttacttgggctggtgagcgcagccgctgccgcttgggacctcgcctcccttcgttgcactctgggcgccttctgcgaatgcgattttcgacccgacctgccaggactggagtgcgaccttgcacaacacctcgccggtcagcacctggctaaggctcttgtcgtgaaggccctgaaagccttcgtgagggaccccgcacctacgaagcccctggtgctgtcacttcatggctggacaggtacaggtaaatcttatgtctcctccttgttggcccattacctgttccaaggcggattgaggtctccaagagtccatcatttttctcccgtgctccatttcccccacccaagccatatcgaacgctacaagaaagatctgaaatcctgggttcaaggcaatctaacagcatgtggcagatcattatttttatttgacgaaatggacaaaatgcctcccgggctcatggaggtgctaaggcctttcctgggcagttcatgggttgtctatgggaccaattatagaaaagccatcttcatcttcatcaggtggggcccggctctacagtgggcccaatggggaggccatttcagcgaagtacagctgtattccctgagcctctgctctcagcagaaccccgtcccccacgggcttagctgggcattcccagtgccctccgccaccttacgtgacgatatcgtaattccgcctggatag

SEQ ID NO: 9131 - DNA, 966 bp, synthetic construct
  misc_feature 1..966: note = source = /note="Description of Artificial Sequence: Synthetic coding sequence"
  source 1..966: mol_type = other DNA
atggccgccgccacccggggctgccggccctggggcagcctgctggggctgctggggctggtcagcgcagcagctgctgcgtgggacttagcaagtctgagatgtacccttggtgcattttgcgagtgtgatttccgccccgacctaccgggcttagagtgcgacctcgcacaacacctcgcaggacagcacctggcgaaggctctggttgtgaaagccctcaaggcctttgtgcgggacccagcgcccacaaaaccattggtgctgagcctgcatggctggaccggcaccgggaaatcttacgttagtagccttctggcccactacctgttccagggaggccttcgttctcctagagtacatcacttcagcccagtccttcacttccctcacccgagccacatcgaacgatacaaaaaagatttaaaatcttgggttcaggggaacctgacagcatgcgggagatctttgttcctgttcgacgaaatggacaagatgccgcccggtctgatggaggtgctcagaccttttcttggctcctcctgggtcgtatacggcactaactaccgcaaagctatttttatctttatttcaaacactggcggtaagcagataaaccaagtcgcattggaagcctggcgatcccgccgcgatagagaggagatcctcttgcaagagctagagccagtgatcagccgggccgtactggataacccgcaccacgggttctccaactcggggattatggaagagaggctcctggatgccgttgtccctttcttgccactccagcggcatcacgtccggcattgtgttctgaacgagctagcccagttgggattggagccccgcgacgaagttgtccaggcagtactggatagcaccactttcttccccgaagatgagcagctgtttagctctaacggctgtaagacagtggcttccagaattgccttcttcctgtag

SEQ ID NO: 9132 - DNA, 576 bp, synthetic construct
  misc_feature 1..576: note = source = /note="Description of Artificial Sequence: Synthetic coding sequence"
  source 1..576: mol_type = other DNA
atgcaggtgtggtgcgaccagcggcacgaccccggcggctggaccgtgattcagcgcagactggacggctctgtgaactttttccgcaactgggaaacatacaagcagggctttggcaacatagatggtgagtactggctcggcctggagaatatctattggttaactaaccagggcaactataagctgctcgtgacaatggaagattggagcggtagaaaagtatttgcagaatacgcctcattcagactcgagccagagtccgaatattacaagctgaggttaggccgttaccacggaaacgctggcgattcctttacctggcataacgggaagcagttcactaccctggatagggaccatgacgtttacaccggcaactgcgcccactatcaaaagggtggatggtggtacaacgcatgtgcccactcaaacctgaacggcgtctggtatagaggggggcattatcgctctaggtatcaggacggggtctactgggccgagtttcggggcgggagttatagtttaaagaaggtggtcatgatgataagacccaatccaaacacttttcactag

SEQ ID NO: 9133 - DNA, 1482 bp, synthetic construct
  misc_feature 1..1482: note = source = /note="Description of Artificial Sequence: Synthetic coding sequence"
  source 1..1482: mol_type = other DNA
atgcggcccctgtgcgtgacctgctggtggctgggcctgctggccgccatgggggccgtcgccggacaagaggatggcttcgagggcacagaggaagggagccctcgagagttcatctatttgaatagatataagcgggccggggaatcccaagataaatgtacgtacacatttattgtgccgcagcaacgagtgactggggctatttgcgtgaatagcaaggagcctgaggttctcctcgaaaatagagtccacaagcaggagctagagctccttaacaacgagcttttgaagcagaaaaggcagattgaaaccttgcaacagctggttgaagtcgatggtggtattgtgtccgaggtcaaactcctgcggaaagagtcccggaatatgaactccagggtgactcagctttatatgcagttactgcatgagatcatcagaaagagagataatgccctggagttgagtcagttagagaacaggattctcaaccaaactgctgacatgctccagctcgctagtaagtacaaagatctcgagcacaagtatcagcatctggcaaccctggcgcataaccaaagcgaaatcattgcccagctcgaagagcattgtcagagagtgccctccgcccggccagtaccacagcccccacccgcggcccctccccgcgtgtaccagcctcctacttacaatcggataattaaccagatctcaaccaacgagatccaaagtgaccagaatctgaaggtcctcccgcccccactgcccactatgccaaccctcactagccttcccagttccaccgataaaccgtccggaccatggagggattgcctgcaggcccttgaagacggacatgatacatcttcaatctacctcgtaaaaccggagaacactaaccgcctaatgcaggtgtggtgcgaccaaagacatgaccctggtgggtggaccgtgatacagcggcggctagacggtagcgttaatttctttcggaactgggagacttacaaacaggggtttgggaacatcgatggagagtactggctgggactcgagaatatctactggttaacgaaccaggggaactataagctgctggtgaccatggaggactggtcaggcagaaaagttttcgccgagtatgcctctttcaggctggaacctgagagcgagtactataagctgagactcggccggtatcacggcaatgccggagattcttttacctggcacaatggcaaacagtttactacgctggaccgagatcacgatgtctacacaggtaactgcgctcattatcaaaagggcgggtggtggtacaacgcttgtgcgcattcgaacctcaacggcgtgtggtataggggtgggcactaccgatccaggtatcaagacggagtctactgggccgaatttagggggggaagctacagtcttaagaaagtggtcatgatgattaggccgaaccctaatacattccattag

SEQ ID NO: 9134 - DNA, 1959 bp, synthetic construct
  misc_feature 1..1959: note = source = /note="Description of Artificial Sequence: Synthetic coding sequence"
  source 1..1959: mol_type = other DNA
atggccgccgccgccctgcccccccggcccctgctgctgctgcccctggtgctgttactcagcggacgacccactcgcgctgattcgaaggtgttcggggatcttgaccaggtgagaatgacatccgaaggatccgactgcagatgtaagtgtatcatgagacccctgagcaaggatgcatgctccagagttagaagcggacgggccagggtagaggacttttacacagtcgagactgtatcgagtggcaccgattgcaggtgctcatgtacagcccctccttcctccctgaatccttgcgagaacgaatggaaaatggaaaagctgaagaaacaggcaccagagctcctgaaattgcagagcatggtcgatttgttggaggggaccctgtacagtatggacctaatgaaggtgcatgcgtatgtgcacaaggtggcctcccaaatgaacaccttggaagaatctataaaggctaacctctctagggagaacgaggtggttaaggactccgtgcggcatctgtccgagcagcttcgtcactacgaaaaccattcagctatcatgcttgggatcaaaaaagagctgtctcggctgggactgcagctcctgcagaaggatgcagccgccgccccggcaacacccgccacgggaactggttccaaagcacaggacacagcgcggggtaaaggtaaagatataagcaaatacggatcagtgcaaaaaagcttcgctgaccgcgggttacctaagcccccaaaggagaaactgctccaagtcgagaagctcaggaaggagagtgggaaaggcagtttcctacagcctacggctaagccacgcgcgctcgctcagcagcaggcagtgatcaggggattcacatattacaaagccggcaaacaggaggtcactgaggcagttgcggataataccctgcaggggacttcgtggctcgagcagctaccgcccaaggtggaggggcggagcaatagtgcggagcctaacagcgcagaacaggacgaagccgagcctcggtcctctgagcgggtggatctggccagtggaactcctacatccattcctgctactacgaccaccgcgacaacaacccccactcctacaacctctctgctgccaactgagcctccctcaggccccgaggtgtcgagccaagggcgggaggcatcctgtgagggaacgcttagagccgtggacccacccgtcagacaccacagctacggccggcacgagggtgcatggatgaaggaccccgcggcgagggatgaccggatctatgtgacaaattactactatggtaacagtctggtagagttccgaaacctggagaactttaaacaggggaggtggtctaacatgtacaagctgccctataattggattggtacaggccacgtcgtgtatcagggagcgttctactataacagagccttcactaagaacatcattaaatatgacctgcgccagcggttcgttgccagctgggcgcttttgcctgacgttgtgtacgaagataccaccccctggaaatggagagggcactctgacatcgactttgctgtggacgaatctggcctttgggtgatctacccggcagtggacgacagggacgaggcccagcctgaagtgatagtgctttctcgcctggatccaggcgacctctcggtacatcgggagaccacatggaagacgcgacttcgtaggaattcctatggcaactgtttcctggtctgcggcatcttgtacgctgtcgacacatacaatcagcaggaagggcaggttgcatatgctttcgacactcatacaggcaccgacgctagaccacagctgccttttctaaacgagcatgcctacacaacacagattgattacaaccctaaagaacgtgtcctatatgcctgggataacggacaccaactcacttacactctccactttgttgtatag

SEQ ID NO: 9135 - DNA, 1641 bp, synthetic construct
  misc_feature 1..1641: note = source = /note="Description of Artificial Sequence: Synthetic coding sequence"
  source 1..1641: mol_type = other DNA
atgaagaaccaggacaagaagaacggcgccgccaagcagagcaaccctaaatcatcccctggtcagccggaagctggtccggaaggagcgcaggagaggccatcacaggccgctcctgcggtcgaggcagaaggacccggcagctctcaggctcctcgtaagcccgaaggcgcacaggctcgcacggcacaaagcggggccctgagggatgtctctgaggagctcagtagacagctggaggacatcctcagtacctactgtgtggataataatcagggcgggcccggggaggacggagcccaaggggagcctgctgagcctgaagacgccgaaaagtcccgtacttatgtcgctcgcaatggtgaaccagaacccactccggttgtgaacggagagaaagagccatctaagggggaccccaacaccgaggagattaggcaatctgacgaagtcggagatagggatcacaggcgtccacaggaaaaaaaaaaggcgaagggactgggtaaggagattaccctgctcatgcaaaccctgaatactctttccaccccagaggaaaagctcgcagcactttgcaaaaagtacgctgaattattagaagagcatcgcaactctcaaaaacagatgaaattactgcagaagaagcagagccagttagtgcaggagaaggaccatctccgcggcgagcactccaaggcagtgctggccagatccaagctagagtcgttatgccgggagttacagcgacacaaccgctccctgaaagaggaaggcgtgcagcgagctagagaggaagaagagaaacgaaaagaggtgacgtcccactttcaagtgacactcaatgatatacagctgcagatggaacaacacaacgagcgcaattccaagttgcgtcaggagaatatggagctcgcggaacgattgaagaagttgatagaacagtacgagcttagggaagagcatatagacaaagtctttaagcacaaggatctccagcaacagctggtagacgccaaattgcaacaagcccaagagatgttgaaagaagcagaagagagacaccagcgcgagaaggacttcctgcttaaggaagccgtcgagtcccagaggatgtgcgagcttatgaaacagcaagaaacccatctgaaacagcaactggcgctatacacagagaaatttgaggaatttcagaacacattgagcaagagctcagaagtttttactacattcaagcaagagatggaaaagatgactaaaaaaatcaaaaagctcgagaaggaaacaacaatgtatcgatcgcgctgggagtccagcaacaaggccctactggaaatggcagaggaaaagacagtacgggataaagagctcgagggactgcaagtgaagatacagcgcctcgagaaactgtgtcgagccctccagaccgagaggaacgacctcaacaaaagggtgcaggacttgtctgcaggaggccagggctccctgactgactctggaccagaaagacggcctgaaggtcccggcgcccaggccccaagcagccccagggtcaccgaagctccgtgctaccccggcgctccatcaaccgaggcctcaggtcagacaggaccacaggagccaacctcagctcgcgcttag

SEQ ID NO: 9136 - DNA, 1641 bp, synthetic construct
  misc_feature 1..1641: note = source = /note="Description of Artificial Sequence: Synthetic coding sequence"
  source 1..1641: mol_type = other DNA
atgaagaaccaggacaagaagaacggcgccgccaagcagagcaaccccaaatcatcacccggtcagcccgaggctgggcccgaaggtgcccaggaaagaccctcccaggccgctccagcagttgaggccgagggccccggctcctcccaggctcctaggaagcctgagggagctcaggctcgaacggcacagtccggggccctccgcgatgtgtcggaggaattgtcacgacagcttgaggacattctttccacctactgcgtcgataacaaccaaggaggacccggggaggacggggcacagggtgaaccagccgaacccgaggacgccgagaaatctcggacatatgtcgccaggaatggtgaaccagaacccaccccggtggtgaatggtgagaaggaaccgtcgaaaggtgacccaaacacggaggagattcgccagagcgatgaagtgggggacagagaccatcgccggcctcaagagaaaaagaaggcaaagggcctgggaaaggagatcaccttacttatgcagactttgaatacactgtccacccctgaagagaagctggcagccctgtgtaagaagtacgcggaactcctcgaagagcatagaaacagccaaaaacagatgaaactgcttcaaaagaagcagtcccagcttgtgcaggagaaggatcatttacggggtgaacattcaaaggccgtgctggcccggagcaagttggagtcactatgcagggaattacaacggcacaacagatcactgaaggaagagggggttcagagggctcgagaagaggaagagaaacgaaaggaggtaacctcccatttccaagtcacgcttaatgacattcagttgcagatggagcagcacaatgaaaggaactctaagctaaggcaggaaaatatggagttggctgagcgtttaaaaaaacttatcgaacagtatgagcttcgggaagaacacattgacaaggtattcaaacataaagacctccagcaacagcttgtggacgccaagcttcaacaggcccaagagatgctgaaagaggctgaagagagacatcaacgggagaaagacttcctgctaaaggaagccgtagagtctcaacgcatgtgtgaattaatgaagcaacaggaaactcacctcaagcagcagctggcattgtacaccgagaaattcgaagagtttcagaacaccctgtctaaatccagtgaggtgtttacgacctttaagcaggaaatggaaaaaatgaccaagaaaatcaaaaagttagaaaaggaaacgactatgtatagatcccgttgggaaagcagtaacaaggccctgcttgagatggcggaggaaaaaaccgtgcgtgataaggagttggaaggattacaggtgaaaattcagcgcctggaaaagctttgccgggctctacagacggagaggaatgatctgaataaaagggtgcaagatctgtcagccgggggccagggttcgctgaccgatagcggccccgagcgaagacctgagggccctggcgctcaggctccttctagtccacgggtgaccgaggcaccttgctatcccggagcaccgtctacagaggcatctggccagaccgggcctcaggagccaacctccgcaagagcctag

SEQ ID NO: 9137 - DNA, 1392 bp, synthetic construct
  misc_feature 1..1392: note = source = /note="Description of Artificial Sequence: Synthetic coding sequence"
  source 1..1392: mol_type = other DNA
atgcacggcagctgcagcttcctgatgctgctgctgcccctgctgctactgctggtagctaccacaggccccgtcggggcactgactgacgaggagaaacggctaatggtggagctccataatctttatcgtgctcaagtatccccaaccgcaagcgacatgctccacatgcggtgggacgaagagctcgccgcttttgccaaggcgtatgctaggcagtgtgtctggggtcacaataaggagagagggaggaggggcgagaatttgttcgcgataaccgacgaaggtatggacgtcccattagccatggaagaatggcaccatgagagggagcattacaatcttagcgcagcaacttgcagcccgggacagatgtgcggacactacacacaggttgtctgggctaagactgaacggattgggtgtgggtctcacttctgcgagaagctgcaaggcgtggaagaaacgaacattgaactgctggtttgcaactatgagcctccggggaacgtcaagggcaaacggccttaccaggaaggcaccccttgttcacagtgtcccagcggataccattgcaaaaactctctgtgcgaacctattggtagcccggaagatgctcaggatttgccttatctcgttacggaggcgccttctttcagggccacggaagcaagtgattctcgcaaaatgggaacacccagttccctcgctaccgggataccagcattcttagttacagaggttagcgggagcctggcaactaaagcacttcccgctgtggagacccaggccccaactagcctcgccaccaaggaccctccctctatggccacggaagctcccccgtgtgtaaccactgaggtgcccagcatcttggcggctcacagcctgccttcgctggacgaggaacctgtgacatttcctaagtctacccatgtgcctattcccaagtctgccgacaaagtcactgacaaaactaaggtgccaagccgtagccctgaaaatagtcttgatcctaagatgagtctgacgggggcccgggagctcctgcctcacgctcaggaagaggcagaagctgaggctgaactacctccatcatctgaagtgctggcatcggtatttccggcgcaggacaagcctggcgagttgcaggctaccctagaccacactggacataccagctccaagagcctgccaaatttccctaatacctcagccacagccaatgctactggcggccgtgccttagccctgcagtcctccctaccgggcgccgagggaccagacaaaccatctgttgtctctgggctgaattctggccccgggcacgtctgggggcccctactgggcctgctgctgctgcctcctctggtcctcgctggaattttctag

SEQ ID NO: 9138 - DNA, 459 bp, synthetic construct
  misc_feature 1..459: note = source = /note="Description of Artificial Sequence: Synthetic coding sequence"
  source 1..459: mol_type = other DNA
atgatgctgccccagtggctgctgctgctgttcctgctgttcttcttcctatttcttctaacaagagggtctctgtccccaacaaagtataacctgcttgagctcaaggagagctgcataagaaaccaggactgcgagacgggctgctgccagcgagctccagataactgcgaatctcactgtgctgagaaagggtcagagggctccctgtgtcagacacaggtgtttttcgggcagtatcgagcatgcccctgccttaggaatctgacctgcatatattctaagaacgagaagtggctcagcattgcttacggcagatgtcagaagatcgggcgacaaaaactggccaaaaaaatgtttttggttctgccaccatcttgttgccttctcctcctgcacctcctgtcctctctgccccgagcactctgttcgccctgtagccctgaaccccccccctag

SEQ ID NO: 9139 - DNA, 366 bp, synthetic construct
  misc_feature 1..366: note = source = /note="Description of Artificial Sequence: Synthetic coding sequence"
  source 1..366: mol_type = other DNA
atgatgctgccccagtggctgctgctgctgttcctgctgttcttctttctgttcctgctcactcggggatccctgagtcctacaaaatacaatctgctcgagctgaaagagtcgtgtattcgcaatcaggattgcgagaccggctgctgccagagagccccagataactgtgagtctcactgcgcggagaagggttctgagggcagtttatgtcagacacaggtcttttttggccagtacagggcctgtccctgtcttcgaaacctcacatgcatttattctaagaatgagaagtggctgtcgatcgcgtatggtagatgccaaaaaatcgggagacagaaattggcgaaaaagatgtttttttag

SEQ ID NO: 9140 - DNA, 1122 bp, synthetic construct
  misc_feature 1..1122: note = source = /note="Description of Artificial Sequence: Synthetic coding sequence"
  source 1..1122: mol_type = other DNA
atgcggctgctggcctggctgatcttcctggccaactggggcggcgctagggctgagccgggcaagttctggcacattgctgacctccatctcgatccggattataaagtctcaaaggacccttttcaagtttgtccatccgccggctcacagccggtgccagacgcggggccatggggtgattatctctgtgactctccttgggctctgattaatagctctatatatgcaatgaaggaaatcgaacctgagccagacttcattctgtggacgggggacgatacaccccacgttccagatgagaaacttggagaggcagctgtgctggagattgtggaaaggctgacaaaactgatccgcgaagtttttcctgacaccaaagtctatgcagctttgggtaatcacgactttcacccaaagaatcagtttcccgctggatcaaacaacatttacaatcagattgctgagttatggaaaccttggctcagcaacgagagcatcgccctgttcaaaaagggggcattttactgtgagaagcttcctggcccgagtggtgccggcagaatcgtcgtgctgaatacaaacttgtattacacctccaacgccctgacagcggacatggctgatccagggcagcaatttcaatggctcgaagacgtgcttaccgatgcttctaaagcaggcgatatggtatacatcgtgggccatgtgcctccggggttctttgagaagacccagaataaggcctggttccgggaaggctttaacgaaaaatacctgaaagtggtccgcaaacatcacagggtcattgctggccagtttttcggacaccaccataccgattccttccgtatgctgtacgacgacgccggggtccccatatccgccatgttcataacacccggggtgacgccatggaagaccacactgccaggagtggtgaatggcgctaataatccggccatcagggtgtttgagtacgatagggccaccctgtctttaaaggtgcgctcaccagccgaggctaggggcggcgggtgggaaggactgaagtgtataacaacatttccccacagccagctcatccatttgccgttaaccactgaaccccaagaaggctag

SEQ ID NO: 9141 - DNA, 810 bp, synthetic construct
  misc_feature 1..810: note = source = /note="Description of Artificial Sequence: Synthetic coding sequence"
  source 1..810: mol_type = other DNA
atgcggctgctggcctggctgatcttcctggccaactggggcggcgctagagccgagccagaggaagcccagggcccatgcgcccaggaaaaagggaagggaccccccccgacgtcgattctggccagtctcgctcccgggctggaagccggcaaattctggcacatcgctgacttgcatctcgacccagattataaagtctcaaaagacccatttcaggtgtgcccctccgccggcagccagcctgtccccgacgccggaccatggggcgactatctctgcgacagcccttgggcccttatcaactcctccatatatgcgatgaaggaaatcgagcccgaaccagactttatcctctggacaggagatgacacgccccatgtgccagatgagaaattgggcgaggctgctgtgctagaaatcgtggaacggctcacaaagctgatccgcgaagtattccccgatacaaaagtctatgcggcactgggcaatcatgactttcacccaaaaaatcagttccccgcaggatccaacaatatatacaaccaaatcgccgagctttggaaaccatggctgtccaacgagtccatcgctctgttcaagaaaggcgcattctactgcgagaagttgccaggcccctcgggagctgggaggatcgttgttctgaatacgaacttatactacacctctaatgccctaacagccgatatggccgaccccggtcagcagttccagtggctggaggacgtattgacagacgcttccaaggccggagacatggtttatatcgtcggtcacgtgcctccatag

SEQ ID NO: 9142 - DNA, 1368 bp, synthetic construct
  misc_feature 1..1368: note = source = /note="Description of Artificial Sequence: Synthetic coding sequence"
  source 1..1368: mol_type = other DNA
atgcggctgctggcctggctgatcttcctggccaactggggcggcgccagggctgaaccaggaaaattctggcatatagctgatctgcacctggacccggattataaagtgtcgaaggaccccttccaggtgtgcccttcagccggatcacagcccgttcctgacgctggaccgtggggtgattacctctgtgacagtccctgggccttgatcaacagcagcatttacgctatgaaggagatcgagccggagcccgactttatcctatggaccggtgatgataccccccatgttcccgacgaaaagctgggggaggctgcagtgctcgaaatagtcgagcgtttaacaaagttaataagagaagtgttccctgacaccaaggtgtacgccgcactgggtaatcatgactttcaccctaagaaccagttccctgccgggtcaaacaatatctacaaccagattgcggagctatggaagccctggctctctaacgaaagcattgctcttttcaaaaagggtgcgttctactgtgagaaactacccgggccctctggcgcgggaagaatcgtagtgctgaacacgaacttatactacacgtcgaatgcgctgacagccgacatggccgatcccgggcagcaattccaatggctggaggacgtcctcaccgacgccagcaaggccggtgatatggtgtacattgtggggcacgtgccacccggtttcttcgagaagacacagaacaaagcatggtttcgggaagggtttaacgagaagtacctcaaggtcgtgcgcaagcatcatcgtgtcatcgcaggacaattttttggccatcaccacaccgactccttcagaatgctgtatgatgacgctggagtgccaattagcgccatgttcatcactcctggagtgacgccttggaagaccaccctgcccggggttgtgaacggggccaacaaccccgctatccgcgtgttcgaatacgaccgcgccacactcagtttgaaggatatggtcacctactttatgaatctgagtcaagccaatgcccaaggcactccaagatgggaactggagtaccagctgaccgaagcctacggggttccagatgcctccgcacattccatgcataccgtccttgacaggattgcaggagatcagtccacactgcagcggtattatgtgtacaattccgtgtcatattctgccggagtctgtgatgaggcctgttcaatgcaacacgtgtgtgccatgaggcaggtcgacatcgatgcatataccacctgcctgtacgcgtccggcaccacccccgtaccacaattgcccctccttttgatggctctactgggcctgtgtaccctggtgctgtag

SEQ ID NO: 9143 - DNA, 867 bp, synthetic construct
  misc_feature 1..867: note = source = /note="Description of Artificial Sequence: Synthetic coding sequence"
  source 1..867: mol_type = other DNA
atggccctggccccccccccccggggcctgtggcaggccaaggacatatccccaattgtaaaagccgcacgcagggacggcgaacttctactctccgcccaactggactctgaggagagagaccctggcgtgccacgacccagcccctatgccccatatattctcgtctatgccaatgatctggctatttctgaacctaacagtgttgctgttactcttcaacggtacgatccatttcccgctggagatcctgaaccaagggcagcacctaataacagcgccgatcccagggtgcgccgtgctgcgcaggcaaccggtcccctccaggataacgagttacccggactcgacgaaaggcccccccgggcccatgcccagcactttcacaaacaccaactgtggcctagccccttccgcgcactgaagccgcgccctggtaggaaggacagacgcaagaagggccaggaggtgttcatggctgccagccaagtgttggattttgatgagaagaccatgcagaaggcccgtagaaagcaatgggatgagcctcgagtctgttctagacgatatcttaaagtggatttcgctgatatagggtggaatgagtggattatctcgcccaagtcattcgacgcatactattgcgcaggcgcttgtgagtttccaatgcccaagattgtgagaccctctaatcatgctaccattcaaagtatcgtgagagccgtcgggatcattccgggcatcccagagccctgctgtgtgcccgataaaatgaactcactgggggttttgttcctggatgaaaatcggaacgttgtgctgaaagtgtaccccaacatgtctgtcgacacatgcgcttgccgatag

SEQ ID NO: 9144 - DNA, 1626 bp, synthetic construct
  misc_feature 1..1626: note = source = /note="Description of Artificial Sequence: Synthetic coding sequence"
  source 1..1626: mol_type = other DNA
atgcccttccggctgctgatccccctgggcctgctgtgcgccctgttacctcagcaccacggcgctcctgggcctgacgggtccgcgccagatcccgcccactattcatttagcctgactttgatagatgccctcgacacactgctgatcctgggaaatgtcagcgaatttcaacgagtggttgaggtcctgcaggacagcgtggattttgacatagatgtaaacgcatccgttttcgaaacgaacatccgcgtagtgggcgggctgctctccgcgcatctccttagcaaaaaggcgggcgtggaggtggaggcggggtggccgtgtagtgggcctctgttacgaatggctgaagaagcagccaggaagctcctgcctgccttccaaacgcccacagggatgccctacgggactgtcaacctgttgcacggtgtcaatcccggtgaaaccccggtgacctgcaccgccggcatcggtactttcatagtggagttcgctacacttagctctctgactggagacccagtgttcgaagacgtggcgcgtgtggccctcatgagattgtgggagagccgtagcgacattggtctggtaggaaatcatattgacgttctgactggtaaatgggtggcacaggacgctggaatcggcgcgggcgtggactcttactttgagtacctggtaaagggggctatactcctgcaggacaagaaacttatggccatgtttttggagtacaataaggctatccgaaactatactcggttcgatgattggtacttgtgggtccagatgtataagggtaccgtctcaatgccggtcttccagtccctggaggcctattggccagggctgcaaagtctgattggagacatcgataacgctatgcgaacatttctgaattactacaccgtttggaaacagtttggcggcctgccagaattttacaacattccgcagggatatacggtagagaagcgcgaaggttatcccttacggcccgagctcattgagtccgccatgtatttataccgcgccacaggtgatccaacattgctggaacttggccgagatgccgtcgagtcaatcgagaagatctcaaaggtggagtgtggatttgccacaattaaagatctcagggatcacaagctcgacaacaggatggagagcttcttcctggctgagacagtcaaatatctgtacttgctgtttgaccctacgaattttatccataacaacgggagcacgttcgacgcagtcatcacaccctacggagagtgcatcctgggcgcgggggggtacatttttaacaccgaggctcatccaatagaccctgccgccttgcattgctgccagcggctgaaggaggagcagtgggaagtggaagacctcatgagggagttctatagcctgaagaggtcacggagcaaattccaaaagaacactgtgtcctcagggccttgggagcctcccgcccgtccaggaacacttttctctcccgagaatcatgatcaggctagggagagaaaaccagcaaaacagaaggtacctcttctttcttgtccgtcccagccatttacctcgaagctcgcactgctgggacaggtgtttctagactccagttag

SEQ ID NO: 9145 - DNA, 1737 bp, synthetic construct
  misc_feature 1..1737: note = source = /note="Description of Artificial Sequence: Synthetic coding sequence"
  source 1..1737: mol_type = other DNA
atgcccttccggctgctgatccccctgggcctgctgtgcgccctgctgccccagcatcacggtgctccaggaccagatggctctgctcccgatccagcgcattaccgcgagcgggttaaggccatgttctatcatgcttatgacagttacctggagaacgcttttcccttcgatgagcttagaccacttacttgtgatggccatgatacatggggttccttctctctgactttaatcgatgcactcgacaccctcctgatactggggaacgtatcagaattccaaagagtcgttgaagtcttacaggactcagtggacttcgatatcgatgtaaatgcaagcgtgttcgaaacaaatatacgagtcgtgggagggctcttgtcagctcatttactctcaaagaaagccggagtggaggtggaggcagggtggccctgttccggtcctctcttgagaatggccgaagaagccgcccggaaattgctcccagcattccaaactcctaccggcatgccgtacgggacagttaatttgctgcatggcgtgaatccaggggaaacacctgtaacctgtaccgcgggaataggaaccttcatagtggagtttgccaccctgtcttctctcactggcgatcctgtttttgaagacgtcgctagagtagcactcatgcgcctctgggagtcaaggtcagatatcggcctggtgggcaaccatattgacgtgctgaccggcaagtgggtagcccaagacgccggcatcggtgccggagtggattcctacttcgagtatctggtgaaaggggccatcttattgcaggacaagaagttgatggctatgttcttggaatataacaaagcaattcgaaattatacacgctttgatgattggtatctttgggtccagatgtataagggaactgtctcaatgcccgtatttcagtcacttgaagcttattggccaggcctgcagagcctgatcggtgatattgacaacgcgatgcggacctttctgaactactataccgtatggaaacaattcggcggtctgcccgaattctacaatatccctcagggctacactgtagagaagcgagaaggctatcctctccgacccgaactgatcgaatctgccatgtatctgtatcgagctaccggcgacccaactttgctcgagcttgggagggatgccgtcgaaagtatcgagaaaatctctaaagtggagtgcggtttcgcgactataaaggatctcagagaccataagctggacaatcggatggaatctttttttctggcagaaactgtgaagtacctctatctgctgttcgacccaaccaactttattcataataatggttcaacgttcgatgcggtgatcacaccctatggcgagtgcatcctgggcgcgggtgggtatattttcaacacagaagcccatcctattgaccccgctgcactgcattgttgccagagacttaaggaggaacagtgggaggtcgaagatctgatgcgagaattttattctcttaaacgatcgcgcagtaaatttcagaaaaatacagtgagttccgggccctgggagcctccagcacgtccaggtactctctttagcccagaaaatcacgaccaggcccgggaacgaaagcccgcaaaacagaaggtgccactcctttcatgtccctctcagccctttacatctaaactcgccttgttgggacaggtgttcctggacagcagttag

SEQ ID NO: 9146 - DNA, 495 bp, synthetic construct
  misc_feature 1..495: note = source = /note="Description of Artificial Sequence: Synthetic coding sequence"
  source 1..495: mol_type = other DNA
atgcggagctgctacgtggcccaggccggcctgaagctgcccggcagcagcgatccgccagcatctgcctcacagtccactcggatcaccgctagcggatatggccccccaagctcaaggcctagtagcagagttgtcaatggtgaagacgctgtgccctatagttggccttggcaggtgtctctgcagtatgaaaagagcggctccttttaccatacatgtggcggaagcttgattgctcctgattgggtggtgaccgccgggcattgcatcagctcttctcgcacttatcaggtcgtcttgggcgaatacgatagggctgtaaaagaaggcccggagcaagtcatacctattaactctggcgatctcttcgtgcatcctctttggaatcgctcttgtgttgcctgcggcaacgatatcgccctcattaaactgagccgctccgcacagttgggtgacgcagttcaactggcatctctgccaccggccgggtag

SEQ ID NO: 9147 - DNA, 3663 bp, synthetic construct
  misc_feature 1..3663: note = source = /note="Description of Artificial Sequence: Synthetic coding sequence"
  source 1..3663: mol_type = other DNA
atgcccggcctgctgaactggatcaccggcgccgccctgcccctgacggcttccgatgttactagttgtgtcagcggatatgcgctgggcctgaccgcatcactcacttacggcaatctggaagcccagccgtttcaggggctgttcgtgtatccactggacgaatgcactaccgtaatcggctttgaggctgtaatcgctgatcgcgtggttacggtccaaatcaaagataaagctaaactggagagcggccacttcgacgcttctcacgtgagatcaccaactgtcacaggtaatattctccaggacggtgtttcaattgcaccacattcctgcacccccggaaaggtcaccctcgatgaggacctcgagaggatcctgttcgtcgcgaatctggggacgatcgcccccatggagaacgtgactatatttatcagcactagctcagagctgcccacccttccgagcggagctgtcagggttctactgcctgctgtgtgcgctcctaccgtaccacaattctgcaccaaaagcactgggacctcaaatcagcaggcccagggcaaggaccgacattgtttcggggcctgggctcccggttcttggaacaaactgtgcctcgccacattgttgaatacggaagtctctaacccaatggagtatgagttcaacttccagctggaaatcaggggcccatgccttctggctggcgtggaatcccctacccacgagattagggccgacgcagcaccaagcgcacgttccgcaaagagtatcatcattacacttgctaacaagcacacgtttgacaggccagtagaaattctcattcatccgtcagagccgcacatgccgcatgttctgatagaaaagggggacatgactttgggggagtttgaccagcacctcaaggggcggactgactttatcaagggcatgaagaagaaaagtagagccgaaaggaaaactgagatcatccgtaagcgccttcataaggacatcccacaccattccgtgataatgttaaacttttgcccagacttacagagcgtgcaaccctgcctgcgcaaggcacatggggaatttattttcttgatagacaggagctcctccatgtctggtatttcaatgcaccgagttaaagacgcaatgttggtggccctcaagtcactgatgcctgcttgcctgtttaatataatcggtttcggaagcactttcaagtcactgtttccatcttcacagacttactccgaagatagtctcgcaatggcttgtgatgatatacagaggatgaaggccgacatgggtggcacgaacatcctgagtcctctgaagtgggtgattcgccagcccgttcacagaggccatcctcgccttctcttcgtcattactgatggcgctgtgaacaatactggcaaggtcttagaactggtgcggaatcacgccttctccacgcgatgctattctttcggcattggccccaatgtgtgtcaccggcttgtcaaggggttggccagcgtgagcgagggaagcgcagagctgttgatggaaggggagcgcctgcagccaaaaatggttaaaagcctgaaaaaagcaatggcccctgtgctctcagacgttactgttgagtggatcttccctgagactacagaggtgcttgtctctcccgtgtccgcgtcctccctgtttccgggagagagattagtgggctacggaattgtgtgtgacgcctccctccacatcagcaaccccaggagcgataagcgtcgacgctatagcatgctgcattctcaggaatccggatcaagtgttttttaccacagccaggatgacggccccggcctcgaaggaggcgattgtgccaaaaacagtggcgccccgtttatcctgggccaggccaagaacgctagactagcttccggagattccactaccaagcacgatctgaatctatctcagagaaggagagcctacagcactaaccagatcacaaatcacaaacctctgccacgcgctactatggcgtctgatcccatgcccgccgccaaacgctaccctctgaggaaggcgagactccaggacttgacaaatcagacaagtctggacgtgcagcgctggcagatcgatctccagccattgctgaattctggccaggatctgaaccaaggtcctaaactgcggggcccgggcgctaggcgcccaagtcttctgccccagggttgtcaaccctttcttccctggggccaggaaacacaggcctggtctccagttagggagcgcacctcagattccaggtctcctggcgacctcgagccctctcaccacccatcggctttcgaaactgagacatcctctgattgggatcctcctgctgaaagccaagagcgtgcaagccctagcaggcccgccacacccgcacccgttctgggcaaagccttagtgaaggggctgcatgatagccagaggttgcagtgggaggtaagcttcgaactgggaaccccaggccctgagagaggcggcgcccaggatgccgatctgtggagtgagaccttccaccacctcgccgcgcgagcaatcattcgggactttgagcaattagcagaacgtgagggggagattgagcagggttcgaacaggcggtaccaggtctcagccctccacacgagtaaggcttgcaacattatatctaaatatactgctttcgtcccagttgatgttagcaagtcacgttaccttccaacagttgtcgagtaccccaactccgccgcacttaggatgctggggagtagggcgctggcacagcagtggaggggtacaagtagcggcttcgggcgtccacagaccatgcttggagaggatagtgcccctgggaatggtaagtttcaggcgctcaacatggaagccagccctacagctctcttctctgaggcgagatctccggggagggaaaagcacggggccagtgagggcccccaaagatctttggctaccaacacgttgtcaagcatgaaggcaagcgaaaatctttttgggtcttggctgaatctaaataaatcacgccttctcacccgcgcggcgaagggatttctgagcaagcctctaattaaggcggtggagtcgacctctgggaaccagtctttcgattatatccctttggtgtctcttcagttagcatccggcgccttcctcctgaacgaagccttctgcgaggcaacacacatccctatggaaaagctgaaatggactagccccttcacatgccacagggtcagcttgactactcgcccatctgagagtaagaccccatcaccacagctctgtaccagctctcctccccgtcatccttcgtgtgatagcttctcgctggaacctctggctaagggcaaattgggactcgagccccgggctgtagttgagcacaccggaaagctgtgggccacagttgttggactcgcgtggttagagcattcatctgccagctacttcaccgaatgggagttggttgctgccaaggccaatagctggctggagcaacaagaagttcccgagggccgcacacagggaactctgaaggctgccgcccgccagctttttgttctgcttcgccactgggacgaaaacttagagttcaatatgttgtgttataaccctaattacgtgtag

SEQ ID NO: 9148 - DNA, 3051 bp, synthetic construct
  misc_feature 1..3051: note = source = /note="Description of Artificial Sequence: Synthetic coding sequence"
  source 1..3051: mol_type = other DNA
atgcccggcctgctgaactggatcaccggcgccgccctgcccctgacagcttctgacgtgaccagctgtgtgtccggctacgcgttagggctcactgcgtctctcacctatggcaatctggaagcccagccattccagggactgtttgtctatccgctggacgagtgtaccaccgtcattggctttgaggcagtcatcgctgatcgagtggtgaccgtacagatcaaggataaggcaaaactggagtctggacacttcgatgcgagccatgtcagatcccccactgtgacagggaatattcttcaggatggagtgtccatagcaccccatagttgcacacccggcaaggtaacactggatgaggaccttgagcgaattctattcgtcgccaatctgggcactattgctccgatggagaacgtgacaattttcatcagtaccagcagtgaactccctacactgccatccggtgctgtccgggtgctcctgcctgccgtctgtgcacctaccgtgcctcagttttgtactaagagtacaggtacctccaaccagcaagcccagggtaaagacagacactgctttggagcctgggctccgggctcttggaataaactgtgcctggctacactcctgaacaccgaggttagcaatccaatggagtatgaattcaacttccaattagagatccgcgggccatgcctgctggcgggggttgagagtcccacgcatgaaatacgcgccgatgctgctccgtctgctagaagtgcaaagagcattattatcacactggccaataagcataccttcgatcgtcccgtcgagatactgatacacccttccgagccgcacatgccgcacgtcctcatcgagaaaggcgatatgactctgggagagttcgatcagcacctcaaagggagaaccgatttcatcaagggcatgaaaaagaaatcgcgggctgagagaaagacggagattattaggaaacggctgcacaaggacatcccacaccatagcgtgatcatgctcaacttttgtccagatttacaatctgtccagccatgcttgaggaaggcacacggcgaatttatctttcttattgatcgctccagctctatgtccgggatctccatgcaccgtgtgaaagacgcaatgctcgtggcccttaaaagcctcatgccagcctgtctgttcaacatcatcggcttcggaagtacctttaagagtcttttcccttctagccagacgtacagtgaggattctctggcgatggcatgtgatgacatacaacggatgaaagcagacatgggcggtacaaacatcctatcacctttaaagtgggtgataagacaacctgtacacagggggcatccacgtctgctattcgtgattacagacggagctgtcaataatactggaaaagttctagagctggtgcgcaatcacgccttctccacccggtgctattcctttgggatcggcccaaatgtgtgccatcgactggtcaagggtctggccagtgtctcggaaggatcggcagaacttctcatggagggcgagcgcctacagcccaagatggtgaaatccctgaaaaaggctatggcgccagtcctctctgacgtgacagttgagtggattttccctgaaaccaccgaagtgttggtaagcccagtgtcagcatcaagcctgtttcctggtgagcgcctcgtggggtacgggatcgtgtgcgacgcctctctccacattagcaacccaagatccgataagaggagacgatactcaatgctgcacagtcaggagtcagggtcctctgtgttttaccatagtcaagatgatgggcccggattggaaggtggcgactgtgccaagaactctggagccccatttatcctcggacaggccaaaaacgcaaggttggctagcggcgactcaaccaccaaacatgatctgaacctgtctcagcgcaggagagcctattccacaaaccagataactaaccacaagccgctgcctagggctacaatggcctctgatccaatgccagccgccaagcgatatccgctgcggaaggcccggctgcaggacctgactaaccagactagtttggacgtacaacgctggcaaatcgacttgcagcccttgctgaacagcggacaggacctcaaccagggccccaaactgcgaggtcccggtgcaaggcggccctctctgctgccccagggatgccagccctttcttccctgggggcaggagacacaagcttggtcacccgtgagggaacggacttccgacagcagaagccccggagacctggaaccctcgcaccacccgagcgctttcgagactgagacatcatctgattgggatcccccagcagaatctcaggaacgggcctctccgagccgtcccgccacccccgcaccggttctcggaaaagccctggtgaaagggctccatgacagccagcgtctgcaatgggaggtcagttttgagttggggacacccggaccggagaggggtggtgcacaagacgctgacctctggagcgagacctttcaccacctagccgctcgggccatcattcgcgacttcgagcagttggccgaacgtgagggggaaatcgagcaaggaagtaataggcgttatcaagtgagcgcactacacacttcgaaggcatgtaatatcatctccaagtataccgcattcgtccccgtggatgtgtccaaatcccggtacctcccaaccgtggtggagtatccaaattctgccgcactacgaatgctagggtcaagagcgctcgcccagcagtggcgcggaacatcttccggctttggtagaccccaaacgatgttgggagaggatagtgctcctggaaacggccctcgaaagtgctctcagaccctgatgggattcaaaactaaaaccgagacggagcatagtgtgcgcgggtggaagccacggggagccctgcagaatcagtcggtgctgtctacaagctggtcgcattggccaccgaaacctcgccggacatcctcaacgccagagccctcctag

SEQ ID NO: 9149 - DNA, 3663 bp, synthetic construct
  misc_feature 1..3663: note = source = /note="Description of Artificial Sequence: Synthetic coding sequence"
  source 1..3663: mol_type = other DNA
atgcccggcctgctgaactggatcaccggcgccgccctgcccctgactgcttccgacgtcacaagctgcgtttctggctatgctttggggttaactgcaagcctcacctacggcaacttggaagctcagccattccaaggactgttcgtctatccgctagatgaatgcaccacggtaatcggctttgaggcagtaatagctgacagggtggtcactgtgcagattaaggacaaggcaaagctcgaaagcggccactttgacgcttcacatgtgagatctcccaccgttactggtaatatcctacaggacggggtgtctattgccccccatagctgtacccccggaaaggtgacccttgatgaggatctcgaaagaattctttttgtcgcaaatctgggcacaatcgctcctatggaaaatgtcaccatctttattagcacctctagtgagttgcctactctgccatctggggcagtgcgtgttctgctcccagccgtgtgtgctcccacagtcccgcaattctgcacgaagtctaccggaaccagcaaccagcaagctcaaggcaaggacaggcactgtttcggcgcttgggcaccaggttcttggaataaactctgcttggccactctcctgaacacagaagtgagcaatcccatggaatacgaattcaattttcaactggagatcagaggaccctgtcttttagcaggcgttgaaagccctacccatgaaattcgcgctgacgccgcacctagtgcacggtctgccaagtccatcattattacactggccaacaaacacaccttcgaccgacctgtcgaaattctgattcacccttccgagcctcacatgccgcatgttctaattgagaaaggcgatatgactctaggtgagttcgaccagcacctgaaaggccggactgatttcattaaaggcatgaaaaaaaagagccgcgcggaaaggaagaccgagatcatcaggaagagactgcacaaggacatcccccaccactccgtaattatgttgaatttctgcccagacttgcaaagcgtgcagccttgtttgcggaaggcacacggcgagtttattttcctcatcgatcgatcaagttccatgtcagggatttcaatgcaccgggtgaaggacgcgatgctcgtggcactgaaatcgctgatgccagcttgtctgttcaacattatcggatttggcagtacctttaaatctttgttcccaagttcacagacatattcagaagactccctggccatggcctgcgacgacattcaaaggatgaaggccgacatgggcgggactaacattctgagcccattgaaatgggtcatacgtcagcccgtgcatagaggacatccgagattgttatttgtcatcaccgatggggccgtcaataatactggcaaagtgctggagttagtgaggaaccatgccttcagtacaagatgttattcttttgggatcggccctaatgtgtgtcacagattggtgaaaggcctggcctccgtgagtgaaggcagtgctgagctcctcatggaaggagagaggctccaacctaaaatggtcaagtcccttaagaaggcaatggcccccgttctctctgacgtgacagtggagtggatcttccccgaaacgacagaggtcttggttagtcccgtttctgcctcttctctgtttcccggcgagcgcctggtagggtacggtatcgtgtgcgacgcttccttacatatcagcaatccgagatctgacaaacgcagacgttacagcatgcttcacagtcaggaatccggctcctcagttttctaccactcccaggatgatgggcccgggctggagggcggggattgcgctaaaaatagcggagctcctttcattctgggtcaagctaagaacgctagattggccagtggcgactccacaacgaagcatgaccttaatctcagccagagacggcgggcttattctacgaatcaaattactaatcacaagcctctcccacgcgcgaccatggccagcgaccccatgccggcggcaaagagatatccacttcggaaggcgcgtctacaggaccttacgaatcagacatccctggatgttcagaggtggcagattgatctgcagccattacttaactcagggcaagatcttaaccaaggtccgaagctgcgaggccccggtgccaggcggccctcgctgctgccccaggggtgtcagccatttctgccatgggggcaggaaacccaggcttggagtccagtacgtgaacggacttctgactcccgaagcccgggggatcttgaaccaagccaccacccctctgccttcgagactgaaacttcgtctgactgggaccctcctgccgagagtcaggagcgcgctagcccctcccggccagctacccccgctccagtcttgggcaaggcactggtgaagggactgcacgattcccaacggctgcagtgggaagtttcttttgaattgggtacaccaggaccggagcgggggggcgctcaggatgcagacctttggagtgaaacatttcatcacttggccgccagagccatcatccgcgacttcgagcagctggctgagagagaaggcgagatcgagcagggttctaaccgccgataccaggtgtccgcacttcatacttctaaagcctgcaacatcatttccaaatatacagcatttgtgccagtggatgtctcaaaaagccggtatctccctaccgtggtggagtaccccaactctgccgccctgcgcatgctcggaagcagggccttggcccagcagtggcggggaacatcatctggctttgggagaccccaaaccatgctgggcgaggatagcgcgcccggcaacggtaagttccaggcattaaatatggaagcaagccctactgcattgttcagcgaggccaggtccccgggccgtgaaaagcatggcgctagcgaaggcccccagaggagtcttgccacaaatacgctttcttcaatgaaggcatcagaaaacctgttcggctcctggctgaacctcaacaagtccagactactcacccgagcagcaaagggtttcctgtcaaaacccttaatcaaagctgtggaatcaacatcaggtaaccagtcatttgattacataccacttgtgagcctgcagctcgccagcggcgcgtttctactcaatgaggccttttgcgaagcgacccatatcccaatggagaaacttaaatggacctctcccttcacttgccatagggtttctcttactacccggccctcagagagtaagaccccctcaccacaactttgcacatccagcccaccgcggcatcccagctgcgactcattttctcttgaaccactcgccaaggggaaactgggactggaacctcgggccgtcgttgagcatactggaaagctgtgggccaccgttgtgggacttgcttggctcgagcattcctccgcatcttatttcaccgaatgggaactggtcgcggcaaaggccaactcatggctggaacagcaagaagtcccagagggccgcacccaaggtactcttaaggccgccgctagacaactgtttgtcttactgcgacactgggacgaaaacctcgaattcaacatgctctgctacaaccccaattacgtgtag

SEQ ID NO: 9150 - DNA, 5235 bp, synthetic construct
  misc_feature 1..5235: note = source = /note="Description of Artificial Sequence: Synthetic coding sequence"
  source 1..5235: mol_type = other DNA
atgcggctgctgtggggcctgatctgggccagcagcttcttcaccctgtccctgcagaagcctcgcctgcttctcttcagtccctcggtggtacacctgggcgtccctctgtctgtcggggtccagttgcaagatgtaccaagggggcaagttgtcaaaggttctgtcttccttagaaaccccagccggaacaatgtcccctgtagccccaaagtggacttcacactttcgtctgaaagagacttcgccttactgagcttacaggtgcccctcaaagacgcaaagtcttgcggcttgcatcagttactgaggggaccagaagtgcagctcgtggcccactcaccgtggctgaaggatagtctgagtagaacaactaacatccagggtattaacctgctcttctcgagtaggcgtggccacctttttcttcaaactgaccaacccatttataatcctgggcagcgcgtgagatatagggtttttgcgcttgaccaaaagatgagaccctcgaccgatactataacggtaatggtcgaaaattcccacggattacgggttaggaagaaagaagtgtacatgccatcttccatcttccaggatgacttcgtgattcctgatatcagcgagcccggaacatggaagatcagcgcacggtttagcgacgggcttgagtctaattcttctacacagttcgaggttaagaagtacgtgctgcctaacttcgaagtgaagattacacctggtaaaccctacatcctgactgttcccgggcatctggacgaaatgcagctggatattcaggctcgttatatatatgggaagcccgtgcagggagtggcttatgtgcgctttgggctgctcgacgaggacggaaagaagaccttctttagagggctcgagtcacagaccaagttggtgaatgggcagagtcatatttcactgagtaaggcggagtttcaggacgctctggaaaaactcaacatggggatcacagaccttcagggactgaggctgtacgttgcagctgccattattgagtaccctggtggggaaatggaggaggcggaactgacatcttggtactttgtgtcaagcccattttcacttgatttatccaagactaagagacatttggttcctggcgctcccttcctcctccaggctcttgttcgtgaaatgtctggctcccccgcgtccggcattcctgtgaaggtgtcagccaccgttagctcacccggatctgttccggaggtccaggacattcagcagaacaccgatgggtccggtcaggtgagcatcccaatcatcatccctcagacaatctccgaattgcagttatctgtatctgcagggtctccacatcccgccatagctcgactgacagtggcggcaccgccatccggcggtccaggattcctgtcaattgagagaccagatagtcggcctccgcgggtgggtgacaccctcaatctgaatttgagggcagttggtagcggagccactttttcgcattattattacatgatcctctctcgggggcaaattgtgttcatgaatcgcgaaccaaagcgcactctgacttctgtcagcgtattcgtggaccatcatctggcccccagtttctactttgtggctttttattatcacggggatcatcctgtggccaacagcctgagagtggatgtgcaggctggagcttgcgaggggaagctcgaactctccgtcgacggcgctaagcaatatcggaacggggagtctgtgaagctgcacctggagaccgacagcttggcactagtcgccctgggtgccctcgacaccgccctgtatgctgctggctcaaagtcgcacaagcctctgaacatgggcaaagtgtttgaggcaatgaattcttatgatctcggttgcggacccggcggcggcgacagcgctctgcaggtgtttcaggcggccgggctagcattctccgatggtgaccagtggactcttagtcgaaaacgcctgtcctgcccaaaggagaaaacaactaggaagaagaggaacgtgaacttccaaaaagcgataaacgaaaagttgggccagtacgcttcgcctactgctaaacgatgctgtcaggatggcgtgaccagactgcccatgatgcgatcctgtgagcagagggccgccagagttcaacaacccgactgtcgggagccttttctgagttgctgtcagttcgccgaatcattacggaagaagtcaagggacaaggggcaggccggactgcagcgcgcacttgagatattgcaagaggaagatttaattgatgaagacgacatcccggtgcgctcttttttcccagaaaactggctgtggcgcgtggagaccgtagatcgttttcaaattctgaccctgtggctccccgactcgttgactacatgggaaatccatggactctcactttcgaagactaaggggctttgcgtcgccacaccagtccaacttagggtattcagggaatttcatttgcatctgaggctgcctatgagtgttagacgttttgaacagctcgaactgaggcccgtgctctacaactacctcgacaagaacttgacagtatcagtgcacgtgagtccagtggagggattgtgtttggcgggcgggggcggactagcacagcaggtcttggtgcccgcaggaagtgctcgccccgtggcgttctccgtggtgcctaccgccgctgccgccgttagcctgaaagtagtggcccgagggtcatttgaattccccgtgggcgatgcagtaagcaaagtgctgcagatcgagaaggaaggtgcaatacatcgggaggagctggtctacgaactgaacccactggaccatcggggcaggacactagaaatccccggcaactcggatcctaacatgatcccagacggtgactttaattcttacgtgagagtcaccgcaagcgatcctcttgatactcttggcagtgaaggtgctctcagtcccggaggggtggcttcacttctgcgcctaccccggggctgcggcgagcaaactatgatctatcttgccccaacccttgccgcttctcgatacctagacaaaacggaacaatggagtactctcccaccggagacaaaggaccatgccgtggatctgatccagaagggttacatgaggattcaacagttccggaaggcagatggaagctacgcggcgtggctgtcccgagggtcgtctacctggctgacggctttcgttcttaaagtgttgtccctagcacaggagcaggttgggggatctccagaaaaactccaggagacctcgaattggttgcttagccagcagcaggcggacgggtccttccaagatctttctcccgtcatccatagatcgatgcagggggggctggtcggcaatgatgagaccgtcgctctgacagcgtttgtcaccattgctctccatcatggactggcagtgtttcaggacgagggcgccgagcctctgaagcagagagtggaagcttcaatctccaaagccagcagcttccttggggagaaagcatcagccggactgttgggcgcacatgccgccgccattactgcgtacgcgctgacactgacaaaggccccggccgacttacggggcgtggcacataacaacctgatggccatggctcaagaaaccggagataatctgtactggggctcagtgacaggctcgcagtccaacgccgtgtcacctactccggcaccccgtaatcccagcgaccctatgcctcaggccccagccctgtggatcgaaaccaccgcgtacgcccttctgcatctgctgctgcatgagggcaaagctgagatggcagatcaggccgcagcatggttaacacggcagggctcatttcaggggggctttagaagcacgcaggatacagtcattgctctggatgctttgtctgcctattggatcgcctcacacacaactgaggagcggggcctgaatgtcaccctgagttccacaggacgcaatgggttcaagtcacatgcgctgcagctcaacaacagacagattcgcggcctggaggaagaattacagttcagtctcggttctaagatcaacgtgaaggtgggaggcaactccaaagggactctgaaggtcttacgtacctataacgtgctggacatgaaaaacactacttgtcaggatctacagatagaggtcacggtgaaaggacatgtagagtatactatggaagccaacgaggattacgaggactatgagtacgacgagcttcctgcgaaagatgacccagacgcaccgctgcagccagtcacccccctgcagctgttcgaaggaaggagaaaccgacgaagacgcgaggcacccaaggtggtggaggaacaggaatcacgtgtacattatacggtttgtatatggaggaatggcaaggtgggactgtccggtatggctattgctgacgttacactactgtctggtttccatgccttgcgtgctgatcttgaaaagctcactagtctctcagaccgctatgtgagtcacttcgagacagaaggcccacacgtgttgctgtacttcgatagcgtccccactagtagagaatgcgtgggatttgaagccgtccaggaggtcccagtcggtctcgtccaacctgcgagcgctacattgtacgattactacaaccctgagagacggtgcagcgtcttctacggcgccccatccaagagcaggctacttgctacgctttgtagcgccgaggtttgtcagtgcgcggaagggaagtgccctaggcagcgccgcgccttagaacggggtttacaggacgaggatggctaccgaatgaaattcgcctgttattacccacgggtggagtacggtttccaggtcaaggttctgagagaggattcgagagccgcatttaggttatttgagacaaagattactcaggtgttgcactttaccaaggacgtgaaggccgccgcgaatcagatgcgcaacttcctcgtaagagcgtcctgcaggcttcgtctcgagccaggcaaggagtatcttattatgggactggatggagccacctatgatctggaaggccacccacaatacctgctggacagtaatagttggattgaggagatgccaagtgagagactgtgccgctcaacaaggcagcgcgcagcctgtgcgcaactgaacgacttcttacaggaatacgggactcaaggctgtcaggtgtag

SEQ ID NO: 9151 - DNA, 1242 bp, synthetic construct
  misc_feature 1..1242: note = source = /note="Description of Artificial Sequence: Synthetic coding sequence"
  source 1..1242: mol_type = other DNA
atgaagggcgccctgggcagccccgtggccgccgccggcgccgccatgcaagaatcttttgggtgcgtcgtcgctaacaggtttcatcagctgttagatgacgaatctgacccatttgacatcctgcgggaagccgaacgccgccgtcagcagcaattacagaggaagagacgggacgaggcagcagccgccgctggagctggaccacgggggggacgatcccctgcgggcgcgtctggccatcgcgctggtgctggcggacgccgcgaatctcaaaaggagcgcaaaagtctgccggcccctgtagcccagaggcctgacagcccgggcggcggtttacaggcccccgggcagaaacggaccccaagaagaggtgagcaacagggctggaatgattcccgcggaccagagggaatgcttgagcgggccgaaagaagaagctatcgagaatatagaccctacgagactgagagacaagcagatttcaccgcagagaaatttccggacgagaagccaggagatcgttttgatagagacagacccctaaggggtagaggcggcccccggggcggtatgcgtgggcggggtagaggcggcccaggaaatcgagttttcgacgcatttgatcagagaggcaagagggagttcgagcgatacggcgggaacgacaagatcgctgtgcgaacagaggacaacatgggagggtgcggcgtgcgcacatggggatctggtaaagacacaagtgacgtcgagccaactgctcccatggaagagcccaccgttgtggaggagtcccagggcaccccagaagaagaatcccccgctaaggttcctgagctcgaagtcgaggaggagacacaggtccaggagatgactcttgatgagtggaagaacctgcaagaacagactagacccaaacccgaattcaatattcgaaagccggaaagtactgttccgagtaaggccgtggtgatccacaagtcgaagtaccgagacgacatggtgaaggatgattacgaggacgacagccacgtttttaggaaacccgccaatgacataacaagccagctggaaattaactttggaaatctgcctaggccagggcgcggggcccggggcgggacacgaggtggacgtggtaggatccgcagggctgagaattatggccccagagccgaggtcgtaatgcaagatgtggcgcccaaccctgatgaccctgaagattttccagctctcagctag

SEQ ID NO: 9152 - DNA, 927 bp, synthetic construct
  misc_feature 1..927: note = source = /note="Description of Artificial Sequence: Synthetic coding sequence"
  source 1..927: mol_type = other DNA
atgaagggcgccctgggcagccccgtggccgccgccggcgccgccatgcaggaatcatttggctgcgtggtcgccaaccggttccatcagctgctggacgatgagtcagatccttttgatatcctgagggaagctgagagacggagacagcagcagctgcagcgtaaacgaagggatgaagccgccgccgctgccggagccggcccccgggggggacgctctcctgctggggcctccggacatcgcgctggcgcgggcggcaggcgggagagccagaaggagcgtaagtccctaccagcaccggtggcacaaaggccagactcacccgggggcgggctccaggccccagggcagaagcgaactccccgccgaggtgagcaacagggttggaacgattctagaggcccagaaggcatgctggagcgcgctgagagacgcagctaccgggagtatagaccatacgaaaccgaacgacaggccgactttacagctgagaagttccccgacgagaaggtgcctgagttagaagtggaggaggagactcaggtccaagaaatgactctcgatgagtggaaaaatctgcaagagcagacgcgaccaaaacccgaatttaacattcgcaaaccagagtctaccgttcccagtaaagcggtggtcatccataagtcaaaataccgtgacgacatggtgaaggacgactacgaggacgactcccacgttttcaggaagcccgcaaatgacatcactagccagcttgaaattaattttggcaatctcccacgcccggggagaggggccagaggtggcacacggggaggtagaggcaggatcaggcgagccgagaactacggcccccgtgctgaggtggttatgcaggatgtcgcacccaacccagatgatcccgaggactttcccgcgctcagctag

SEQ ID NO: 9153 - DNA, 1437 bp, synthetic construct
  misc_feature 1..1437: note = source = /note="Description of Artificial Sequence: Synthetic coding sequence"
  source 1..1437: mol_type = other DNA
atgccccggcggggctacagcaagcccggcagctggggcagcttctgggccatgttaaccttggtggggcttgtaacgcatgctgcccagagggctgacgtgggcggggaagccgccggcacaagtatcaatcatagccaagcagtgctacagcggcttcaggagctgttacgccagggtaatgccagcgatgtcgtgttacgggttcaagccgccggaactgacgaggtccgcgtctttcacgcccatcgtctgcttttggggctgcactctgaactcttccttgaattactgagcaaccagtcggaggcggttctgcaggagcctcaggattgcgcagccgtattcgataaatttatacgctatctgtattgtggagagctcaccgtcctgctgactcaagccatccctctacacaggttggcaactaagtatggcgtgtcaagtctgcagaggggggtggcagattacatgagggcgcacctggctggcggcgccggccccgccgttggctggtaccattacgccgttggaaccggggacgaagccctaagggagtcctgtcttcagtttctagcctggaatctttctgctgtggccgccagcacggaatggggggcagtgagccctgagctgttatggcagttgctgcagaggagcgatctcgtgctccaggatgaattggagctgtttcatgccctggaagcctggctcggacgcgccaggcccccccccgctgtggctgagagggccctccgggctataaggtatcccatgattcctccagcccagctatttcagctccaagctagaagcgctgccctggctcggcacgggccggcagtggctgacctcctgctccaggcctaccagttccacgctgcatccccgcttcattacgctaaattcttcgacgtcaacgggtccgctttccttcccaggaattacctggcccccgcttggggcgctccttgggtgatcaataacccggcccgggacgaccgatcaaccagtttccagacgcaactgggtccaagtgggcacgacgcaggtcgacgggtcacttggaacgtgctgttctcgcccaggtggttaccagttagcttgaggcccgtgtatgccgacgccgcgggaacagccctgccggctgcccgtcccgaagacgggaggcctcggctggttgttaccccagccagcagtggtggggatgctgccggtgtgtcctttcagaagaccgtgctcgtgggggcccgacagcaggggagattgctggttcgccacgcctactcctttcatcaatcctcagaggaagcaggcgactttctagcccatgccgacttacagcgcagaaattccgaatatctggtggaaaacgcactgcatctccatctaatagtgaagccagtgtatcacacgcttatccggaccccaaagtag

SEQ ID NO: 9154 - DNA, 477 bp, synthetic construct
  misc_feature 1..477: note = source = /note="Description of Artificial Sequence: Synthetic coding sequence"
  source 1..477: mol_type = other DNA
atgtgctgccccggcggccactacaccctgatcctgcggcggggcaatcggtttaggcgggagaagcggcctgcaaaagttacaggtgcccaaaccgaagtccagctggctcctccactgccgagagggcgagcaaggcgaagtccatggagcgtcccaatcagcctctctatcgatcggttggagttcgacctcttgtatcccgccattaaaggcgataccatccagttatacctgggagcaaagctcctggatagccagggcaaggtgacaaagtggttcaataactccgctgcctcgcttactatgcctaccctggacaatatcccgttctcattaattgtgtctcaggatgtagtcaaagccgccgtagcagcagttctgagccccgaagaattcatggttttactcgactcggtgctccctgagagcgcccacagactgaagagcagcatcggacttatcaacgagaagtag

SEQ ID NO: 9155 - DNA, 771 bp, synthetic construct
  misc_feature 1..771: note = source = /note="Description of Artificial Sequence: Synthetic coding sequence"
  source 1..771: mol_type = other DNA
atgttccagaccggcggcctgatcgtgttctacggcctgctggcccaaacgatggctcagtttggtggtttgcctgtgcctctcgatcagaccttgcctttgaacgttaaccccgcacttcccctgtcccccacgggactggcaggatctctcacaaatgccctgtcaaatggactgttgtcgggcgggttactcgggatactcgaaaacctgcctctgctcgacatcctcaagccgggcggggggactagcggtggactgctcgggggtcttctcggcaaagtgacatccgttatcccgggcctgaacaatatcatcgatatcaaagtgaccgaccctcagcttttggaactgggcctggttcagtcacctgatggccacagattatacgttacgattccactgggaattaagctgcaggttaatacacccctggtgggggctagcctgctgcgcctggcggtgaagcttgacatcactgcggaaattctggccgtgcgggataagcaggaaagaatccatttggtgctcggagactgcacccattcacctggctctctacagatttcactgctggacgggctagggcccctccctattcaaggtctgcttgactctctgactggaattttgaataaagtgctgcctgagctcgtgcaaggtaacgtgtgccctcttgtgaatgaagtcctgcgaggattggatatcactctggttcacgatattgtcaatatgctgatccacggcctgcaattcgtaatcaaggtgtag

SEQ ID NO: 9156 - DNA, 771 bp, synthetic construct
  misc_feature 1..771: note = source = /note="Description of Artificial Sequence: Synthetic coding sequence"
  source 1..771: mol_type = other DNA
atgttccagaccggcggcctgatcgtgttctacggcctgctggcccagaccatggcccaattcggcgggttgcctgtgccccttgatcagacccttccgctcaatgtcaatcctgctttacccctgtcacccacaggactcgcgggatctctaacgaatgccctgtctaatggactgctgagcggcggcctgctcggaatcctggagaaccttcctctcctagatatcctcaagccgggcggcggcactagcggcgggctgctcggcggacttctaggcaaagtgacatccgtgatcccaggccttaacaacattatagacatcaaggttaccgacccgcaattgctggaactaggactggtccagtcgccggacggccaccgactgtatgtgactattcctctggggatcaaattacaggtgaacacacctttagtgggggctagcctcttgaggctagctgtgaagctggatattacagcagaaatcttagccgtccgggataagcaggagcgcattcacttggtgctcggagactgtacacactcacccggcagcctgcagatcagtctgctggatgggctgggccctctgccaatacagggtttgctcgattctttaacgggcatcctgaataaagttctgccagagctcgtacaaggaaatgtgtgccccctcgtgaatgaggttctacgtggcctagacatcactctggtgcatgacattgtcaatatgctaatccacgggttgcagttcgttattaaagtgtag

SEQ ID NO: 9157 - DNA, 657 bp, synthetic construct
  misc_feature 1..657: note = source = /note="Description of Artificial Sequence: Synthetic coding sequence"
  source 1..657: mol_type = other DNA
atgatgtgccccctgtggcggctgctgatcttcctgggcctgctggcattgccccttgccccacacaagcagccatggccaggtctggctcaggcccatcgggataataaatctactctggctaggatcattgcccaggggctcatcaagcacaatgcggagagtcgcattcaaaatatacacttcggggatcggttaaacgcatccgcccaggtagcccccggactggtgggctggctaatatctggaaggaaacatcaacagcagcaggaaagccgctcctttgacaataatatcgttaaaatgtgcgcgcacatgtctatcgtggtggaattttggttagaaaaggatgaatttggacggagagatctggtcatcggcaaatgcgatgcggagccaagcagcgttcatgtggcgattctgaccgaagccattccgcctaaaatgaaccagttcctgtataatctcaaggagaacctgcaaaaggtgctgccccatatggttgaatctcaggtttgcccgttaatcggggagatcctcggacaactggatgtaaagcttctgaaatcattaatcgaacaggaagcggctcatgagcctactcaccacgaaacatctcagccaagcgcttgccaggcaggggagagcccttcatag

SEQ ID NO: 9158 - DNA, 765 bp, synthetic construct
  misc_feature 1..765: note = source = /note="Description of Artificial Sequence: Synthetic coding sequence"
  source 1..765: mol_type = other DNA
atgatgtgccccctgtggcggctgctgatcttcctgggcctgctggctcttcctctcgcaccccataaacagccatggccaggcctagctcaggcccatagggacaacaaatccacccttgcccgcataatagcacagggtcttattaaacacaacgccgagagcaggatccagaatatccacttcggggaccggctgaatgcatctgcccaagtggctcctggtcttgtgggctggctcattagcggtaggaagcatcagcagcagcaagagtcttctattaacattaccaatattcagctggattgtggaggcatccaaatcagtttccacaaggaatggttcagtgccaatatatctctggaatttgacctcgaactgcgtcccagctttgacaataatatcgtgaagatgtgtgcacacatgagcatagtggtagagttttggctggaaaaggatgagttcgggaggcgggacctggtgatcggcaagtgtgacgctgaacccagctccgtacatgtggcaattctcaccgaggctatcccccccaagatgaaccagtttctctataatttgaaagagaatttgcagaaagtgctgccccacatggtcgagtcccaagtttgtccattgataggcgagatcttgggtcaattggatgtcaagctacttaagtcactgatcgaacaggaggccgctcatgaacccacccatcacgagacctctcagcctagtgcctgtcaggcaggagagtctccgagctag

SEQ ID NO: 9159 - DNA, 1635 bp, synthetic construct
  misc_feature 1..1635: note = source = /note="Description of Artificial Sequence: Synthetic coding sequence"
  source 1..1635: mol_type = other DNA
atgaagatcagcatgatcaactacaagagcctgctggccctgctgttcatcctggctagctggatcatcttcaccgttttccagaacagtacaaaggtgtggagtgccctgaacctttctatctccctccactactggaataattcaactaaaagcctgttccccaaaacccctctgattagcttaaagcccctgaccgaaactgagctgcgtataaaggaaattattgagaagctagaccagcagatccctccaaggcctttcacccacgtgaataccaccacaagtgctacacactcaaccgccaccatcctgaatccgagggatacgtattgtaggggggaccagttacatatcctactggaggtcagagaccatcttggaagacgaaagcagtatggcggtgattttttgcgggctaggatgtcttcccccgcacttatggccggcgcgtcaggcaaggtgacagacttcaacaacggtacttatctcgtctcctttactctcttttgggaagggcaggtgagcctgtcactactgttgatccacccgagcgaaggggtgagtgccctgtggtctgcgcggaatcaagggtatgatcgggttattttcactgggcagtttgtcaacggcacctctcaggtgcacagtgaatgcggtctgatcttaaataccaatgcggaactctgtcagtatctagataaccgcgaccaggagggtttctactgcgtgagaccccagcacatgccatgtgccgctctaacccatatgtactctaagaacaagaaggtctcgtatctttcaaagcaagaaaagagtctctttgagcggtcaaatgtcggcgtggagataatggaaaagttcaacaccatctccgttagcaaatgcaataaggagaccgtcgccatgaaggaaaagtgtaaattcggcatgacaagcacgattccaagtgggcatgtgtggaggaatacgtggaacccagtttcttgctcattagccacagttaaaatgaaggagtgtctccggggcaaacttatctatcttatgggcgactccaccattaggcagtggatggagtacttcaaagccagcattaatacactaaaatccgttgatctgcacgagagcgggaaactgcagcaccaactggccgtggatctcgaccggaacattaatatacagtggcagaagtattgttaccctctaatcgggtctatgacctactcagttaaggaaatggagtacctgactagagctatagacagaaccgggggcgaaaagaacacagttattgtgattagccttggtcaacattttcggcctttccctattgatgttttcatccggagggctctcaatgtgcacaaggcgattcagcatctgctcctgcgtagccccgacaccatggtcattataaaaaccgaaaatattcgtgagatgtataatgacgccgagcgcttctctgacttccatgggtacattcagtacctgatcattaaggatatatttcaggacctgtccgttagcatcattgacgcttgggacataactattgcgtatggaacgaataacgtgcacccaccccagcatgtggtgggtaaccagattaacattctcctcaactacatctgttag

SEQ ID NO: 9160 - DNA, 1845 bp, synthetic construct
  misc_feature 1..1845: note = source = /note="Description of Artificial Sequence: Synthetic coding sequence"
  source 1..1845: mol_type = other DNA
atgtggatggcctggtgcgtggccgccctgagcgtggtggccgtgtgtggcacctctcatgaaaccaataccgtgttgcgagtcaccaaagacgtgctctccaatgccatcagtggtatgttacagcagtctgatgcgctgcattcagccctgagagaagtcccgcttggggtgggcgacataccctacaacgacttccatgttcgaggcccccccccagtctacactaacggaaaaaagctcgacgggatctaccagtatggccacatagagaccaacgataacactgctcagctcggcggaaaatatcgttacggtgagatcttggagagcgaggggtcaatcagggacctacggaacagcggataccggtcagccgagaatgcctacggtggtcacaggggactcggccgctacagggctgcgcccgttgggaggttacaccgacgggaactgcagccaggagaaatccctccaggcgtcgcgaccggagccgtgggtcccgggggcttgctcggcaccggtgggatgctggccgcggatggcattcttgctggtcagggaggtctgttagggggaggcggcctcctcggcgacgggggactcctggggggtgggggtgttctcggggttttaggtgaaggtggtatattgtctaccgtccaggggattaccggactgaggattgtcgaactcacacttcctcgcgtgtcagtccgcctgctccccggggttggggtgtacctcagtctctatactcgcgtcgccattaacggcaaatcgctgattggctttttagacattgctgtagaggttaacattactgccaaggtgagattgaccatggaccgaaccggttacccacgattagtgatcgaacgctgtgatacgttgcttgggggcataaaggttaagctgctgagggggctgttgccaaacctagtggataatcttgtgaaccgggtcctcgcagacgtcctgccagatctcctttgccctatcgtcgatgtggtcctggggctcgtgaacgatcagctgggcctggtcgatagccttattccgcttggaattctggggtcggtccagtacactttttcaagcctacctctggtgactggcgaatttttggagttggatctgaatactttggtgggcgaagccggggggggcctgattgattacccactgggctggcccgccgtctccccaaaacctatgcctgagctcccaccgatgggcgacaacaccaagagtcagttagccatgagcgccaatttcctaggatcggtactcactctgctccagaaacagcatgccctggacctagacatcactaatggcatgtttgaagagcttccacctctgaccactgcgacattgggagcgcttatcccaaaggtctttcagcagtacccagaatcgtgcccacttattatacggattcaggttctgaacccaccatctgtcatgctccaaaaagacaaagccctcgtcaaggtactagctaccgccgaggtcatggtctcacaacctaaagatctcgaaaccacgatttgcctcattgatgttgacaccgaattcctggcctcatttagtacagagggtgataagctgatgattgacgcgaagttggagaaaacatcactgaatctgcgaaccagcaatgtcggtaattttgacatcggcttaatggaggttctcgtagagaagattttcgacctcgccttcatgccagccatgaacgccgtgctggggtcaggagtacctctgccgaagattctcaacattgatttcagcaacgccgacatcgatgtcctggaagatttgttggtgctgtccgcctag

SEQ ID NO: 9161 - DNA, 1431 bp, synthetic construct
  misc_feature 1..1431: note = source = /note="Description of Artificial Sequence: Synthetic coding sequence"
  source 1..1431: mol_type = other DNA
atgcagcccgtgatgctggccctgtggagcctgctgctgctgtggggactcgcgactccctgccaagaactgttggagaccgtcggcacgctcgccaggatcgacaaggacgagctggggaaggcgatccagaacagtctggtcggcgagcccatcctccagaatgtgctaggatccgtcacggccgtcaatcggggtctgctgggaagtgggggcctgctggggggaggcggtttacttgggcatgggggggtcttcggagtggtggaggaactctcgggccttaagatcgaggagctcactctacctaaagtgctcctaaaactactcccaggttttggtgtccaactgtcattgcacacaaaggtcggcatgcattgttctggtccattgggcggactccttcaactggccgccgaagtaaacgtgactagccgagtggccctcgcggtgtcatcacggggcactcccatcttgatcctgaagcgttgcagtactctgctgggccacataagtctgttctccggattactgccaacacccttgttcggcgttgttgaacagatgttatttaaggtgctgccaggtctgctgtgtcccgtcgtggatagcgttctgggggtcgttaatgaattgctcggtgccgtgctgggactcgtgtcattgggagcactcgggtctgtcgagttttcattagctacactcccgttaataagcaaccagtacattgaattggacatcaatcccattgtgaaatcagtcgctggtgacatcatcgacttccccaaaagtagggccccagccaaggtcccccctaaaaaggatcataccagccaggtgatggtgccactctatctgttcaataccacgtttggactgttgcagaccaatggggccctggatatggacattactcctgagttggtgccatctgacgtgccacttaccaccaccgacctagcggcactgctgcccgaggccctcggaaagctccccttgcaccagcaactcctgcttttcttgcgtgtcagagaagccccaacggtgacactgcacaacaaaaaggccctggtgtcactgccagccaatattcatgtcttgttttacgtgccaaagggtactcctgaaagtctgtttgagcttaatagtgtgatgactgtgagggcccagctggcaccttctgccacaaagctgcatataagcttatcccttgaacggctctctgttaaagtggctagctcattcacccatgccttcgatggatccagacttgaagaatggttgtcccatgtcgtcggggccgtgtacgcaccaaagctgaatgtggctttagacgtgggtattccgctccctaaagttctcaacatcaacttctcaaattccgtactggagatcgtcgagaatgcggtcgtgttaacggtagcttcttag

SEQ ID NO: 9162 - DNA, 585 bp, synthetic construct
  misc_feature 1..585: note = source = /note="Description of Artificial Sequence: Synthetic coding sequence"
  source 1..585: mol_type = other DNA
atgcaggacgcccccctgagctgcctgagccccaccaagtggagcagtgtgagttctgcagacagcaccgagaagagcgcaagtggggccggtacccgaaatttacctttccaattctgtttgcgccaggcgctgagaatgaaggctgctggcattctgactctgattgggtgcctggtcactggtgcagaaagtaaaatctatacccggtgcaaactggccaagatcttcagtcgggctggcctggataattattggggatttagccttggaaattggatatgtatggcatactacgagagcggttataacaccaccgctcagaccgtgctggacgatggaagcatcgattacggcatcttccagattaattcatttgcatggtgtcggaggggtaagctcaaagagaacaaccactgtcacgtggcctgctccgcattaatcaccgacgacttgaccgatgccataatatgtgctcgcaaaatagtgaaagagactcaggggatgaattattggcagggctggaagaagcattgtgaaggacgcgacttaagcgaatggaagaagggttgtgaggtatcatag

SEQ ID NO: 9163 - DNA, 1266 bp, synthetic construct
  misc_feature 1..1266: note = source = /note="Description of Artificial Sequence: Synthetic coding sequence"
  source 1..1266: mol_type = other DNA
atgggcttcctgagccccatctacgtgatcttcttcttcttcggcgtaaaggtgcactgtcagtacgagacatatcagtgggacgaggattacgaccaggaacctgatgacgactaccaaacgggttttccttttagacagaacgttgactatggtgtacccttccatcagtatacgcttggctgtgtttccgaatgcttttgcccaaccaatttccccagtagtatgtattgcgacaatcggaaacttaagactatcccaaatataccaatgcacatccagcaattgtatctgcaattcaatgaaatcgaagctgtcacggcgaattccttcataaacgctacccatttaaaagagatcaatctgtctcataataagattaagtcacaaaagattgactacggcgtgttcgcaaagctcccgaacctcctccaattgcacctcgaacacaacaacctggaggaattcccctttccactgccgaaaagcttggagcgtttgctgctgggatacaatgaaattagtaagctgcagactaacgcaatggatgggttggtgaacctcactatgctcgacttatgttataactacttacacgacagtctgttgaaggacaagattttcgcgaaaatggagaaacttatgcagctcaacctgtgcagcaaccgcctagagtcaatgcctccaggccttccgagcagcctcatgtacttgtctctggagaataacagtatcagcagcataccagaaaagtacttcgataaactccccaagctgcataccctgcggatgtcacacaacaagttacaggacattccatataacatattcaatctcccaaacatcgttgagctgtctgttggtcataacaaactcaaacaggcattctacataccacgcaatctcgaacatctgtatctccagaataacgagatagaaaagatgaatttgactgtgatgtgcccgtccattgacccgctgcactaccaccacctgacgtacatacgggtagatcagaataaactgaaagagcccatttccagctacatttttttctgttttccacacattcacactatatactatggggaacaaagatccacaaacggccagacgattcagctgaaaacccaagtattcaggcgctttcccgatgatgacgatgagtcagaggatcacgatgatcctgataatgcacacgagtcgcccgagcaagagggtgcagagggtcactttgatcttcattactacgaaaaccaagagtag

SEQ ID NO: 9164 - DNA, 252 bp, synthetic construct
  misc_feature 1..252: note = source = /note="Description of Artificial Sequence: Synthetic coding sequence"
  source 1..252: mol_type = other DNA
atgctgtgctgctgccccctggccgacgccctgctgatcttcctggagaccggctcatgttttcagccgggccagcagagcgagactctttcacagaaacagaataaaaccaataataagaagtgggctggcggggccggatgtcgtccatttcgactttggtgggtgggccgctcccgcggcgctggagtgcagttgtatagcacgaagaagggatggatcctgcggggcaaggggggaacagaggcttag

SEQ ID NO: 9165 - DNA, 2559 bp, synthetic construct
  misc_feature 1..2559: note = source = /note="Description of Artificial Sequence: Synthetic coding sequence"
  source 1..2559: mol_type = other DNA
atgctgcccaccgaggtgccccagagccaccccggccccagcgccctgctcctgctgcagctcctgctgccccccacaagcgccttctttccaaatatttggtccctcctcgccgcacctggcagcatcacgcaccaggacctgaccgaggaggctgccttgaatgtaacacttcagctgttcctggagcagccccctccggggcgaccacctctgaggctcgaggatttcctgggccgcacacttttggcggatgacttatttgccgcgtatttcggccctggaagctcgagacgcttccgcgcagcactgggtgaggttagccgagccaatgccgcccaagacttcctgccaaccagccgcaatgaccccgacttgcattttgacgccgaacgtttgggccaggggcgcgcacgcctcgtgggggccttgcgggagacggtggtggccgcacgcgctctggatcacaccctcgcacgacagaggcttggagctgccttgcacgccctccaggatttttactcgcattccaattgggtggagctgggggaacagcagcctcacccccatcttctttggccgcgccaggaactgcagaacctggcccaagtcgcagaccctacctgctccgattgcgaggaactctcttgccctaggaactggctgggcttcactttacttacctccggctactttggcacccacccacctaagccaccgggcaaatgctcacacggcggacattttgaccggtcaagttcacagcccccgagagggggaattaacaaggactccacctcccccggctttagcccacatcatatgcttcatctgcaggccgcaaaactggcccttctagcttctattcaagcattcagtctgcttcgctcacggctgggggacagggacttctcccgcttgctagacattacgccagcctcatccctgtcctttgtgctggacaccacaggcagcatgggcgaagagattaatgccgcaaaaatccaggcccggcatctagttgaacagaggagggggtctcctatggaaccagtacattatgtgctggtgccttttcacgaccccggattcgggcctgtctttactacttccgacccagactcattctggcagcagcttaacgagatacatgcccttggcggaggggacgagcctgagatgtgtctctctgctttacaactggcccttctgcacacacctcccttatctgacattttcgtcttcaccgacgcaagcccgaaggacgccttcctaactaatcaggtggaatctttgacacaggagcggaggtgtcgggtcaccttccttgtcacggaggatacatcacgcgttcaagggagggcgcgacgcgagattctctcgcccctcagatttgagccttataaagctgttgctctggcctcaggaggagaggtgatttttactaaagatcaacacattcgtgacgtggccgcgatcgttggggagtctatggctgctctggttacactccccctcgatcctcctgttgtggtaccaggccagccgctagtattcagcgtggatggattgctccagaagataacagtcaggatacatggcgacattagttcgttttggatcaagaatcccgccggggtatcacaggggcaggaagagggtggaggaccactcggccacaccaggcgatttggccagttctggatggtgactatggatgaccccccacagacaggcacttgggaaattcaagttacggctgaggatactccaggggttagggtccaagcacagacttccctggactttctctttcacttcgggattcctatggaagatggcccccatcccggcctatatccactcacgcagcctgtagcaggtctgcagacacagctcttggttgaagtcactgggttgggatctagggcgaaccctggcgatccccagcctcacttttctcacgtgatcttacgtggagtaccagagggcgcggagcttgggcaggtgccactggaacccgtcggaccaccagaaaggggcctgctggcggcaagcctgagccctacactgctgagcacaccccgtcctttttctctagagcttatcggacaggatgcagcaggccgacgcctgcatagggcagcgcctcagccatctactgtcgtgccggtattgctggagctgtcaggcccctctggtttcctagcccccggctccaaggtgccactgagcctgagaatcgcgtctttttccggtccgcaggacctggatcttcgtacgttcgtgaatccctcattctcgctgaccagtaacctgagcagggcccatttagaattaaatgagagcgcatggggccggctgtggctggaggtgccagatagtgccgccccagatagcgtggtaatggtcacggtgacagcgggaggccgggaagccaaccccgttccccccacacacgcgttccttagactgctggttagcgccccagctccacaggtaaggaaccactactttcctagccaaggccccgcacaccacccatatcggctgatctag

SEQ ID NO: 9166 - DNA, 2676 bp, synthetic construct
  misc_feature 1..2676: note = source = /note="Description of Artificial Sequence: Synthetic coding sequence"
  source 1..2676: mol_type = other DNA
atgctgcccaccgaggtgccccagagccaccccggccccagcgcccttctactgctgcagcttctgctaccacctacatctgctttctttcccaacatttggagtctactagccgctcctggaagcatcacccatcaagacttaaccgaggaggccgccctcaacgtcaccctccagctctttttagagcagccaccacctggccgacctcccctacgtctggaagacttcctcgggagaacactgctggccgatgacttgtttgctgcatactttggtccaggtagctctcggcggttccgagcagccctaggcgaagtgtcacgagcgaatgccgcccaagatttcctccctaccagcagaaacgatccggacctgcacttcgacgccgagcggttaggccaggggcgggctcgcctagttggagccctccgcgagacggtggtcgccgcccgggctttggaccacacgcttgccagacaaagattgggcgccgccctgcacgccctccaggacttctacagccacagtaattgggtcgagctgggcgagcagcagcctcacccgcatctcctctggcccagacaggaattgcagaacttggctcaggtcgccgacccgacatgctccgattgcgaagaactgtcatgtccgagaaattggctggggttcaccctgctgacatctggctacttcggtacgcaccctccaaaaccacctggcaaatgttcccatggagggcactttgatcgctctagctcccagcctccccgcggtggaatcaacaaagactctactagccctggattctccccccaccatatgttacacctgcaggccgccaagctggcccttctggcaagcatccaggccttttccctactgcgctcccgcctgggcgacagagacttctcacggttgctggatattacaccagccagtagcttaagtttcgttctggacacaaccggctctatgggagaggagatcaatgctgcaaagatacaggctcggcatcttgtagagcagcgccgaggcagtcctatggagcccgtccactacgtactggttccgtttcatgatccaggattcggccccgtttttaccacctccgatcccgattcattctggcagcagctgaacgaaatccatgctcttggcgggggtgacgagcctgagatgtgcttgtctgctctccagctggccttgctacatactccgcccttgtccgatatcttcgttttcacggacgcttctcccaaagatgccttcctgacgaaccaagtggagtcacttactcaggagcgaagatgcagagtaacgttcttagtgaccgaagacacctctcgggttcagggtcgggctagaagagagattctgtcacctcttagatttgaaccctataaagcggtggccctggcgtccggtggagaagttatctttaccaaagaccagcatattcgggacgtggccgctattgttggagagagcatggcagctctagtaaccctgcctttagacccgccagtggtcgtgcctggccaacccctggtttttagcgttgatggcctcctgcagaagataacagtgaggatccacggggatatctcctccttttggattaagaatccagccggagtgtcccaggggcaggaagaggggggaggaccactcggacacacacggcggttcggacagttctggatggtgacaatggatgatccaccccaaacaggcacctgggagatacaggtcaccgccgaagacacccccggggtgcgcgtacaagcccagacatcactggactttctgttccacttcgggattcctatggaggacggtccacaccccgggctgtaccctctcacacaacccgttgctggtttgcagactcagctgttagtagaagttactggtctgggaagcagggctaatcctggagatcctcagcctcacttctctcacgtgatcttacgcggtgtccccgaaggcgctgagcttggacaagtgcctctggagcccgtgggccctcctgagaggggactgctcgccgctagtctgtctccaaccctcctctcgaccccaagacccttttccttggagctgataggccaagacgcagcgggccggaggttgcatagagcagccccacagccatcaacagtcgtccctgtcctgctcgaacttagtggcccctcgggctttctggcacccggtagcaaggtccccctttctctgcgaatcgcttcattttccggacctcaggatctggatctccgaacctttgtcaatccgtccttcagtcttacaagcaacctgagtagggcccaccttgaactgaatgagtcagcctggggccgcctttggctggaggtccctgactccgccgctcccgatagtgtggtgatggtaacagtgacggccggaggcagggaagccaatcccgtccctcccacacacgcatttctgagattgctagtgagtgcccctgctcctcaggatcgtcatacgactcccactggaagttccgaccctatacttacaactgctacacccgccttttccccctttactttggtgacacaggggcgagcgggggctggattagccgctgggagcccgtggtgggggacagtgggcggcgtgctcctgctgttaggtttggctagctggtag

SEQ ID NO: 9167 - DNA, 552 bp, synthetic construct
  misc_feature 1..552: note = source = /note="Description of Artificial Sequence: Synthetic coding sequence"
  source 1..552: mol_type = other DNA
atggtgcggatctggaccaccatcatgatcgtgctgatcctgctgttgcgcatcgggcctaataaaccttccttgtctggccggcaggcacccgcccaggcccaaacgtcagatctggtcccctccctgttcccattaggattgtgggcaccggggttttgtacatggagttccccagatgaggataaacgcccaagaaagcccgtaccaggcaccggcaatcgagactccgggactcggagaagactgcaggatgccactgagcaggacccacggccagggaatgatgtcgccagcgctgaaaccgccggacccccttctccttcaggaataagggctcaggaccgggcccctaggcaccgtagggccccgccagcccgcatgcccgtagccccagcaccctcagcagacggagagcccctgcaggagcaggggggcgggctattccaccggacaagatcagtgtacaacggcctcgagctgaacacatggatgaaggtcgaacgactgtttgttgaaaagttccaccagagttttagtttagataactag

SEQ ID NO: 9168 - DNA, 444 bp, synthetic construct
  misc_feature 1..444: note = source = /note="Description of Artificial Sequence: Synthetic coding sequence"
  source 1..444: mol_type = other DNA
atggccggccccgccggcagccagagcctgggccccctgtgcttccacagctctccgcaagcgttgtatacagtcctcttgattgtccttgtcatgatgtctcttgtcttcggaaagttcgtacctgtgaactgggagcctccgcagcccctcccattccccaagtacttacgatgctacaggtgtctcctcgaaacgaaggagttgggatgcctgctgggctcagacatttgcctgacccccgccggatcctcgtgcattacactgcacaagaaaaattctagcggatccgacgtgatggtcagcgactgccgttcaaaggaacagatgagtgattgctctaatacaagaactagtcctgtgtcaggtttctggatattctcacagtattgcttcctggacttttgcaatgatccacagaatagagggttgtacaccccatag

SEQ ID NO: 9169 - DNA, 447 bp, synthetic construct
  misc_feature 1..447: note = source = /note="Description of Artificial Sequence: Synthetic coding sequence"
  source 1..447: mol_type = other DNA
atgcagaccttccccgtggccggcgccctggaccccgccatcctggatacttcctctcctcaagctctgtatactgtcctgctgattgtactggtgatgatgtccctggtgttcggaaaattcgtgccagtgaattgggaaccgccccagccactgccattcccaaagtatctacgttgctaccgctgtctcctcgaaaccaaagagctgggctgccttctgggtagcgacatttgcttgaccccagccggctcaagttgtataactctgcataaaaagaacagctctgggagcgatgtgatggtgtccgattgtcggtcgaaggagcagatgtctgactgtagtaacacacggacctcaccagtaagcggattctggatcttctcacagtactgcttcctggatttttgcaacgacccacagaacaggggactgtatacgccctag

SEQ ID NO: 9170 - DNA, 606 bp, synthetic construct
  misc_feature 1..606: note = source = /note="Description of Artificial Sequence: Synthetic coding sequence"
  source 1..606: mol_type = other DNA
atgaaggtgcacatgctggtgggcgtgctggtgatggtgggcttcacagtaggcaaagtgcccgttccagacattagaacctgccacttctgtcttgtagaggacccctcagtcggctgtatttctgggtctgagaaatgcaccatcagtagctcttccctgtgcatggtgattacaatttattacgacgtgaaagttcgctttatcgtgcgcggctgtgggcaatatatctcctaccgatgtcaggaaaaacgcaacacctactttgcagaatactggtatcaggcccagtgttgccagtacgactactgcaacagctggtcctctccacagctgcagagttctcttcccgaacctcacgataggccgttggcactgcctctgagcgattcccagattcagtggttctaccaggctctgaacctcagcctcccactacccaacttccacgccggaacggaacctgatgggttggatccaatggtgactttatccctgaatttgggcctgtcgtttgcagaattacggaggatgtacttgtttctaaactcaagcggactgttagtcttaccccaggctggtctgctcaccccccacccaagctag

SEQ ID NO: 9171 - DNA, 345 bp, synthetic construct
  misc_feature 1..345: note = source = /note="Description of Artificial Sequence: Synthetic coding sequence"
  source 1..345: mol_type = other DNA
atgctgggcggcgaggaggcccggcccaacagctggccctggcaggtatctttacagtatagctcaaatgggcagtggtatcatacttgtggggggagcctcattgctaattcttgggtgctgactgcagcacattgcattcgccagatcattaaagcccacaaggtattgcagaggtgctcattgatcctctttttcgtaagagatctgtgctcaagccagctggagcttaccggcgtctctgcgggtagttcgggaatttatagagtgatgcttgggcagcataacctatatgtggccgagtccgggtctctggccgtctctgtgtccaagatcgtggtttag

SEQ ID NO: 9172 - DNA, 810 bp, synthetic construct
  misc_feature 1..810: note = source = /note="Description of Artificial Sequence: Synthetic coding sequence"
  source 1..810: mol_type = other DNA
atgatccggaccctgctgctgagcaccctggtggccggcgccctgagctgtggggtcagcacttacgctccagatatgagccgcatgttgggcggagaggaggctcggcccaacagctggccctggcaggtcagcctgcagtactcctctaacgggcagtggtatcacacctgtggtgggagcctcattgcgaacagttgggttctgaccgcagcgcactgtatcagttcaagcggcatctaccgcgtgatgctgggacagcacaacctctatgttgccgaatcaggtagcttggctgtcagcgtctccaagatcgttgtacataaagattggaattctgatcaagtgtctaaaggcaatgatatagctctgcttaagctcgccaatcccgtcagcctcaccgacaaaattcaactggcctgcttacccccagcaggtaccattctgcccaacaactacccatgctatgtaacggggtggggtcgcttgcagaccaacggcgctttgccagatgatctcaagcagggccagttacttgttgttgactatgccacttgctcatctagcggatggtgggggagcactgtcaagaccaatatgatttgtgctggtggcgatggggtcatctgtacctgcaacggggactccggcggccctctcaattgccaggcctccgacggaaggtgggaagttcacggaattggctctcttacaagtgttttggggtgcaattactattacaagccctccattttcaccagggtgtcaaattacaacgattggatcaacagtgtgattgctaacaactag

SEQ ID NO: 9173 - DNA, 567 bp, synthetic construct
  misc_feature 1..567: note = source = /note="Description of Artificial Sequence: Synthetic coding sequence"
  source 1..567: mol_type = other DNA
atgttccaccagatctgggccgccctgctgtacttctacggcatcatactgaactcgatttatcaatgtcctgaacatagtcaactgacgacactgggggtggacgggaaggaattccctgaggtccatctgggtcaatggtacttcatcgctggggccgctcccactaaagaggagctcgcaacctttgacccggtagataatatcgtgtttaacatggcggctggcagcgctccaatgcagttacacctcagagctaccatccggatgaaggatggactgtgtgtaccacgaaaatggatataccatctgacagagggctcgacagatctacggaccgagggccgccccgacatgaaaaccgaactgttctcgtcctcctgccctgggggcataatgcttaatgaaacaggtcagggctatcagcgctttctcctgtacaacagaagcccacacccccctgaaaagtgtgtggaagagttcaagtctctgacctcctgcctggacagcaaggcatttctcctgaccccgaggaatcaggaggcctgcgagctaagcaacaattag

SEQ ID NO: 9174 - DNA, 390 bp, synthetic construct
  misc_feature 1..390: note = source = /note="Description of Artificial Sequence: Synthetic coding sequence"
  source 1..390: mol_type = other DNA
atggccgccggcagcgcccccatgcagctgcacctgcgggccaccataaggatgaaagacggattatgtgtcccacgtaagtggatatatcacctgactgagggatctactgatttacggacggaaggacgacccgatatgaaaaccgaacttttctcgtctagctgtccaggggggatcatgctgaatgagactggtcaggggtaccagaggtttttactgtacaacagaagtccacaccctccagagaagtgtgttgaggaatttaaaagtttgacgagctgtttagattccaaagccttccttctgacgccaaggaaccagggtaaagggctgaagtcacacaagacagggctgggactgacaaagagtagcggagtgaccggctag

SEQ ID NO: 9175 - DNA, 351 bp, synthetic construct
  misc_feature 1..351: note = source = /note="Description of Artificial Sequence: Synthetic coding sequence"
  source 1..351: mol_type = other DNA
atggccgccggcagcgcccccatgcagctgcacctgcgggccaccattagaatgaaggatggactctgtgtgccgcggaaatggatttatcatttgacagaaggatccacggacctccggaccgagggtagacctgatatgaaaactgaattatttagctcctcttgtcctggaggcattatgttaaatgaaacaggacaaggctatcagaggtttctcctgtataacaggtcccctcatcctccggagaagtgcgtggaagaatttaagagtttgacatcctgtctggattccaaagcatttttgctaaccccccggaaccaagaagcctgtgaattgtctaataattag

SEQ ID NO: 9176 - DNA, 435 bp, synthetic construct
  misc_feature 1..435: note = source = /note="Description of Artificial Sequence: Synthetic coding sequence"
  source 1..435: mol_type = other DNA
atgatccggaccctgctgctgagcaccctggtggccggcgccctgtcctgcggagacccaacttatcccccatacgtgactagggttgttgggggcgaggaggcgcgaccaaattcttggccatggcaggtatcactgcaatattcaagcaatggcaagtggtaccacacctgcgggggaagccttatcgctaattcatgggtgctgacggcagctcactgcatctcccagagcatggttcagtgcgcacataaggttcttcagagatgcagcctgattctgtttttcgtgagggatctgtgcagcagccagttggaactgactggcgtctccgccggttcctcccggacctacagggtaggactagggcggcataacctgtatgttgctgaatcagggtcacttgctgtgtccgtttccaagatagtggtttag

SEQ ID NO: 9177 - DNA, 204 bp, synthetic construct
  misc_feature 1..204: note = source = /note="Description of Artificial Sequence: Synthetic coding sequence"
  source 1..204: mol_type = other DNA
atgaagctgctgctgctgaccctgaccgtgctgctgctgctgagccaactgactcccggaggcacacagaggtgctggaacctttacgggaaatgccgctacaggtgttcaaaaaaggagagggtgtacgtttactgtatcaacaataaaatgtgctgcgttaagcctaagtaccagcccaaagaacgctggtggcctttctag

SEQ ID NO: 9178 - DNA, 231 bp, synthetic construct
  misc_feature 1..231: note = source = /note="Description of Artificial Sequence: Synthetic coding sequence"
  source 1..231: mol_type = other DNA
atgaagctgctgctgctgctgctgaccgtgaccctgctgctggcccaggttacccccgttatgaagtgctggggaaagtctggccgctgccgcaccacttgcaaggagtcagaagtgtactacattctttgcaagacagaggcaaaatgttgcgttgatccaaaatacgtccctgttaagcccaagttgaccgacactaatacaagtctcgagagtacttcagccgtgtag

SEQ ID NO: 9179 - DNA, 267 bp, synthetic construct
  misc_feature 1..267: note = source = /note="Description of Artificial Sequence: Synthetic coding sequence"
  source 1..267: mol_type = other DNA
atgaagctgctgtacctgttcctggccatcctgctggccatcgaggaaccagtgatatccgtcgagtgctggatggacggccactgcagattgttgtgcaaggacggcgaggacagcatcatccgctgtcgcaacaggaagcgatgctgcgtcccatctagatacctgactattcagcccgtgacaattcacgggatcctgggatggacaactccccagatgagtaccactgcccctaagatgaagaccaacatcaccaatcggtag

SEQ ID NO: 9180 - DNA, 255 bp, synthetic construct
  misc_feature 1..255: note = source = /note="Description of Artificial Sequence: Synthetic coding sequence"
  source 1..255: mol_type = other DNA
atgaagctgctgtacctgttcctggccatcctgctggccatcgaggaacccgtaatatccggaaagaggcacattctgaggtgcatgggaaactccggcatatgtagggccagctgcaagaaaaatgagcagccatacctttactgcaggaactgccagtcctgctgcttgcagagttatatgcgcatttccataagtggaaaagaagagaataccgactggtcgtatgaaaagcaatggccacgccttccgtag

SEQ ID NO: 9181 - DNA, 2631 bp, synthetic construct
  misc_feature 1..2631: note = source = /note="Description of Artificial Sequence: Synthetic coding sequence"
  source 1..2631: mol_type = other DNA
atgggccccgaggccctgagcagcctgctgctgctgctgctggtggcttccggtgacgcggacatgaaaggacactttgatccggcaaagtgtcggtacgcactgggtatgcaggatcgtaccatccccgactcggatatatccgcctccagcagctggtccgacagtaccgccgcccgccatagtcgactggaatcaagcgatggggacggcgcttggtgcccagctggatccgtctttcccaaggaagaagagtatctgcaggttgatctccagcgtctacaccttgtcgccctcgtgggaacacagggccgtcacgctggaggcctgggcaaagaattcagtcgctcttaccgcctccggtattcccgagacggccgcagatggatgggatggaaagataggtggggacaggaggtaatctccgggaacgaagatcctgaaggtgtcgtactgaaagacctgggtcccccgatggtggcccgcttagtgaggttttatccgcgcgcggacagggtcatgtctgtgtgtctacgggtggaattgtacggatgtctttggagggacggcctgttgagttacaccgcacctgtcggccaaacaatgtacctgtcagaggcagtgtacctcaatgatagtacctacgacgggcatactgtaggtggcctccagtatggtggattaggccagctggcagatggcgtcgtaggtctggacgatttccgcaagtcacaagaactgagggtgtggccaggttacgattatgtgggctggtccaaccattcatttagcagcggttacgtggaaatggagtttgagttcgacagactcagagccttccaggctatgcaagtgcattgcaacaacatgcacaccctcggggctaggctgccagggggggtggagtgtcggtttcgtcgaggaccagctatggcatgggagggagaaccgatgagacataacctcggtggtaatctaggtgacccaagggccagggctgtttcggtgccgcttggtggcagggttgccaggtttttgcaatgtaggttcctgttcgccggaccttggctgctgttcagcgagatcagctttatcagcgatgttgtcaataacagtagtcctgccctgggaggcaccttcccacccgctccttggtggccaccggggcccccgcccacaaacttcagtagtttagaactggagcctcgcggacaacaaccggtggccaaagcggaagggtccccgacggccattctgattggatgtttggttgccattattctgcttttattgctcatcatcgccttaatgttgtggaggctccattggagacggttgctgagcaaagccgaaagaagggtcctcgaggaagaactgaccgtccacctcagcgttcccggggataccatcttaattaacaatcgcccggggccaagggagcctcctccataccaggagcctcgcccaaggggcaatccaccccattccgccccatgcgtgcccaacggtagtgcttactctggagactatatggaacctgagaaaccaggagccccccttctgccaccacccccccaaaacagcgtgcctcattacgccgaagcggatatagtgaccttacagggagtcaccggcggcaatacatacgccgttccagccttgcctccaggagctgtgggagacgggccaccaagagtcgacttccccagatccagactgcgtttcaaagaaaaactcggcgaaggccagtttggcgaggtgcatctctgtgaagttgacagcccacaagatctggtcagcctagactttccactgaatgtccgcaaagggcatcctctcctggtagccgtgaaaattcttcgccccgatgccaccaaaaacgccagaaacgattttctcaaggaggtcaaaattatgagccggctgaaggaccccaatatcatccggctacttggggtttgcgttcaggatgatccactttgcatgattacagactatatggaaaatggtgacctgaaccaattcctcagcgcccatcaactggaagacaaagccgcagagggagctcccggggatggacaggcagctcagggccccacaattagttaccccatgctgctgcacgtggcagcgcaaatcgcatccggaatgcgatatctggctacattaaactttgtccatcgggatctcgctacgaggaactgtcttgtcggagagaactttacaattaagatcgcagacttcggaatgtcccgaaatctctatgccggagactactaccgtgtccagggccgtgccgtgctccctatccgatggatggcttgggaatgcattttgatgggtaagttcaccacagcctcagacgtgtgggccttcggcgtaacgctgtgggaagttttaatgttatgtcgcgctcagccctttggccaactcactgacgaacaagtcattgaaaacgctggggagttctttcgggaccaaggcagacaggtgtatctgagccggcctcccgcctgcccccagggactttacgagcttatgcttaggtgctggagtcgagaatctgagcagcgacccccatttagtcaactgcacaggttcttggccgaggacgccctcaataccgtgtag

SEQ ID NO: 9182 - DNA, 2742 bp, synthetic construct
  misc_feature 1..2742: note = source = /note="Description of Artificial Sequence: Synthetic coding sequence"
  source 1..2742: mol_type = other DNA
atgggccccgaggccctgagcagcctgctgctgctgctgctggtggccagcggggatgctgatatgaaggggcacttcgacccggccaagtgccgttatgcgctcgggatgcaggacagaaccatccccgattctgacatttcggcgagttcctcctggtccgattccaccgcagcccgccactctaggctcgagagctctgacggcgacggagcttggtgtcccgccggctctgtgtttccaaaagaggaggaatatctgcaggtggatctccagcgcctgcacctcgtcgcccttgtgggaacgcagggacgacacgccggagggctcgggaaggagttctctaggtcctaccggctccgctacagcagggatgggcggagatggatgggatggaaagatcggtggggacaggaagtgatttccggaaacgaagacccggagggagtcgtattgaaagacctcggtcctcccatggtggccaggctggtcagattctatccccgggccgaccgcgtcatgagtgtgtgcctgagagtagaactctatgggtgtctctggagagatggtctgctttcttacactgctccagttggccagactatgtacctttcggaggccgtttacttaaacgacagcacctacgacgggcacacggtaggagggctccaatacggaggattagggcagcttgcagatggcgtggtggggctcgacgatttcagaaagtcccaagagcttcgcgtctggccgggatacgactacgtgggttggtccaatcacagcttctcatcaggatatgtggagatggaattcgaatttgatcggctcagggcctttcaagcaatgcaggtgcactgcaacaatatgcataccctgggggcaagactgcctggcggagtggagtgccggtttcggcggggacctgcgatggcttgggaaggggaacccatgagacataacttaggaggaaatctcggcgaccccagggcaagagcggtcagtgtgcctttaggaggacgcgtggctcggttcctccagtgtcgattcctctttgctgggccctggctcttattcagtgagatttctttcatctccgatgtggtaaataacagtagtcctgcccttgggggcactttcccgccagctccctggtggccccctggccctccccccaccaatttcagcagcctggagctagagcctcgggggcagcagcccgtcgctaaagcagagggatccccaacagctatccttatcggctgccttgtcgccatcatcctgctgttgcttctgatcatcgcccttatgctatggaggctgcactggaggagactattgtctaaggccgagcgaagggttctcgaagaggagctgacagtacacttgagcgtacccggggatacaattctcatcaacaatcgtccaggacccagggaaccccccccctatcaggagccgagaccgaggggaaaccctccccactccgctccttgtgtgccaaatggttccgccttattgctcagcaatccagcatataggctgctcctcgccacctacgccaggccgcctagggggcccggcccaccaacccctgcatgggccaagcctaccaatacgcaggcctatagtggggactacatggagccagagaagccaggcgcacccttgttgcctcctccccctcagaactcagtccctcactacgcagaggctgatatcgtcacgctgcagggggtaactggcggcaatacctacgccgtcccagcgctgcctcctggagccgttggagatggcccgccaagagtagattttcctcgcagccgactcaggtttaaggagaaacttggggagggacagttcggtgaggtgcacttatgtgaagtcgattcccctcaggatctcgtcagcctggacttccccttaaatgtccggaaaggtcacccactcctggtggctgtgaagatcctgagacctgatgctaccaagaatgctcgcaacgactttctgaaagaagtgaaaattatgtcacggctgaaagaccccaacattattagactgctcggagtgtgtgtgcaggacgatcccttgtgtatgattaccgactacatggagaacggagacctaaatcaatttctctccgctcaccagttggaggacaaggccgccgaaggtgcccccggtgatgggcaagccgcacaaggacccaccattagttacccaatgcttttacatgtggcggcccaaatagcaagcgggatgcgttatcttgctactctgaactttgtgcatcgcgatctcgcaactcgtaattgcctagtaggggagaacttcactatcaaaattgcagacttcggaatgtcaaggaatctctacgccggggattattaccgagtccaagggagggccgtcctccccatacgttggatggcctgggagtgtatcctgatggggaagttcactactgcttcggacgtttgggccttcggcgtgaccttgtgggaagtgctcatgttatgccgggcacaaccgttcgggcagctgacagacgaacaagtgatcgaaaacgctggtgaattttttcgcgatcagggcaggcaggtgtacctgagcagacctcctgcctgccctcaagggctctacgagttgatgctgaggtgttggtccagggaatccgagcagagacccccctttagccagttgcatcgctttcttgccgaagacgccctgaacactgtctag

SEQ ID NO: 9183 - DNA, 2631 bp, synthetic construct
  misc_feature 1..2631: note = source = /note="Description of Artificial Sequence: Synthetic coding sequence"
  source 1..2631: mol_type = other DNA
atgggccccgaggccctgagcagcctgctgctgctgctgctggtggcctcaggcgacgccgacatgaaaggccatttcgatccagctaagtgtaggtatgcgctaggtatgcaggacagaaccatccccgatagcgacatttctgcatcatccagctggtctgatagcaccgctgcacgacactcacggctcgagtcctctgacggtgacggtgcatggtgtccagccgggtctgtctttcccaaagaggaggaatatctgcaggtggacctgcagagacttcacctggtggccctggtgggaacacagggaagacatgccggcggtctggggaaagagttctcccggtcatatagactgcgctatagcagggatggtaggcggtggatgggctggaaggaccgttggggacaagaggtcatctcaggcaacgaagatccagagggcgtggtgcttaaggacttaggccctccaatggtggcccgcctagtcaggttttatccacgcgcggacagagtgatgtcagtttgcttgagagtggagttgtatggctgcctttggcgggacggcctcttgtcttacactgcccccgtagggcagaccatgtacttatcagaagcagtttacctcaatgatagcacctatgacgggcatacagtggggggccttcagtatggcggcctgggacagctggctgacggtgttgtgggccttgacgattttcgcaaatcacaggaactccgggtgtggcccggatatgactacgtgggctggtctaatcacagtttctcgagcggctacgtagaaatggagtttgaatttgaccgcttgcgtgcatttcaggcaatgcaggtgcattgcaacaatatgcacactctcggggccagactgcctggcggcgtcgaatgtcgtttcagaaggggacccgccatggcctgggaaggcgaacccatgcgccacaacctgggtgggaatctgggagaccctcgggctcgcgccgttagcgtgcccctgggcggaagagttgccagattcctgcagtgccgctttctctttgccggcccatggctgctgttcagtgaaatttctttcatatcagacgtggtcaataacagtagtcctgccttggggggaacttttcccccagccccgtggtggcccccgggcccaccccccacaaatttttccagtctcgagttggaacccaggggtcagcagccagtagcaaaggctgaagggtcaccaacggcaatcctgatcgggtgtcttgtcgctatcattctgctcttgttgttaatcatcgctctcatgttgtggcggttacactggcggcggctgctctctaaagcagagcgaagagtgctggaggaagagcttaccgtgcatttatccgttccaggcgacacaattctcatcaacaaccggcccgggccccgcgagccaccaccttaccaggagccgagacctcgagggaatcccccacacagcgcgccctgcgttccgaatgggtctgcctacagtggagattacatggagccagagaaacccggcgcacccctgctacctcctcctccgcaaaactccgtcccccactatgcagaagcagacatcgtgactttgcagggcgttacagggggcaacacttatgccgttccagccctgcccccgggggcggttggtgatggaccaccgcgcgtggactttccacgaagtcggctccgattcaaagagaaacttggtgagggccagttcggtgaggtgcacctttgtgaggtggacagcccccaagacctggtctctctggatttccctttgaatgttaggaaaggccatcccctattggtggccgtgaaaatcctccgtcccgacgcgacaaaaaacgccaggaacgattttctcaaggaggtcaagattatgtcaagactgaaagaccctaacattatccggctgctcggcgtttgcgtccaagacgatccactctgtatgataacagactatatggagaatggtgatctgaaccagttcctgtccgcacaccaactcgaggacaaagcagctgaaggcgctccaggggatgggcaggcagcccaagggcctacaatctcctatccaatgctgcttcatgttgcagcccagattgccagtggcatgagatacctggccacgctgaatttcgttcaccgcgacctagcaaccaggaattgtctggtgggagagaactttacgattaaaattgcggactttgggatgagtaggaacctctacgcaggggactattaccgggtacagggtagggcggtgttaccgataagatggatggcctgggagtgcatcctgatgggcaagttcacaactgcctctgacgtttgggcttttggagtcacgttatgggaggtcctcatgctgtgccgggcccagccatttggccagcttaccgatgagcaggttattgagaacgccggcgagtttttccgggatcaagggagacaggtatacctgtccaggcctccggcttgcccccaaggtctttatgaactgatgttgcgatgctggagcagggaaagtgaacagcggcccccgttctcccagctacatagatttctcgctgaggatgcgctaaacacagtgtag

SEQ ID NO: 9184 - DNA, 2631 bp, synthetic construct
  misc_feature 1..2631: note = source = /note="Description of Artificial Sequence: Synthetic coding sequence"
  source 1..2631: mol_type = other DNA
atgggccccgaggccctgagcagcctgctgctgctgctgctggtggcgtctggcgacgcagatatgaagggtcacttcgatcctgcgaaatgcagatacgccttaggaatgcaggaccgaaccattcctgattcagatatttccgcaagctccagttggtccgattccactgccgcacgccactctagattagagagttccgacggcgatggggcgtggtgccccgctggctccgtgtttcctaaagaagaggaatatcttcaagtcgatctgcagaggctgcatctggtggcgctggtcgggactcagggcagacacgcaggcggtttaggaaaagagtttagtcggagctaccggctgcggtactcccgcgacggccggcgatggatgggctggaaagatcgatggggacaggaagtgatctcaggcaacgaggaccctgagggcgtcgtgctcaaagacctcggcccccccatggttgcacgactagtccgtttctaccctagggctgatcgcgtcatgtctgtctgtttgcgcgtggaactgtacggatgcttatggcgtgacgggctcctaagctacaccgcacccgttggccaaaccatgtatctgtccgaggcggtctatctcaatgacagcacatatgacggccatacagtcgggggtctgcaatacggaggtctgggacagttggccgacggcgtggtgggcctggatgactttcgaaaatcccaggaactgcgagtgtggccaggttatgactatgtgggatggtccaatcattctttcagcagcggctatgtggagatggagtttgagttcgacagactgagggccttccaggccatgcaggttcactgtaataatatgcacaccttgggagcaaggctaccgggcggggtggaatgcaggttcagacgtggccccgcgatggcttgggagggagaaccgatgaggcacaatttgggcgggaatctgggtgacccacgggcccgggcggtgagcgtccccttgggggggcgcgtggccagatttctccaatgccgtttccttttcgctggcccgtggctacttttctccgagatatctttcatttcagatgtggtgaacaactcatcgccagccctgggaggaacttttccccctgcaccctggtggcctcctggccctcctcccactaatttttcttccctcgagttggaaccgagggggcagcaacctgtcgcaaaagcagaaggatcaccgaccgcaattctaataggctgtcttgtcgccatcatcctgttgttgctgctcatcattgctctgatgctctggaggctccactggaggagactactctccaaggctgaacgaagagtgcttgaagaagagctgaccgtgcatcttagcgtgccaggggacactatcctgattaataaccgacctggccctcgtgagccgccgccctaccaggaacctcgtccacgcggcaatccaccccacagcgcaccttgcgtgccaaacggaagcgcctactcaggggattacatggaacccgagaagcctggagcccccctgttaccccctcctccacagaatagtgtgccccattacgctgaggctgacatcgtgaccctgcaaggggtcacaggcggtaacacgtatgcagttccagcccttcccccaggcgctgtgggagacggcccacctcgcgtggatttccctcgtagccgcctgcgcttcaaagaaaagttaggcgaggggcagttcggggaagtgcacctgtgtgaggtagactctccgcaggacctcgtcagtctggattttcccctcaacgtaagaaagggtcaccctttgctagtggctgtgaagattttacgacccgacgctactaagaacgctaggaatgacttcttgaaggaagtgaaaattatgagtcggttgaaggaccccaatataataagattattgggagtgtgcgtccaggacgacccactgtgcatgatcactgattatatggaaaatggagacctcaaccagtttctgtctgcacaccaactagaggacaaagctgccgaaggcgcaccaggggatggacaagctgctcagggaccgacaatctcctatcccatgctgttacacgtggccgcccaaatcgccagtgggatgcgatatctggccaccctgaatttcgttcacagggatctggccacacggaactgtctcgtaggcgaaaatttcaccatcaagattgctgacttcggaatgagtcgcaacctgtatgccggagattattatcgcgtgcagggcagggcagttctccctatccgttggatggcttgggagtgcattttaatgggtaagtttacaactgcatcggacgtttgggcctttggcgttacactctgggaagtcctgatgctgtgtcgcgctcagcccttcggacagctcaccgatgaacaagtgattgaaaacgccggtgaattcttccgcgaccaggggaggcaggtttacttatccaggcctcctgcctgtccccagggactctatgagttgatgctgcgatgctggtcccgcgaatcggagcagaggcctccattctcccaattgcaccgctttcttgccgaggatgccctgaataccgtgtag

SEQ ID NO: 9185 - DNA, 2760 bp, synthetic construct
  misc_feature 1..2760: note = source = /note="Description of Artificial Sequence: Synthetic coding sequence"
  source 1..2760: mol_type = other DNA
atgggccccgaggccctgagcagcctgctgctgctgctgctggtggcctccggggacgcagatatgaaagggcactttgacccagctaaatgccgctacgctctggggatgcaggaccgcactatacctgacagcgacatctctgctagttcaagttggtccgactcaaccgctgcccgtcatagtcgcctggaatcctctgacggggatggcgcctggtgccccgcaggctcggtgtttcccaaggaggaagagtatttgcaggtcgacctccaacggctgcatctcgttgcgctcgtcggtacccaaggacggcatgcgggtggtctgggcaaagaattctcaaggtcctataggttacgttatagtcgtgatggtcggcggtggatggggtggaaggataggtggggccaagaagtcataagcgggaatgaggaccccgagggcgtggtcctgaaagacctggggccaccaatggttgcccgacttgtgcggttctacccaagagctgatcgggtgatgagcgtatgcctccgcgttgaactgtacggttgcttgtggagggacgggctgctgagctataccgccccagttgggcagaccatgtacctttcagaggcagtctatctcaacgattcaacatatgacggccacaccgtgggcggtcttcagtacggtgggttaggccagctggctgatggcgtcgtcgggctagatgattttcgaaaatcccaggaacttcgcgtgtggcccggctacgactatgtaggttggtcaaaccactccttctccagcggatatgtggagatggaatttgaatttgatcgcctgagggctttccaggcaatgcaggttcactgcaataatatgcatacattaggcgcccgtctgcccggtggagtggaatgcagattccgcagaggaccagccatggcgtgggagggcgagcccatgcgtcacaacctaggcgggaacctgggagatccacgggccagagccgtaagcgtccccctcggaggtagggtggcaaggtttctgcaatgtagattcctgtttgccggaccttggctgctgtttagcgaaattagttttatctctgacgtggtcaacaactccagccccgccttaggggggacctttcctccggccccctggtggccacccgggccaccccccacaaacttcagcagtctggagctggaacctaggggtcagcagccggtagcgaaggccgaggggtctccaaccgccatcctcataggctgcctggtcgccattattttattactgctattgatcatagctctgatgctctggagactccattggcggaggctgttgtctaaggctgaacgtcgggtgctcgaagaagaacttaccgtacacctgagcgtccctggggatactatcttgattaataatcgtcctggcccccgggagccacccccataccaggagccccgcccccgaggcaatccaccacatagcgcaccttgcgttcctaacggctccgctttactcctctccaatcctgcctatcggctcctgctggcgacttatgctagacctcctaggggtcctgggcctccgacgccagcgtgggctaaacctacaaacacgcaagcgtacagtggcgactatatggagcctgaaaaacccggggcacccctgctgccacctccaccacagaacagtgtaccccattatgccgaggctgatatagtcacccttcagggtgtgaccgggggcaatacctacgcagtgcccgccttgccaccaggggcagtaggtgatggacccccaagagttgatttccctagatcaaggctgcggttcaaagaaaagctgggggaggggcagtttggggaggtgcacctctgtgaggtcgattctcctcaagatctggtctctctagatttccctttaaacgttcggaaggggcacccgctgctggttgctgtgaaaattctccgacccgacgccactaaaaatgcctctttcagtctcttctccaggaacgactttcttaaggaagtgaaaatcatgtcaaggctgaaggaccccaacatcatccggttacttggggtctgcgttcaggatgatccactctgcatgatcactgactatatggaaaatggggacctcaaccagtttctgtctgcacatcagttggaagacaaggcggccgaaggggcgccgggggacggccaggctgcccagggccctaccatcagttatcccatgctcctacacgtggcagcacagattgcatccgggatgcgatatctcgccacccttaacttcgtgcaccgtgatttagccaccagaaattgtctggtgggggaaaatttcaccatcaagatcgctgattttggaatgtctaggaatctatatgctggagattattatcgcgtgcagggcagagccgtcctaccaatcaggtggatggcctgggaatgcatacttatgggcaagtttacaaccgcctctgatgtgtgggcgttcggggtcaccctgtgggaggtcctcatgctgtgtcgtgcccagccattcgggcagcttactgatgagcaagtaattgagaatgcgggggagttttttcgggaccagggtcggcaggtctatctgtcccgaccacccgcatgcccgcagggactgtatgagctgatgttacggtgttggagtcgggagagtgagcaacgtccacccttctctcagctgcacaggtttcttgcggaagatgcactcaatacagtgtag

SEQ ID NO: 9186 - DNA, 1041 bp, synthetic construct
  misc_feature 1..1041: note = source = /note="Description of Artificial Sequence: Synthetic coding sequence"
  source 1..1041: mol_type = other DNA
atgctgaagaagcccctgagcgccgtgacctggctgtgcatcttcattgtagccttcgtatctcacccggcctggctgcaaaagctgtcaaagcacaagactccagcgcagccgcaattgaaggccgccaactgctgcgaggaggttaaagagcttaaggctcaggtcgctaacctaagttctctcctatctgaattgaacaagaagcaggagcgcgactgggtctcagttgttatgcaagttatggagttagaaagtaactctaaacgtatggaaagcagattgaccgatgccgagagcaagtacagcgagatgaataaccagattgacattatgcaattgcaggccgcccagacagtcacacaaacctcagccgatgcaatttatgactgctcatcactctaccagaagaattatagaattagcggagtctacaagctgcccccggatgattttcttggatcccccgagctggaggttttctgcgacatggaaacctcgggtggcggctggacaataatccagcggcggaagagtggcctggtatccttctacagggattggaaacaatacaagcagggtttcgggagcatcagaggtgatttttggctcggaaacgagcatatccacaggctttctaggcaacctacaaggctgagagttgaaatggaagattgggagggaaaccttcgatacgccgaatattcccactttgtgttggggaacgaactaaactcttaccgccttttcctcggaaattacacaggtaatgtggggaacgacgccctacaatatcacaataacactgcgttctcgacaaaggataaagacaatgataactgtttagacaagtgtgcccagctgcgtaagggtggctattggtataattgctgcacagactctaacctaaacggagtatactaccgcctgggagagcacaacaagcatttggacggcatcacatggtacggatggcatgggagtacctattcactaaagcgggtagaaatgaaaatccgacctgaagacttcaagccttag

SEQ ID NO: 9187 - DNA, 1056 bp, synthetic construct
  misc_feature 1..1056: note = source = /note="Description of Artificial Sequence: Synthetic coding sequence"
  source 1..1056: mol_type = other DNA
atgaagggccgggccgtgagcttcgaccccctggcctgccagggccttaacgcatctccaggtagccttacgagccccctgaggagaattaggagtctgactggccgtgaagtgctcacccctttccccgggctgggcacggccgctgctcctgcacaaggcggcgcacacctgaagccccatagcctcgtgcttccaattacagcgctccctccacccccactggccttgcgtggaagacaggccacgtccaaactgccccctttcctgtcatcaccctttccccctagtctgtgtccctgggtacccgatccagggtttaaggagaccgcttttctgtatgcggtgagtagtgctgcgttaacccacaccctcgcccgggcttgctctgccgggagaatggaacgatgtacatgcgacgacagtcctggcctcgaaagtagacaggcctggcagtggggagtctgtggcgacaatttaaaatatagcacgaaatttttaagcaacttcttggggagcaaacggggcaataaggatctgagggcgcgtgcagacgcgcataacacgcacgtcgggatcaaggctgtgaagtcaggacttagaaccacctgtaagtgccatggggtcagcgggagttgcgcagtcagaacatgctggaagcagttatccccattccgagaaactggccaggtgctgaagttgaggtatgacagcgcggttaaagtaagtagcgccacgaacgaggcccttgggcgtttagagctgtgggctccggctcgccaggggtcactgaccaagggactcgcgccacgttccggggatctcgtttacatggaggactcaccgagcttctgccggcctagcaaatattcccctggtaccgctggaagagtctgtagcagggaagcttcttgcagctccctttgttgtggccgagggtacgacactcagtcacggctcgtcgcttttagttgccattgccaggttcagtggtgttgctacgtcgagtgccaacagtgcgtgcaagaagagttggtctatacctgtaaacattag

SEQ ID NO: 9188 - DNA, 462 bp, synthetic construct
  misc_feature 1..462: note = source = /note="Description of Artificial Sequence: Synthetic coding sequence"
  source 1..462: mol_type = other DNA
atgaagcacctgcggccccagttccccctgatcctggccatctactgcttttgcatgctccagattcccagcagcgggtttcctcagccactcgccgatccatccgatgggctcgacattgttcaactggaacaactcgcctattgcctaagccagtgggcccctctgagcagacagcctaaggataaccaagatatctacaagcgatttttgtttcactattcacggactcaggaggcaacccacccagttaagacaggcttcccaccagttcacccactgatgcatctggccgccaagctggcaaatagaagaatgaaacgcatactccagcgtggttctggaaccgctgcagtggactttacaaaaaaagaccacacagcaacatggggccggccattctttcttttcaggccaagaaacggaaggaacatagaagatgaggcccaaattcagtggtag

SEQ ID NO: 9189 - DNA, 765 bp, synthetic construct
  misc_feature 1..765: note = source = /note="Description of Artificial Sequence: Synthetic coding sequence"
  source 1..765: mol_type = other DNA
atggccgccgccagcgccggcgccacccggctgctgctgctgctgctgatggcagtggcagccccgtcgcgggcccgaggctcagggtgtagagcagggacgggcgctcgcggcgccggagctgagggacgggaaggtgaagcatgcggtactgtgggactcctattagagcacagttttgaaatagacgattccgccaactttcgcaagagagggtctcttttgtggaatcagcaggacggtactctttctctttctcagcgccagctgtcggaggaagagaggggacgcctgagagacgtcgccgctttgaatggtctctacagggtaagaattccaagacgacctggggccctggacggccttgaagcgggggggtacgtatctagtttcgtgcccgcctgcagtctggtcgagtcacatctgtcagatcagctcaccctgcatgttgatgtagccggaaatgtggtgggcgtgtcggttgtgactcatccaggcggctgccgcgggcacgaggtagaggatgtggacttagagctctttaatacaagcgtacagctccaacctcctactacagctcccggtcccgaaacagccgccttcatcgagcgccttgagatggagcaggcgcagaaagcaaagaatccgcaggagcagaagagttttttcgctaagtactggcacataatcttgggcggtgctgtgctcctaacggccctgaggccagcggctcctggtccagcgccaccacctcaggaagcctag

SEQ ID NO: 9190 - DNA, 810 bp, synthetic construct
  misc_feature 1..810: note = source = /note="Description of Artificial Sequence: Synthetic coding sequence"
  source 1..810: mol_type = other DNA
atggccgccgccagcgccggcgccacccggctgctgctgctgctgcttatggccgtggccgcaccgtcccgcgccaggggcagcgggtgcagggccggaaccggcgctcgcggggccggggcagaggggcgagaaggtgaggcctgtgggacggtcggcttactgcttgagcacagcttcgaaatcgatgattctgccaactttcgtaagagaggttctttattatggaatcaacaggacgggactctctccctcagccagcgccaactgtccgaagaggaaagaggccgactcagggacgtagctgccttgaatggcctctaccgcgtacgaattccacggagacccggagcactggatgggctcgaggccggcgggtacgtatccagctttgtcccagcatgttcactggttgaatctcacctgagtgaccagctgaccctccatgtggatgtggcgggcaatgtcgttggcgtgtctgtggtaacgcatccaggagggtgtaggggccacgaagtggaggatgtggatctggaactttttaacacaagcgtccagctgcaacctcctacgaccgcacccggccccgagactgccgcttttatcgaacggctggagatggaacaggcccagaaggctaaaaacccccaggagcagaagtcttttttcgccaagtattggatgtacattattcccgtggtgctgttcctgatgatgtctggagccccagacactggcggccagggcggcggcggcgggggcggcggaggtggagggagtgggcggtgctgtgtgccaccaagcttgtag

SEQ ID NO: 9191 - DNA, 480 bp, synthetic construct
  misc_feature 1..480: note = source = /note="Description of Artificial Sequence: Synthetic coding sequence"
  source 1..480: mol_type = other DNA
atgagcagcccccagcggcggaaggccatgccctgggccctgagcctgcttctcatgggattccagctcctagtcacttacgcatggtgctcagaggaagaaatgggggggaataacaagatcgtgcaggacccaatgttcttagccacagtggagttcgccctgaataccttcaatgtacagtcgaaggaggagcacgcgtacagattattgcgcgtcctatccagctggagggaggatagcatggaccgcaagtggcgtgggaaaatggtgttctccatgaacttgcagctcagacagaccgtgtgtaggaagtttgaggacgatatcgacaactgtccgttccaggagagcttagagcttaacaatgttcgacaaggaatatctttcccccaagtacactcttgtggttgctgcatggggtgtggggtgggcacaggagcagccgacaaggctatccctcgggataagggcaagtag

SEQ ID NO: 9192 - DNA, 1737 bp, synthetic construct
  misc_feature 1..1737: note = source = /note="Description of Artificial Sequence: Synthetic coding sequence"
  source 1..1737: mol_type = other DNA
atgctgctgctgctgctgctggcccccctgttcctgcggccccccggcgccggaggcgcccaaactcccaatgctacgtcggaaggatgccagatcattcaccctccctgggaaggaggtattcgctaccgggggctgacccgggaccaagttaaagcaattaatttcttaccggtggattatgagattgagtacgtgtgccggggagaaagagaagttgtgggccctaaggtccgaaaatgccttgccaacgggagctggaccgacatggacaccccttcccgttgcgtgcgcatttgtagcaaaagctacctgactctcgaaaacggcaaggtctttttgaccggaggagacctccctgccctcgacggcgctagggtggattttcgttgcgacccagactttcatttggtgggttcttcccgaagcatatgcagtcaagggcagtggagcacaccgaagccacactgccaggtcaatagaaccccccacagcgagagaagggcggtgtatattggtgccctctttccaatgtccggaggatggccaggggggcaggcctgtcagcctgccgtcgaaatggcgctggaggacgtcaattccaggcgggacattctgcctgattacgaactaaagctgatccatcacgactctaaatgcgatcctggacaggctactaaatatctgtacgaactgctctataatgaccccataaaaattatcctgatgcccgggtgctctagtgtttcaaccctggtggcagaagccgctagaatgtggaatttgattgttctgtcctatggcagtagctctcccgcactttctaatcgtcagagattcccgacctttttcagaacccatccatctgccactcttcataacccaacccgggtcaaactcttcgagaagtggggttggaagaaaatcgcgaccatccagcagactactgaggtgttcacatcgactctggacgacctcgaggagagagtaaaagaagccggaatagaaataactttccgtcagagctttttctctgatcctgcagtgcctgtcaagaatctgaagcgccaggatgcccgcatcattgtgggcctgttctacgagacagaagctcgtaaggtattttgtgaggtttataaagagcgactgtttggaaagaaatatgtttggttcttgatcgggtggtatgcagacaactggttcaagatctatgatcccagcattaactgtaccgtagacgaaatgactgaagctgtagagggtcatattacgacagagattgtgatgctgaatcccgcgaacaccagaagtattagcaacatgactagccaagaattcgtggaaaagctgacaaaacggttgaaaagacacccagaggaaaccggcggttttcaggaagctcctctggcctacgatgcaatttgggcccttgctctggcactgaacaagacatccggaggtggaggtcgcagtggcgtccgactcgaggatttcaattataacaatcagacgatcactgaccagatttatagggctatgaactctagtagtttcgaaggtgtctccggacatgtggttttcgatgcgtccgggtcacgcatggcctggaccctcatcgagcagcttcagggcggcagctataaaaagattggttactatgacagcactaaggatgacctgtcatggagtaagaccgacaagtggatcgtgattagcagaacacatagccccacttag

SEQ ID NO: 9193 - DNA, 444 bp, synthetic construct
  misc_feature 1..444: note = source = /note="Description of Artificial Sequence: Synthetic coding sequence"
  source 1..444: mol_type = other DNA
atgctgggcctgccctggaagggcggcctgagctgggccctgctgctcctccttctcggaagccagatcctcttgatttacgcatggcactttcacgagcagcgggattgtgacgaacataatgtgatggctaggtacctccctgctaccgtggagttcgccgttcatacgttcaatcagcaaagcaaggattattacgcctaccgcctgggccatatcctgaattcatggaaggagcaggtggaaagtaaaaccgtgttctccatggagctgcttctgggacgaactagatgtggcaagttcgaagacgatatagacaattgccacttccaggaatccaccgaactcaataacacatttacatgttttttcaccataagtacccgtccttggatgacccagttttctctgctgaataagacgtgtctggaggggttccactag

SEQ ID NO: 9194 - DNA, 444 bp, synthetic construct
  misc_feature 1..444: note = source = /note="Description of Artificial Sequence: Synthetic coding sequence"
  source 1..444: mol_type = other DNA
atgtggagcctgccccccagccgggccctgagctgcgcccccctgttactgttgttttcttttcaattccttgtaacttacgcgtggaggttccaagaagaggaagagtggaacgaccagaagcagatcgctgtgtatctgccccctactctcgaattcgcggtttacaccttcaacaagcaatccaaggactggtatgcctacaagctggtccccgtgctcgcatcttggaaggaacaggggtacgacaagatgaccttctctatgaacctccagttagggaggacaatgtgtggaaaatttgaagatgatatcgacaattgtccgttccaggagtcaccggagttgaacaacacttgtacatgttttttcacaatcgggatcgaaccttggagaacaagatttgatctctggaataaaacttgttcaggagggcattcttag

SEQ ID NO: 9195 - DNA, 2535 bp, synthetic construct
  misc_feature 1..2535: note = source = /note="Description of Artificial Sequence: Synthetic coding sequence"
  source 1..2535: mol_type = other DNA
atgggccccggcgcccccttcgcccgggtgggctggcccctgccccttctggttgtgatggcggccggcgtggctccggtgtgggcatctcacagcccccacctgccgagaccccattctagggtgcctccccacccctctagcgagagaagagcggtttacatcggagcattgttccctatgtctgggggatggccggggggacaggcatgccagccagccgtagagatggctctggaagacgtgaattcccgaagggatattcttccggattacgaattgaaacttattcatcacgactctaagtgcgaccccgggcaggcgactaaatatctctacgaactgttgtacaatgacccgatcaaaatcattctgatgcccggatgcagttccgtcagcactctcgttgccgaggccgcccgaatgtggaatttgatcgtgctctcttatggctcatcttctccagcactcagcaacagacagcggttcccaacattctttcgcactcatccctctgccaccttgcataatcctacaagggttaagttattcgagaaatgggggtggaagaagattgctacgatccagcagactacagaagtgttcacgtcaacactggatgacctcgaggaacgcgtgaaagaggcagggatcgaaattacgtttcggcaaagtttcttcagcgatccagcagtgccagtaaaaaaccttaagcggcaggatgcaaggataatagtaggactgttttacgagaccgaggctcgcaaggtattctgtgaagtctataaagagagattgttcggaaagaagtacgtgtggttccttattggatggtacgcagacaactggttcaagatatatgacccatccatcaattgtactgtcgacgagatgacagaggccgtcgagggccatatcactacggagattgtcatgctgaatcctgccaatacgcgcagcatcagtaatatgactagccaagagttcgtggagaaattgacaaagaggctcaaaagacacccagaagagaccggaggatttcaggaggccccactggcatacgacgccatctgggcactggcgctggctctgaataaaacctctggaggagggggccggagcggtgtgagactcgaagacttcaattataacaaccagacaatcactgaccagatatatagggcgatgaactcctcatcgttcgagggcgtgtcggggcatgtagtgttcgatgccagtggcagccggatggcgtggactttgatcgaacagcttcagggggggtcctacaagaagataggctactacgactccacaaaagatgatctgtcatggagtaaaactgataaatggattggaggttctcctcccgctgaccagacgctggtgataaagacattcaggtttctctctcagaaactcttcatctccgtttcagtgctcagctctctcggcatagtgttggctgtcgtgtgtttgtcttttaatatttataactcccatgtccgctatattcagaactcccagccaaacctgaataaccttactgccgtcgggtgcagcctggcccttgctgctgtttttcccttggggctcgacggatatcacatcgggaggaaccagtttccatttgtttgccaggcacgcctctggttactgggcctgggctttagtctcgggtacggctctatgttcacaaaaatttggtgggtccatactgtgttcacaaagaaggaagaaaagaaagagtggcgaaaaacattggagccatggaaactttatgccacagtaggtctgttggttgggatggacgtgctgaccctggctatctggcagatagtcgatcctctgcaccgtacaatcgaaacctttgccaaggaggagcccaaggaagatatcgacgttagcatcctgccgcagctcgaacattgttcttcacgaaaaatgaatacttggctggggatcttttacgggtacaaaggactactcctgttattgggcatcttcctggcatatgaaacaaaatcagtgagcaccgaaaagataaatgaccatcgcgccgtgggcatggcaatctataacgtggctgtcctatgtctcattacggctccggtaacaatgatcctgtcatcacaacaggatgccgccttcgcatttgcgtccttagccatagtgtttagctcctacattacactggtggtcttattcgttcccaagatgaggagattgatcacacgaggagaatggcagtctgaggcacaggatacgatgaagaccgggagctctactaataataatgaggaagagaaatcaaggctgttagagaaggagaacagagaactggagaaaatcattgctgaaaaggaggaaagagtctccgaactccggcatcagctacaatccaggcaacagttacggagccggcggcacccccccacccctcctgagccttcagggggactgcctaggggacctcctgagcctcccgacaggctgtcctgcgatggaagccgcgtgcatctgctgtataaatag

SEQ ID NO: 9196 - DNA, 2700 bp, synthetic construct
  misc_feature 1..2700: note = source = /note="Description of Artificial Sequence: Synthetic coding sequence"
  source 1..2700: mol_type = other DNA
atgctgctgctgctgctgctggcccccctgttcctgcggccccccggagctgggggtgcccagacaccgaacgcaacttctgagggttgccagatcattcacccaccatgggaaggcggcataaggtataggggccttaccagggatcaggtgaaggctataaatttcctgcctgtggattatgaaatagagtatgtctgccgaggtgagagggaagtggtgggcccaaaggtgaggaagtgtctcgcaaacggatcttggactgatatggataccccatcccgctgtgtcaatagaacgccacacagcgagaggagggccgtctatatcggggcgctgttccctatgtctggcggctggccaggaggtcaggcttgccagcccgcggtggaaatggccctagaagatgtgaacagccgtagggatattctcccagattacgaattaaagctcattcaccacgacagcaagtgcgatcccggccaagccaccaagtatctgtatgaactactgtataatgatcccattaaaattatattaatgcccgggtgtagctcagtgtcgacactagtcgccgaggccgctcggatgtggaaccttatcgtgttgtcctatgggagttcctcccctgccctgagcaatagacagcgcttccccactttctttagaacccatccctctgccactcttcacaaccctacacgagttaaactatttgagaagtgggggtggaaaaaaatagccaccatacagcaaaccaccgaagtgttcactagtactttggacgatttggaggagcgcgtcaaagaagccgggatcgagatcaccttcagacaatcctttttcagcgatccagccgtccctgtgaagaatttaaagagacaggacgccagaataattgtgggcctcttctacgagaccgaggcccgcaaggtgttctgcgaggtgtacaaagagcgtctgtttggcaagaaatatgtatggttcctcatcgggtggtatgccgacaattggtttaagatttacgacccctcaattaattgcaccgttgatgaaatgacagaggctgtggaaggccacatcacaaccgagatagtaatgttgaatcctgcaaatacacgatctatctccaatatgacttcacaagagttcgttgagaaattgaccaagcgcttaaagaggcatccggaggagactggcgggttccaggaggctccactggcttacgacgccatctgggccctcgcactggcgctgaacaagacatctgggggcgggggccgcagcggcgtgcggttggaagacttcaactataataatcagactattactgaccagatctaccgggcaatgaacagttcctcttttgagggagtgtccgggcatgttgttttcgatgcctcaggttctcggatggcttggacactgatagagcagctccaaggcggcagttataagaaaatcggatactatgatagcacgaaggatgatttatcatggtccaaaacagacaagtggatcggcggttcccccccagccgatcagaccttggttataaaaaccttcagatttctgtcacaaaaactgtttattagcgtttcagtcctctcttccctggggatcgtcctggctgttgtctgtctgagcttcaacatttacaatagtcacgtgcgttacattcagaattcccaaccaaatttgaataatctcactgccgttggatgctcactggcactggccgctgtctttccgttgggattggatggttaccatatcgggcgaaatcaatttccattcgtttgtcaggcccggctgtggctgcttggcttaggcttctccctaggctacggatccatgtttaccaagatttggtgggttcatactgtgttcacgaaaaaggaggaaaagaaggagtggaggaaaactttggagccctggaaactgtatgcaacagtcggccttctcgttggcatggacgtgcttacactggcaatttggcagatagtggatccactgcatagaacaatcgagacattcgccaaagaagaacccaaagaagacattgacgtcagtatcctgccacagctggaacactgtagctcccgcaaaatgaatacgtggttaggaattttctacggatataaaggcctgctgttgctgctgggtattttccttgcatacgagaccaagtccgtctcaactgagaagatcaacgaccaccgcgcagttggaatggcaatttacaatgtggcagtcttatgcctcattacggcacctgtgaccatgattttatcatcccagcaggacgcggcctttgccttcgccagcctggctattgtgttcagctcatatattacactggttgttctttttgtgcccaaaatgcgtagattgattacacggggcgaatggcaatccgaagcccaggacaccatgaaaacgggtagcagcaccaacaataacgaagaggagaaatccagactactggagaaagagaatagagaactggaaaaaatcattgctgagaaagaagaaagagtaagcgagttaaggcaccagctgcaatcccgacaacagctccgctcacgtaggcacccacccacccctccagaacccagcgggggacttcctcgcggacctccagagcctcccgataggctgtcgtgtgatggaagtcgggtgcacttactctacaagtag

SEQ ID NO: 9197 - DNA, 2886 bp, synthetic construct
  misc_feature 1..2886: note = source = /note="Description of Artificial Sequence: Synthetic coding sequence"
  source 1..2886: mol_type = other DNA
atgctgctgctgctgctgctggcccccctgttcctgcggccccccggtgcaggtggagcgcagacaccgaatgcgacctctgaggggtgtcagattattcatcctccctgggagggagggatccggtacagaggtctgactcgcgaccaggtgaaggctatcaattttctcccagttgactatgaaattgagtacgtgtgccggggcgagcgcgaggtggtcggccccaaggtacgcaaatgtctggctaatggcagttggacagatatggatacgcccagtagatgtgtgcgcatatgtagcaagtcttatttaacattggagaacgggaaagtgtttctaaccggtggtgatctgccagctttggacggcgctcgtgttgatttccgttgtgacccggacttccatcttgtgggtagctcgcgaagtatctgcagtcagggacaatggtcaacccccaagccacattgccaagtaaacagaactccacattcagagcgacgagcagtgtatataggcgcattgtttcctatgtcaggagggtggcctggcggccaagcatgtcagccagctgtcgagatggcactggaggacgtgaatagccgacgcgatatcctccccgattacgaactgaaactgatccaccacgacagtaaatgtgatcccggccaagctactaagtatctctatgagttactttataacgatcctattaaaatcatcttaatgcccggctgctcctccgtgagcaccctggtggccgaagccgctaggatgtggaacctgattgtgctgagctatggtagctcgtctcccgcccttagtaacagacagcgattcccaacttttttcagaacccatccaagtgccaccctccacaatcccacaagagtaaagctgtttgagaagtggggctggaagaagatcgcaaccatacaacaaaccacagaggtgtttacttccacattagacgacctagaagaacgggttaaagaggcaggaatagagatcacgttccgccagtcattctttagtgacccagcggttcctgtcaagaacctgaagagacaggacgcccgtataattgtaggtcttttttacgagaccgaagctcgcaaagtgttctgcgaggtctacaaggagaggctgttcggtaaaaaatatgtatggttcctcattggatggtatgctgataactggtttaaaatatacgacccttccataaactgcaccgttgacgagatgactgaggcggttgaagggcacattacgactgagattgtgatgcttaatccagcgaacacccgctccatctcaaatatgactagtcaggagtttgtggagaaacttacaaaacggttgaaacgccatcccgaggaaacaggagggttccaggaagctcccctggcttacgacgctatttgggctctcgccctcgcgctgaacaaaacatcaggaggcggtgggcgttcaggggtcaggttggaggactttaattacaataatcaaactatcaccgaccagatctaccgggcgatgaatagctcttcctttgagggcgtcagcggacatgtagtctttgacgcgagtgggtcacgcatggcgtggacactaatcgagcagctccagggcggctcttacaagaagattggatactacgactcgactaaagacgatctgtcctggtcaaaaaccgacaagtggattggcggcagcccacccgctgaccaaacactggttatcaaaacattcagattcctgtcccagaagctgtttatatccgtcagtgtgctgtcgtcactggggattgtcttggcagtcgtgtgtctaagcttcaatatctacaattcccatgtccggtacattcagaacagccagcctaacctcaacaatctcaccgcagtcggctgctccctggcccttgccgctgtatttccactgggcctggacgggtatcacatcggccggaaccagttcccatttgtatgtcaggctaggttgtggctgctcggcctaggcttcagtcttggctacggttcaatgttcactaagatatggtgggtccataccgtgttcactaaaaaggaggagaaaaaggagtggagaaaaacactggaaccatggaagctgtatgccaccgttggtttactagtggggatggacgtgctaacgcttgctatttggcagattgttgaccctctccatagaaccattgaaacgtttgccaaggaggagcccaaagaagatatcgacgtttccattctgccccagttagagcactgtagctccagaaaaatgaatacctggttgggaatcttctacgggtacaaaggtctgctcctcctgcttgggatttttttagcctacgaaacaaagagtgtgagcacagaaaagataaatgaccaccgggccgtcggtatggcaatttataatgtggccgtcttgtgtctaatcacagcccccgtcaccatgattcttagctcccagcaggatgcggctttcgcattcgcttccctcgcaatcgtgttctcatcatacattaccctggtggttctgtttgttccaaagatgaggcgcctcattactaggggcgagtggcagtccgaggcccaggataccatgaagactgggagctctactaacaacaacgaggaggagaagtccagactgctggagaaagaaaatcgcgagctggagaagatcattgccgagaaagaggagcgagtctccgagttgcgccaccagttacagtcccgccagcaattacggagccgcagacatcctcccactcctccagagcctagtgggggcctccctcggggccccccggagccccctgaccgcctctcatgcgatggcagcagggtgcacctgctttataagtag

SEQ ID NO: 9198 - DNA, 882 bp, synthetic construct
  misc_feature 1..882: note = source = /note="Description of Artificial Sequence: Synthetic coding sequence"
  source 1..882: mol_type = other DNA
atgaacaacctgagcttcagcgagctgtgctgcctgttctgctgccccccatgtcccggcaaaattgccagtaaactggcctttctgccaccagaccccacatatacactcatgtgcgatgagtcaggatcacggtggaccctacatctgagcgagagggcagattggcagtacagcagcagggaaaaggacgcgatcgaatgtttcatgaccagaacaagcaagggcaatcggatcgcctgcatgttcgtccggtgctcccctaatgccaaatatactctattattcagtcacggaaatgccgtggatttgggtcagatgtcgtctttttatattggacttggatctcggataaactgtaatatcttctcctacgattactctggttatggagcctcatcaggtaagccaacagagaaaaatctctacgccgacatcgaggcggcctggctggcactgagaactaggtatggaataaggccagaaaacgttataatctatgggcagtccattgggactgtcccatcggtggatcttgccgcaaggtatgaatcggccgcggtgattcttcacagtcccctcaccagcggaatgagagttgcatttcccgataccaaaaagacatactgttttgacgcctttcccaatattgacaagatcagtaagatcacatcccccgtgttgataattcacgggacagaggatgaggttattgacttctctcatggtctcgcactctttgagcggtgtcagaggccagttgaacctctctgggtggagggggcaggacataacgatgtggagttgtacggccaatacctagaaaggttgaagcagtttgtcagccaggagctagtccaaaaacacaaggaaggaaagtag

SEQ ID NO: 9199 - DNA, 1155 bp, synthetic construct
  misc_feature 1..1155: note = source = /note="Description of Artificial Sequence: Synthetic coding sequence"
  source 1..1155: mol_type = other DNA
atgtggtacgtgagcacccggggcgtggccccccgggtgaacttcgaaggggccctgttctctgggtatgccccggacggaggcctgtttatgcctgaggagttaccacagctggacagaggtacgctttgccagtggtcgaccctgtcatatcctggcttggtgaaggaactgtgcgccctgttcattgggtcagagctgcttcccaaagatgaactgaatgatctgatagatcgcgcgttcagtagatttcgacaccgcgaagtggtgcatctgagccgccttaggaacggcctcaacgtgttagagctttggcatggggtgacatacgcgttcaaagatctgagtctgtcgtgcaccactcaattcttacagtactttctggagaagcgggagaagcacgtaacagtggtggtcggaaccagcggggacaccggatcagccgcaatagaaagcgtgcagggtgcgaagaatatggatataatcgtccttttgcccaagggccactgcaccaaaattcaggagctgcagatgaccacagttcttaaacaaaacgtgcatgtgttcggcgtggaagggaactctgatgaattggatgagccaattaaaaccgtgttcgccgacgtcgccttcgtcaagaaacataacttgatgagtctgaatagtattaattggtctcgagtgttggttcagatggcccatcatttcttcgcttactttcagtgcactccatctctagacacacatccgctgcctctcgtcgaggtggttgtgcccaccggagcagccggtaacttggcggcgggttatatagctcagaaaatcggactgcccattcggcttgtggtcgctgtcaaccgaaatgatattatccataggaccgtgcagcagggagatttcagcttatctgaggctgtgaagtcaactctggcttcagccatggacatccaggtgccttacaacatggaacgggtattctggcttctctccggcagcgacagccaggtgactagggctctcatggagcaatttgaaagaactcagtccgtgaatctccctaaggaacttcactcaaagcatagccctgtgttgcctcgaccgtgtctctgtagccaagtccctggcagttgccctgggtgctggcccgacccttag

SEQ ID NO: 9200 - DNA, 2889 bp, synthetic construct
  misc_feature 1..2889: note = source = /note="Description of Artificial Sequence: Synthetic coding sequence"
  source 1..2889: mol_type = other DNA
atgctgcggcggcccgcccccgccctggcccccgccgcccggctgctgctggcaggtctgttatgcggcggaggcgtatgggccgctcgggtgaacaagcacaaaccctggctagaacccacgtaccatggcatagtgactgagaatgacaatacagtacttctggacccaccgctgatcgctctggacaaagacgctccgctccggttcgccgaaagcttcgaagtgacggttaccaaggagggagagatctgcgggtttaaaatccacggacaaaacgtgccgtttgacgcagtggtggtcgataagagcacaggagaaggcgttatacgctcaaaggaaaaattggactgtgagctacagaaggactactcatttactattcaagcctatgattgcgggaaaggacccgatggtacaaatgttaaaaagtcccataaggctaccgttcatatccaagtcaacgacgtcaatgagtacgctcccgtgttcaaagagaaatcctacaaggccacagtgatcgagggaaagcagtatgacagcatcctgcgcgttgaagctgtcgatgccgactgcagtccacagttttctcaaatctgctcatatgaaattattacacctgacgtcccatttacagttgacaaggatggctacatcaaaaatacggaaaaactgaactacgggaaggagcaccagtacaaacttaccgtgactgcttatgactgcggaaaaaaaagagctacagaggatgttctggtgaaaatcagcattaagcccacttgtacgccgggatggcagggttggaacaatagaatcgaatatgagcctggcacgggtgcccttgccgtctttcccaacatccatctggaaacttgtgatgaaccagttgcctcggtgcaggccacggtcgagttggagacatctcacattggaaaaggctgcgatcgggatacatactccgagaaaagcctgcatcgtctatgtggcgctgcagctggaacggcagagctgcttccatctccgagcggatcccttaactggacaatgggcctgcccacagataacggtcacgattccgatcaggtcttcgaatttaacggtactcaggccgtaaggattcccgacggggtcgtcagcgtctctccaaaggagcctttcactatctcggtctggatgcgccatggtccttttggccgaaagaaggagaccattctgtgctcatctgacaagactgacatgaaccggcaccactactccctgtacgttcatgggtgccggttgatttttcttttcaggcaagatccatccgaagaaaagaagtacagaccagcagaattccactggaagctgaatcaggtatgcgacgaagaatggcatcattacgttctgaacgtggagtttccttccgtgacactttatgtggatggcaccagccacgagcctttttccgtcaccgaggattatccactccacccctctaaaattgaaacacagctggtggttggtgcgtgctggcaaggaggcgacttacatatgacgcagttttttcgcggaaacctggcgggcctgactctgcggagtgggaagcttgcagataagaaggtgatcgactgcctgtacacctgtaaggaaggcctggacctgcaagttttagaggactctggtagaggggttcagattcaggcacatcccagtcagcttgtattgaccctggaaggggaggaccttggtgagttagataaagctatgcaacacatcagttacctcaatagtcgccaatttccgacgccgggcatcaggaggctgaaaattacaagtacgataaaatgcttcaacgaggcaacatgcattagcgtgcctcccgtcgatggctatgtcatggtgctgcagcctgaggagccaaagattagcttgagcggagttcatcattttgcacgtgctgcttctgaattcgagtcgagcgagggtgtgtttctgtttcctgaactccgcataattagtactattaccagagaggtggagcctgaaggagatggcgctgaggatcccactgtgcaggagagtttggtgtcagaggagattgttcatgatctggacacgtgtgaggtgactgtggaaggcgaggaactgaatcatgagcaggagtccctggaggtggacatggcacgactgcaacagaagggcatcgaagtcagctctagtgaactaggcatgactttcaccggcgtggacactatggcatcttacgaagaggtattgcacctccttaggtataggaattggcatgccaggtctttgttagatcggaaatttaaactgatttgcagtgaattaaacggcaggtatatatccaacgagttcaaagtcgaagttaatgtaatccatacagccaacccaatggaacacgctaaccacatggcagcacaaccgcagtttgtgcatcccgagcatagaagcttcgttgacttgtcagggcacaacctggccaatcctcatccttttgccgttgtcccatctacggctactgttgtcatcgtggtgtgtgtctccttcctggtgtttatgatcatccttggggtgttcagaattcgcgcagcgcacaggcggaccatgagggatcaagataccggaaaggaaaacgagatggactgggatgattcagctctgacgatcacagtgaaccccatggaaacttacgaggaccagcactccagtgaggaagaagaggaggaggaagaggaggaggagtcagaggatggggaagaggaggacgatatcacctctgctgagtccgaatcatcggaagaggaagagggcgagcaaggggacccacaaaacgccactcggcaacagcagctcgagtgggacgattctactctcagttattag

SEQ ID NO: 9201 - DNA, 2946 bp, synthetic construct
  misc_feature 1..2946: note = source = /note="Description of Artificial Sequence: Synthetic coding sequence"
  source 1..2946: mol_type = other DNA
atgctgcggcggcccgcccccgccctggcccccgccgcccggctgcttctggccgggctattgtgcggtggtggcgtttgggccgcgagggtgaataagcataaaccatggctagagccaacttaccatggcatcgtgactgaaaatgataatactgtcctcctagacccgccactgatagcactggataaagacgcgcctcttaggtttgccgagagttttgaggtgactgttacaaaggagggcgagatctgtgggttcaaaatccatgggcaaaatgtcccctttgacgccgtggtcgttgataagtccacaggcgagggggttatcagaagcaaggaaaaattggactgtgagctgcagaaggattactccttcaccatccaggcatacgactgcggaaaaggaccggacgggaccaacgtcaagaagtctcacaaggctacagtccatattcaagttaacgacgtgaatgaatatgctccagtgtttaaagagaagtcctataaagccacagtgattgaaggtaaacagtatgatagcatcttgcgggttgaagctgtggatgcggattgctccccacagttctctcagatttgtagttacgaaattattacccccgatgtcccctttactgtggataaggatggctatattaaaaataccgagaaattaaactacgggaaagagcaccagtacaaattaaccgtcactgcctacgactgtggcaagaagagggcaactgaggacgtgttagtgaagatcagcattaagccaacctgcaccccaggctggcaaggctggaacaaccggattgagtacgagcctggaaccggcgctctagctgtattcccaaacattcatctggagacttgtgacgaacccgttgcctctgtgcaagctaccgtcgagctggaaacatctcacatcggcaagggttgtgaccgtgatacatattctgaaaaaagcctgcacaggctttgtggagcggctgctggaactgccgaactcctcccttcgcctagcggctctctcaattggaccatgggcctaccaactgacaacggccacgattcagatcaggtgttcgaatttaatggcacccaggcagtgaggatccccgatggtgttgtcagcgtgtctccaaaagaaccttttaccatttccgtgtggatgcgccacgggcccttcggacgaaagaaagaaacgattttatgctcctcagacaagacagatatgaataggcaccattattccctgtacgtgcatggctgtcggctgatcttcctcttccgccaggatcccagcgaggaaaaaaagtacagaccagctgagtttcattggaagttgaaccaggtctgtgacgaggaatggcatcactatgtcctgaacgtggagtttccctccgtgactctatacgtggatggaaccagccacgaaccatttagcgtaacagaagattaccccctgcaccccagcaagatagagactcagcttgttgtcggagcgtgttggcaggagtttagcggagtggagaacgataatgaaaccgagccggtcaccgtagcgtctgcaggcggtgacctccacatgacgcagttctttcgagggaacctggccgggctcaccctccggtcgggtaagctggctgataaaaaggtcatcgactgcctgtatacttgcaaggaaggactggacctgcaggtcctggaggactccgggcgtggtgtccagattcaggcacaccctagccagctggtgttgacactggaaggagaggatctgggcgagttggataaagcaatgcaacacatatcataccttaacagccgccagttccccacacccggcatacggagactgaagattacaagcacaatcaaatgctttaatgaagcgacctgtatatctgtgcctccagtggatggctacgtgatggtgctgcaacctgaggagcccaagatatccctctcgggagtgcatcatttcgctcgtgccgcttcagagtttgagtctagcgaaggcgtgtttctatttcccgagcttagaatcatttctaccatcacaagggaggtggaaccagagggggatggagccgaggatccaaccgtgcaagaatcattggtgtcagaggagatcgtccacgatctggacacttgcgaggtcactgtggagggcgaggagctgaaccacgaacaagagtctctggaggtggatatggcccgactccagcagaagggcattgaggtctcttcttccgagttaggtatgacctttacaggtgtggacaccatggcctcctatgaggaggtgctgcatctcctcagataccgcaactggcatgctcgctccctcctggaccgtaaatttaagctgatttgttctgagctcaacggcaggtacataagcaacgaatttaaagtggaagttaacgtgattcatacagccaatcccatggagcatgctaaccacatggccgcccagcctcagtttgtgcatccagagcacagatcatttgtcgacttatctggacacaacttagcaaacccacacccgttcgccgtagtgccttccactgccacggtcgtgattgtggtctgcgtgagctttttagttttcatgattattctgggggtgttcagaataagagcagcccatcggagaactatgagagaccaggacactggcaaagaaaacgagatggattgggatgattcagccctaacaatcacagtcaaccctatggagacctacgaagaccaacacagctccgaagaggaggaagaggaagaagaggaagaggagagtgaagacggtgaggaagaggatgatatcacaagtgcagagagtgagagttcggaggaagaagagggcgagcagggagaccctcagaacgccacacggcaacagcagttagagtgggacgactcaacgctgtcgtattag

SEQ ID NO: 9202 - DNA, 678 bp, synthetic construct
  misc_feature 1..678: note = source = /note="Description of Artificial Sequence: Synthetic coding sequence"
  source 1..678: mol_type = other DNA
atgagcggctgcagcaagcggtgcaagctgggcttcgtgaagttcgcgcaaaccatcttcaaactcatcaccggaacattgagcaaggataagatcgaggacgagcttgaaatgaccatggtgtgccaccgacccgaaggacttgagcagctggaagcccagaccaatttcaccaagagagaattgcaggtgctgtaccgcggctttaagaacgaatgcccatcaggcgttgtgaacgaagatacgttcaagcagatctacgcacagttttttccccacggtgatgcctcaacatacgcccattacctgttcaatgcctttgataccacccaaacaggctccgttaagtttgaggactttgtgaccgccctctccatccttttgagaggtacagtacacgagaagcttcgttggacattcaacctgtacgatatcaacaaagatgggtatattaataaagaggagatgatggatattgtaaaagcaatttacgacatgatgggcaaatacacatacccagttcttaaggaggacactccgaggcagcatgtagacgttttcttccagaaaatggataagaataaggacgggattgttaccctggatgagttcttggaatcctgccaagaggacgacaatatcatgcgcagtctgcagctttttcagaacgtgatgtag

SEQ ID NO: 9203 - DNA, 420 bp, synthetic construct
  misc_feature 1..420: note = source = /note="Description of Artificial Sequence: Synthetic coding sequence"
  source 1..420: mol_type = other DNA
atgtacaagctggccagctgctgcctgctgttcatcggcttcctgaacccgctgctcagcctgccactgctcgatagcagagagatttcctttcagctgagtgcccctcacgaagacgccaggctcacccccgaagaacttgaacgagccagcctactgcagatactgccagagatgctgggtgctgaaaggggtgacatcctgaggaaggcagactcatccactaacatctttaatcccagggggaatttgagaaaattccaagatttttctggacaagatcccaatatcctcttgagccacttactggcccggatttggaaaccctacaagaaacaacgacggaagcttcggcaggatctgagattatggaaaaaagaacccggcttgcgcatatttaagaactacgtgtgggtgtag

SEQ ID NO: 9204 - DNA, 879 bp, synthetic construct
  misc_feature 1..879: note = source = /note="Description of Artificial Sequence: Synthetic coding sequence"
  source 1..879: mol_type = other DNA
atggaggtgaccgccgtggccacccagggcggctacggcagcagcgattgggtgactagttacctcttgatgttcagcgacggcggccgcaactggaaacagtacagacgagaagagtctatttggggctttccagggaatacaaacgctgacagcgtggttcattaccgtctccagcctccattcgaagcacgtttcttgaggtttttgcctctcgcttggaatcctagaggcagaattggaatgcggattgaggtgtatggctgtgcttacaaaagcgaagttgtttactttgacggccaatctgcactcttgtaccggctggacaagaagccactgaagcccataagggacgtaatttccctaaaatttaaagcgatgcagtctaacggaattctgctgcaccgtgaaggccagcatggaaatcacatcactctcgaactcataaaaggcaagctggtattttttctgaattctggcaacgctaaactgccaagcacgatcgccccagtcacattaactctgggctcactcctggatgatcagcattggcactccgtgttaatcgagttgctagacactcaggtgaatttcaccgtcgataagcacacacatcattttcaggcaaagggggattcctcctatttagacctgaacttcgagatttccttcggtggcattcctactccaggtagatcccgcgccttccgaaggaagtcatttcatggctgtcttgaaaatctgtattataacggagtggatgtgacagaattggcaaaaaagcacaaacctcagattctgatgatggagctggcccacggcctccaagatcagaacttgaagatctctcttacggtttgtcatcagaccacacagtag

SEQ ID NO: 9205 - DNA, 783 bp, synthetic construct
  misc_feature 1..783: note = source = /note="Description of Artificial Sequence: Synthetic coding sequence"
  source 1..783: mol_type = other DNA
atgaagaccagcgacggcttcaccctgaacgccgagagctacgtgagctttacaaccaaactggacatcccaaccgcagcgaaatacgagtatggggttccactgcaaacaagtgattcttttttgcggttcccctcctctttgacctcttccctttgcactgacaataacccggccgcattcttggtcaaccaagctgtgaagtgtacacgtaagattaatctggaacagtgcgaagagatcgaagcactgtccatggccttctacagctctcccgagatcctgcgtgttcccgactcccgaaaaaaggtgccaattaccgttcagagcattgttatccagtcactaaataagaccctcactaggcgcgaggatacggacgtgcttcaacccaccctggtcaatgctgggcatttttcgctatgcgtgaatgtggtccttgaagtaaagtattctctcacatacaccgatgctggagaagtcaccaaagctgatctatcatttgtgctcgggacagtgagcagtgtggtggtgcctcttcagcagaagttcgaaattcactttctccaaacggactggtcctctccggtgagcgccagatccacggaaggagaggagcccgccgtcggacccggcctccccaggctgcgcgggcccttctggaagtttcccgggcctggccatgccggacttggagcccaccctctgcatcaccccgtcatccagcaagaaggttttctaccagccccacgaggcttcggctaccgttcagaggtggattag

SEQ ID NO: 9206 - DNA, 3624 bp, synthetic construct
  misc_feature 1..3624: note = source = /note="Description of Artificial Sequence: Synthetic coding sequence"
  source 1..3624: mol_type = other DNA
atggccagcgtggcctgggccgtgctgaaggtgctgctgctgctgccgacccaaacatggtcacccgtgggagcggggaacccacccgattgcgacgccccactggcttcggccctgcccaggtccagtttctcctccagcagcgaattatcatcgagccacggtcctggcttttctaggcttaatcggcgggacggcgccggcggctggactccactagtgagcaataagtatcaatggctgcaaatagatctaggggaaagaatggaagtcacggcagtcgccacacagggcggctatggaagcagcgattgggtgactagctacttgctaatgtttagtgatggcggaagaaactggaagcagtataggagagaggagtcaatatggggattccccgggaacacaaacgccgactctgtcgtgcattacaggctccaaccacccttcgaggcacgttttttgcgctttcttcccctcgcctggaatcctcggggaagaatcggtatgcgaattgaagtatacgggtgtgcatataaatctgaggttgtctacttcgatgggcagtctgctctgctttatcgtctggataagaagccgctgaaacccattcgcgatgtcatctccctgaagtttaaagccatgcagtcaaacggaatcctgctccatagggagggccagcatggcaaccacattaccttagagctgatcaagggtaaacttgtgtttttcctgaacagcgggaatgcaaagttgccctccactatcgcccctgtgactttaactctggggagcctgctcgatgaccagcattggcactctgttctgatcgagctcctggatacccaggtgaattttaccgtcgacaagcacactcatcacttccaggccaagggagactcgagctatttggacttgaacttcgaaatcagctttggtggtatccctactccgggtcggagccgcgcattcagaagaaaatctttccacggctgcttagaaaatctatactacaatggcgtggacgtcaccgagttggctaaaaagcacaaaccccagatactaatgatgggcaatgtgtctttcagctgcccacagccacagaccgtcccagttaccttcctgtcaagtcggagttacttagcccttccaggaaacagtggcgaagataaagtttctgtgactttccagtttagaacctggaaccgcgctggacacctgctcttcggggagcttagaagagggtccggttcctttgtcttgttcctcaaagatgggaagctaaagttgtcgctgtttcagccaggccaatcacctagaaatgttacagcaggagccggtttgaacgacggccagtggcactccgtcagctttagtgctaagtggagtcatatgaatgtagtggtcgacgacgacaccgctgtgcagccactggtggccgtattaattgactccggagacacttattacttcggcggctgtctcgataattccagcggttctggttgcaagtcacctttgggggggttccaaggttgcctcagactcatcacaataggtgataaagcagtggaccctattttagtgcagcaaggggccctcgggtctttccgcgatctccagatcgattcctgcggcatcactgatagatgcttaccaagttactgcgagcacggtggggagtgctcccaatcatgggacaccttctcctgcgactgtctaggaacaggttacactggtgagacttgccactcttctctatacgaacagtcttgtgaggcccataagcatagggggaatccctccggactgtactatattgacgccgatgggagtgggccattgggcccctttctcgtctattgtaacatgactgatgcggcatggactgtggtgcaacacgggggtcctgacgcagtgacactaaggggagccccttcagggcaccccaggtctgctgtatcttttgcatacgcagccggtgcaggccagctccgctctgccgtaaatcttgcggagcgctgtgagcaacgcttggccctccggtgtgggactgccaggcggccggactccagggatgggacccctctcagctggtgggtgggcagaactaacgagacccacacttcttggggcggaagcctgcctgatgcacaaaagtgcacgtgtgggctggaaggaaactgcatcgattctcaatattactgtaactgtgatgcgggccggaatgagtggacaagcgacaccatcgtcttgtcacaaaaggaacacctccctgttacacaaattgttatgacggatgcggggcgacctcacagcgaggctgcatatacactcggcccattgctgtgccggggtgaccagtccttctggaactctgccagtttcaataccgagacctcttacctgcacttccccgccttccacggtgaactaaccgctgatgtgtgctttttctttaaaactacagtctcgagcggcgtctttatggagaaccttgggatcaccgacttcatcagaattgaactccgcgcccctacagaagtcaccttttcatttgacgtggggaacggtccgtgcgaggtcacggtgcagagcccgactcccttcaacgacaatcagtggcaccatgtccgggcagagcggaatgtaaagggagcatctttgcaggtggaccaacttcctcagaagatgcagcctgccccggctgacggacatgtgcgtctgcagctgaattcccagctgtttatagagattagtgcttacttcgccaccggcagttcaatgacctatcacttccaggaacattatactctgtctgaaaatagtagtagcctcgtctcctccctgcatcgggacgtcaccctcacaagagaaatgattacactctcttttaggaccacgcgcaccccttcactgcttctgtacgtatccagcttctacgaagagtatttgtcagttatcctcgcaaataacgggtcgctacagattcgttataaactggaccggcaccaaaatcctgatgcgtttacatttgactttaagaacatggccgatgggcagctccatcaggtcaagatcaatagagaagaagcggttgtgatggtggaggttaaccagagcaccaagaagcaggtgatcctgtctagcggaaccgaattcaacgccgtcaaatccttgatcctgggaaaggtcctcgaggctgcgggcgccgacccagatactaggagggctgccaccagcggatttactggctgcctcagtgccgtgaggtttgggagggccgcacctctcaaagctgcgcttcgtccgtctgggccctcaagggtgactgtgcgcgggcacgtggcaccgatggcccggtgcgcagccggcgccgcatccggttctcctgcccgggagctggcccctcgattagctggcggagccggccggtccggcccagccgatgagggtgagcccctggtgaatgctgaccgcagggacagcgcggtcatcggaggagtcattgctgtcgttatcttcatactcctgtgcatcactgcgattgctattagaatctaccaacaacggaagctgcgcaaggagaatgaatctaaggtgtcaaagaaagaagagtgctag

SEQ ID NO: 9207 - DNA, 2238 bp, synthetic construct
  misc_feature 1..2238: note = source = /note="Description of Artificial Sequence: Synthetic coding sequence"
  source 1..2238: mol_type = other DNA
atggccagcgtggcctgggccgtgctgaaggtgctgctgctgctgcccacccagacctggtcaccggttggagccgggaatcctcccgactgcgacgccccgcttgcgtcggcgctcccaaggagtagcttctcaagtagcagtgaactgtcctcttcccacgggcccgggttcagtcgccttaacaggagggacggagccgggggatggacccctctggtctcaaataaataccagtggctgcagatcgacttgggagagcggatggaagtgaccgccgtggcgacccaaggcgggtatggctcctctgattgggttaccagttacttgttaatgttcagcgacggaggccggaactggaagcagtacaggcgcgaagaaagtatctggggctttcccggaaataccaatgcagattctgtagtacactacaggctgcaaccaccatttgaggcccggttcctcagatttctcccattggcttggaaccctagaggacgcattggcatgcgtatcgaagtgtacggatgcgcctacaagtctgaggtcgtgtacttcgatgggcagtcggccctcttgtaccgcctcgataagaaaccccttaagcctatcagagatgtgatcagccttaagttcaaagcgatgcagtccaacggtatcctgctccacagagagggccaacatggcaaccatattactctggagttaatcaaagggaaactggtgttcttcctaaactccggaaatgctaagctgccctcgactattgccccagtaactctgaccctgggcagtctcttggatgaccagcactggcactctgtgcttatcgaactgctagacacgcaagtcaatttcaccgtcgataagcacacacatcactttcaggccaagggagactcgtcctatcttgatctgaacttcgagatttccttcggtggcatccccacacctggccgctccagagcattcaggagaaaatcctttcatgggtgtctggagaacctatactataacggcgttgacgtaacagagctagccaaaaagcacaagcctcagattctaatgatgggtaatgtaagcttctcctgtccgcagccccagaccgtgcccgtcacgtttctatccagccgaagctatctggccttgcctgggaacagtggcgaagataaagtctctgtgacattccagtttcgaacgtggaatcgcgcagggcacctcctttttggcgaattgaggcggggttccggcagctttgtgctgtttctgaaagacggtaagctgaagctgtccttgtttcagcctggtcaatcaccacgaaatgtcaccgccggcgcaggactgaacgatgggcagtggcactcagtgagtttttccgctaagtggagtcacatgaacgttgtcgtggacgacgatactgccgtgcaaccgcttgttgctgtcctcattgatagcggggatacatattatttcggcggttgcttggataactcttccggttctggttgcaaatcgccccttggcggcttccaaggttgccttcgcttaattactatcggggataaggctgtcgaccccattctcgtgcagcagggcgctcttggcagtttcagagaccttcagatcgactcttgcggcatcaccgatcgttgtctgccttcttactgcgagcacggcggggaatgttcccagtcttgggatacattctcttgcgattgtctgggcactggctacacaggtgagacatgccatagcagcctatatgaacagtcttgtgaggcccacaagcatagaggtaaccccagcggactgtattacatcgatgccgacgggtccggtccgttgggtccgttcctcgtctattgcaacatgaccgatgcagcctggaccgtagttcagcacggagggcccgatgctgttactctgcgcggggcaccatccggtcaccctcggtctgcagtgtctttcgcgtatgctgcgggcgctggtcaactccggtctgcagttaaccttgccgagcgctgtgagcaacggctagcgctgaggtgtggcactgcacgtcggccagacagccgtgatggaactccactaagctggtgggttggccggactaatgagacccatacctcatggggaggctcactgccagacgcacaaaagtgcacgtgcggacttgagggcaattgtattgattctcaatactactgcaactgtgacgccggacgtaatgaatggtag

SEQ ID NO: 9208 - DNA, 549 bp, synthetic construct
  misc_feature 1..549: note = source = /note="Description of Artificial Sequence: Synthetic coding sequence"
  source 1..549: mol_type = other DNA
atggagccccagctgggccccgaggccgccgccctgcggcccggctggttggctttactcctgtgggtttccgccctctcatgctctttctctcttcctgcttcctctctcagctctctagttccacaggtccggactagctataacttcggaaggacgttcctcggcttagacaagtgcaatgcctgcatcggaacgtcaatatgcaagaagtttttcaaagaagagattcggtccgacaactggctggctagccacctgggtctgcctcccgattctctcttgagctacccagctaactactccgacgactcgaaaatttggcgccctgttgaaatttttcggctggtgtccaagtaccaaaatgagatttccgacaggagaatatgcgcctcagcgtccgctcccaagacgtgttctattgagcgggtgctacggaagactgagcgctttcagaagtggcttcaggctaagcggctgactccggatcttgtgcaggactgtcatcagggacagcgtgagctgaaatttctgtgcatgctccgctag

SEQ ID NO: 9209 - DNA, 282 bp, synthetic construct
  misc_feature 1..282: note = source = /note="Description of Artificial Sequence: Synthetic coding sequence"
  source 1..282: mol_type = other DNA
atggacagcctgcggaagatgctgatcagcgtggccatgctgggcgcaggtgccggtgtggggtacgctctgctcgtcatagtgacacctggggaacgaaggaagcaagagatgctcaaggaaatgcctcttcaggacccacggagtcgggaagaggcagcccggacccagcagttgctgctggcaactctgcaagaagcggccacgacacaagagaatgtggcttggcgcaagaactggatggtgggtggtgaaggaggggctggcggacgttccccctag

SEQ ID NO: 9210 - DNA, 387 bp, synthetic construct
  misc_feature 1..387: note = source = /note="Description of Artificial Sequence: Synthetic coding sequence"
  source 1..387: mol_type = other DNA
atgggcaagagcgccagcaagcagttccacaacgaggtgctgaaggctcacaacgagtatcgacaaaaacacggcgtgccacccctcaagttgtgtaagaacctaaatcgcgaggcccagcaatattccgaggctttggcttcaaccagaatcctgaagcattctcctgaatcatcccgcgggcagtgcggtgaaaatctggcttgggctagctacgatcagacagggcactttaccgctatggtgtggaagaataccaaaaagatgggcgtgggcaaagccagcgctagcgacggctcatcattcgtagtcgctcggtactttcccgcgggaaatgtggtcaatgaggggtttttcgaagaaaacgtcttgcccccaaagaagtag

SEQ ID NO: 9211 - DNA, 465 bp, synthetic construct
  misc_feature 1..465: note = source = /note="Description of Artificial Sequence: Synthetic coding sequence"
  source 1..465: mol_type = other DNA
atgggcaagagcgccagcaagcagttccacaacgaggtgctgaaggcccacaatgagtaccggcagaaacacggggtccctcctctcaaactgtgcaaaaacctgaacagggaggctcagcaatactccgaagccctggcctcgacccgcatactgaaacacagtcctgaatcctcaaggggccaatgcggcgaaaatctggcttgggcttcctacgaccaaaccgggaaagaggttgctgatcggtggtactctgaaataaaaaactataactttcagcaacccgggttcacttctggaacgggacactttacggcaatggtttggaagaatacgaagaaaatgggcgtagggaaggctagcgcttccgacgggtcatcattcgtcgttgcccgatactttcccgccggaaatgtggtcaacgaagggttcttcgaagagaacgtgctgccgccaaaaaagtag

SEQ ID NO: 9212 - DNA, 831 bp, synthetic construct
  misc_feature 1..831: note = source = /note="Description of Artificial Sequence: Synthetic coding sequence"
  source 1..831: mol_type = other DNA
atggacagcagccgggagcccaccctgggccggctggacgccgccgggttttggcaggtgtggcagcggtttgatgcagacgagaagggttatattgaagaaaaggaactggacgctttcttcttacacatgttgatgaaattagggaccgatgacacggtcatgaaggctaacctgcataaggtcaaacagcagtttatgactacacaggatgcctctaaggacgggcggattcgtatgaaagaactggcaggaatgttcttgagtgaggatgagaacttcctactgttgttccggcgagaaaatccattagactcgagtgtggaattcatgcagatctggcgcaaatatgacgctgattcatctggcttcatctcagccgccgagttgcgtaattttctacgcgatctattcctgcaccacaaaaaagctatttctgaagcaaagctggaggagtacaccggaactatgatgaaaattttcgaccgtaacaaggatggcagattagacctcaatgatctggcacggatactggccttgcaggaaaattttctgcttcagtttaagatggatgcctgcagcaccgaagaacgcaaacgggacttcgaaaagattttcgcatattatgatgttagtaaaacaggagccctggagggtcccgaagtagatggtttcgttaaagatatgatggagctcgtgcagccatcaatttccggggtcgacctggataagtttagggagatcctgctgcgccattgtgatgtcaataaggacgggaaaatacagaaaagcgagctcgcactttgtctgggcctgaagattaatccctag

SEQ ID NO: 9213 - DNA, 216 bp, synthetic construct
  misc_feature 1..216: note = source = /note="Description of Artificial Sequence: Synthetic coding sequence"
  source 1..216: mol_type = other DNA
atgcccgccggcgtgcccatgagcacctacctgaagatgttcgccgcttcacttctggctatgtgcgccggcgcagaggtcgtacatcgctactataggccagacctcacaatacctgaaatcccccctaagcggggtgagctgaaaaccgaactactgggcctgaaggaacgcaagcacaagccccaggtctcacagcaggaggaactcaaatag

SEQ ID NO: 9214 - DNA, 1287 bp, synthetic construct
  misc_feature 1..1287: note = source = /note="Description of Artificial Sequence: Synthetic coding sequence"
  source 1..1287: mol_type = other DNA
atgaagcccatgctgaaggacttcagcaacctgctgctggtggtgctgtgcgactacgtgctgggtgaagcagagtacttgctgctgagagagcctggccatgtggctctgtctaacgacaccgtgtatgtggatttccaatactttgatggggccaacgggacgctcaggaacgtgagtgtcttgctgctggaggcaaatacaaaccaaacagtgaccactaagtatctgctgacgaaccagtcccagggcacattgaaattcgagtgcttttacttcaaagaagctggtgattattggttcacaatgacaccggaggccacagacaacagtacacctttcccttggtgggagaagagcgcattcttgaaagtagagtggcccgtgtttcacgttgatctaaacagaagcgcaaaggctgctgaaggaaccttccaagtcggtctgttcactagccagcccctgtgccccttccctgtggacaaaccaaatatagttgtcgacgttatcttcaccaactctcttccagaagcgagaaggaatagcagacagccactggagattcgtacttctaagcggactgaactggctcaagggcagtgggtcgagtttggctgtgcgccgttgggtcccgaggcgtacgtgactgtggttttaaagctgttgggacgggattcagtgataacgtccacgggaccgattgatcttgctcagaaattcgggtacaagctagtcatggtaccagagcttacttgcgagtctggggtggaagtcaccgtcctgccaccaccctgcaccttcgtgcaaggggtggtcacagtatttaaagaagcgccaagataccccggcaaaagaaccattcatctagctgagaattccctgcccctgggggagcgacggaccatttttaactgtacactatttgacatgggcaagaacaagtactgcttcgatttcggaatttcttctcggtctcatttttctgccaaggaagagtgcatgctgattcagaggaacacagagacctggggactgtggcagccctggtcccaatgttcagctacctgtggagatggggtccgcgaacggaggagagtttgtcttacttccttcccttcctccccagtctgtccagggatgtccttagaagcatctttgtgttcattagaggaatgcgctggacgctttcggagttgttgcccaggctggtccgccatggtgaggtctaggctgactaattctgcaagtcgcgtccaggccatactgctgccacagcctcttgcttag

SEQ ID NO: 9215 - DNA, 312 bp, synthetic construct
  misc_feature 1..312: note = source = /note="Description of Artificial Sequence: Synthetic coding sequence"
  source 1..312: mol_type = other DNA
atgaagctgtgcgtgaccgtgctgagcctgctggtgctggtggccgccttttgctcactggccctctcagccccaatgggctcagatcccccaactgcatgctgcttcagctacacagccaggaagctgcctcgaaatttcgttgtcgattactatgagacctcaagcctatgctctcagccggctgtagtgtatcgcgagagcgcaagttcggcagcccctgggcgcatcccttccacgagagcagccccacacggaccatggtccggcaggggcagatgccttccccaggcaagggataaggcccgatag

SEQ ID NO: 9216 - DNA, 279 bp, synthetic construct
  misc_feature 1..279: note = source = /note="Description of Artificial Sequence: Synthetic coding sequence"
  source 1..279: mol_type = other DNA
atgaagctgtgcgtgaccgtgctgagcctgctggtgctggtggccgcgttctgttcactggcactgtccgcaccaatggggtctgacccacccaccgcgtgctgctttagttacacagcccggaaactccctaggaattttgtggtcgactactacgaaacaagctcgctttgttcacagcctgcagtgccatgggattccaatctcggaaaacaggtgtgcgctgatcccagtgaatcctgggttcaggaatatgtgtacgacttagagctaaactag

SEQ ID NO: 9217 - DNA, 282 bp, synthetic construct
  misc_feature 1..282: note = source = /note="Description of Artificial Sequence: Synthetic coding sequence"
  source 1..282: mol_type = other DNA
atgcaggtgagcaccgccgccctggccgtgctgctgtgcaccatggcattgtgcaaccaggtcctgagcgccccactcgcagctgatactcccaccgcatgctgttttagctatacttccagacaaatcccacagaacttcattgcagattactttgagaccagttctcagtgcagcaagcctagtgtgatctttctcacaaaacggggtaggcaagtgtgcgctgacccaagcgaggaatgggtgcagaaatatgtctcagacctggaactctcagcatag

SEQ ID NO: 9218 - DNA, 1869 bp, synthetic construct
  misc_feature 1..1869: note = source = /note="Description of Artificial Sequence: Synthetic coding sequence"
  source 1..1869: mol_type = other DNA
atgggcaagagcgagggccccgtgggcatggtggagagcgccggccgtgcagggcaaaagcggccaggctttctggagggcggccttctcctcctgctgttgctggtaaccgccgctctggtcgcactcggcgttctctatgccgacagacgcggaaaacagctcccccgtctggcctcacgtttatgcttccttcaggaggagcgcacctttgttaaaagaaagccgcgcgggatccctgaggctcaggaagtcagcgaggtatgcaccacgcctgggtgcgtgatcgctgcagccagaatcctgcagaacatggatcccaccacagagccatgcgatgacttctaccaatttgcctgcggagggtggctgagacgccacgtcattcctgaaaccaatagtcgctattccatttttgacgtgcttcgagatgaactggaggttattttaaaggtggagctggaaacacagcttgccaaggccacagtgccccaggaggaacgacatgatgtgattgcattgtaccaccggatgggtctcgaggagctacagtcccagtttgggctgaagggctttaactggacgctctttatccagaccgtcctaagtagcgttaaaattaagctactccccgacgaggaagttgtggtctatggcattccgtacctgcagaatctggaaaatatcatcgacacttattcggctcggactatacagaactatttagtttggagactcgtcctggacagaatcggatcactgtcacagcggtttaaagacactagggtgaactatagaaaagcactctttggaacgatggtggaggaggtcagatggcgggaatgcgtgggctatgtgaactccaatatggagaatgccgtaggctccttgtacgtccgcgaagctttccctggggattccaagtctatggttagggaactaatagacaaagtccgcaccgtgtttgtcgagaccctggatgagctgggatggatggacgaggaatcaaagaaaaaggctcaggaaaaggccatgagcattcgagaacagatcggacaccccgactacatcctggaagaaatgaatagaaggttggatgaggagtatagtaatttgaattttagcgaggacctttacttcgagaattccctccaaaacctcaaggtgggcgcccagcggtctctgagaaagcttagggagaaagtggatccaaacctgtggatcatcggtgccgccgttgttaacgctttttatagccccaataggaatcagatcgtctttccagccggtattctgcagcctccatttttcagtaaggagcagccccaggcactcaacttcgggggaatcggtatggtaattggacatgagatcacacatggctttgacgataatggacggaattttgacaagaatggtaacatgatggattggtggtcaaactttagcactcagcactttcgcgaacagagcgagtgtatgatttatcagtacggaaattattcctgggacctggcagacgagcagaacgtaaacggctttaacacgctgggtgagaacatagctgacaacggcggagtgcgccaagcctataaggcttacctcaaatggatggcagaaggcgggaaggaccagcagctgccgggcctagatctgactcatgagcagctcttcttcattaactacgcccaagtgtggtgtgggagctaccggcctgagttcgctattcagagcatcaagacagatgtccactctcctttaaagtacagagttctgggctctctgcagaatttagctgcatttgccgatacatttcactgtgcacgcggtacaccgatgcatcccaaggagcgctgtagagtgtggtag

SEQ ID NO: 9219 - DNA, 2340 bp, synthetic construct
  misc_feature 1..2340: note = source = /note="Description of Artificial Sequence: Synthetic coding sequence"
  source 1..2340: mol_type = other DNA
atgggcaagagcgagggccccgtgggcatggtggagagcgccggccgggcaggccagaagcgaccaggtttcctggagggaggactcctccttctgctgttgctggttacagccgctctggtggctctcggcgtcctatatgccgaccgccgaggaaagcagctgccccgcctggcctctaggctgtgtttcctgcaagaagaacgcaccttcgtgaagcgaaagcctcgcggtataccggaggcccaggaagtgtccgaagtctgtactactccgggctgcgtcatcgctgcagctcgaatcttacagaacatggatccgaccacagagccttgcgatgacttctatcagttcgcatgtggaggctggctgcgcagacacgtcatccccgaaacgaactcgcgatacagtatcttcgatgtgctccgtgatgagctcgaagtgattcttaaagcagtgttggaaaactcaacagctaaggataggcctgcagtggagaaagcacggacactatatagatcatgtatgaaccaaagcgtcattgaaaaacgggggtcccagcctctccttgacatcctggaggtcgtcggcgggtggcctgtcgccatggaccgctggaatgagacagtgggcctggagtgggagctggagcgacaattggcgctgatgaatagccagttcaacagaagggtgcttatcgatctctttatctggaacgacgatcagaactcgtcccgccacatcatttacatcgaccagcctacactcggtatgccaagtagagaatattattttaacggtgggtctaacaggaaggtgagagaggcataccttcaattcatggtctcagtggcaacacttttgagggaagatgccaacctgccccgagactcctgtctggtccaggaggatatggtgcaggtgctcgagctggagacccagctggccaaagcgacagtcccacaagaggaacggcacgacgttatcgccctttatcatcgtatgggcttggaagagctccagagtcaatttggtctaaaggggtttaactggactctgttcatacagactgtgttgtctagtgtcaagatcaagctgcttccagacgaagaagttgtggtatatgggatcccttatctacagaacctggagaatatcattgatacctacagcgcaagaactattcagaattaccttgtgtggagattagtgctggatagaatagggtccttgtcccagagatttaaggatacccgcgtcaattaccggaaggcgctcttcggtactatggtcgaggaggtgcgctggcgcgagtgcgtcgggtacgtaaactccaacatggagaacgctgtgggcagtctctacgttagggaagcattcccaggcgactctaaatccatggtgcgggaactcatcgataaagtcagaactgttttcgttgagacactggacgaactgggatggatggatgaggagagcaaaaagaaagcccaagagaaagccatgagcatacgtgagcagattggtcaccccgactatatcttagaagagatgaaccgaaggctggacgaggagtattccaaccttaatttcagtgaagatctgtattttgagaattcgttgcagaacctcaaggtgggagcccaacgcagtcttcggaaactccgtgagaaggtcgatcccaacttgtggatcataggagccgctgttgtgaacgcgttctattcaccgaacagaaatcagattgttttcccagctggcatcctacagccccctttcttttccaaggagcagccgcaagcattaaactttgggggtattggaatggtgatcggccacgaaattacacacggttttgatgataacggcagaaattttgataaaaacgggaatatgatggactggtggagtaatttctcaactcagcatttccgagaacagtccgaatgcatgatctatcagtatgggaattactcctgggatctggccgatgagcagaatgtgaacggcttcaacactctcggcgagaacatcgcggacaacggtggagtcaggcaagcctataaggcctatctgaagtggatggcggaaggcggtaaggaccagcaacttcctggcttggacttgacccacgaacagctgttttttattaattatgcacaggtgtggtgcgggtcttatagacctgaatttgccatccagagcatcaaaactgacgttcacagtccactgaaatacagagtgctgggcagcttacaaaacctcgctgcattcgcggataccttccattgcgcgaggggcactcctatgcatcctaaggaacgttgccgggtatggtag

SEQ ID NO: 9220 - DNA, 258 bp, synthetic construct
  misc_feature 1..258: note = source = /note="Description of Artificial Sequence: Synthetic coding sequence"
  source 1..258: mol_type = other DNA
atgagcgtgcacatgcccgccatgaagatctgcgagaagctgaagaaattggactcacagatttgcgagctcaagtacgaaaaaacgttggatctagcctccgtcgatctgagaaagatgcgagtggcagaactgaagcaaattttgcactcatggggtgaagagtgcagggcgtgtgcagaaaagacggactacgtgaacttaatccaggagctggctccaaagtacgcggccacacaccccaagaccgaactgtag

SEQ ID NO: 9221 - DNA, 657 bp, synthetic construct
  misc_feature 1..657: note = source = /note="Description of Artificial Sequence: Synthetic coding sequence"
  source 1..657: mol_type = other DNA
atgggccgggtgttcctgaccggcgagaaggccaacagcatcctgaaacggtacccaagggcaaatgggttcttcgaggaaattagacagggaaatatcgagcgagaatgcaaggaggaattttgcacctttgaagaggcccgggaagcctttgaaaacaacgaaaaaactaaagagttctggtccacatatacaaaagcccagcagggagagagtaatcgcggatccgattggttccagttctacctgacattccctcttatcttcggcctcttcattatcctgcttgtgatttttctcatttggcgctgcttcctcaggaacaaaactagaagacagacggtcaccgaggggcacatcccgttcccgcagcacttaaatattataacccccccaccaccgccagacgaagttttcgatagtagtgggctgagtccggggtttctgggatacgtggttggtcgttctgatagcgtctctacgaggctgtccaactgtgaccctcctcctacgtacgaagaggcaacagggcaggtgaacctgcagagatccgagaccgagccgcacctggacccaccgccagagtacgaagatattgtgaactccaacagcgcctcagcgattccaatggttccagtcgtgaccactatcaaatag

SEQ ID NO: 9222 - DNA, 1365 bp, synthetic construct
  misc_feature 1..1365: note = source = /note="Description of Artificial Sequence: Synthetic coding sequence"
  source 1..1365: mol_type = other DNA
atggcccggcccaacaagttcctgctgtggttctgctgcttcgcctggctgtgcttccctatctctcttggaagtcaagcgtcaggaggcgaagcccagatcgcagcaagcgccgagttagaaagcggagccatgccttggagcctgttgcaacacattgatgagagagacagggcagggctgctcccagccctctttaaggtcctgagtgtaggacgaggggggagtccacgacttcaaccagatagtcgcgctttgcactacatgaagaaactgtacaaaacatacgcaaccaaagagggtatccccaaatccaaccgcagccacctctacaacactgtgcgcttgtttaccccttgtacgcgtcacaagcaagcccccggcgatcaggtgactgggattctcccaagtgtagagctgctatttaatcttgacagaattacgacagtagagcatctactgaaaagtgtcttgttatataatattaataatagcgtctccttttcaagtgccgtaaagtgcgtttgtaaccttatgattaaggagcccaaaagttcttctagaacactgggacgtgccccttactcctttactttcaacagccagtttgagttcggaaaaaaacataaatggattcaaattgatgtcacctccttgctccaacctctcgtggccagcaataagcgcagcatccacatgagcattaacttcacatgcatgaaagatcaactggaacaccccagtgcacagaatgggctatttaatatgaccctggtctcaccttcactaatactttatcttaacgatacctctgcccaggcttatcattcttggtacagcctgcactataagcgaaggcctagtcagggccccgatcaggaacgtagcctcagcgcttaccccgtgggagaagaagcagcagaggacggcaggtcttctcaccacagacacaggcgggggcaggagactgtctcctccgaactgaagaagccccttggccccgccagcttcaacctcagcgagtatttccggcagttcttattgccacagaacgaatgtgagttacacgattttcggctctccttctcccagctgaaatgggacaattggatcgtcgccccacatcgttataatcctcggtactgcaaaggcgactgtccacgagccgttgggcataggtatggttccccggttcatacgatggtacaaaacataatttatgagaagttagactcttctgttccacgcccctcttgcgtcccagcgaagtattctccactgtccgtcctgacaatagagccagatggcagtattgcatacaaagaatatgaggatatgatagccacgaagtgcacatgcagatag

SEQ ID NO: 9223 - DNA, 417 bp, synthetic construct
  misc_feature 1..417: note = source = /note="Description of Artificial Sequence: Synthetic coding sequence"
  source 1..417: mol_type = other DNA
atgacctggcggcaggccgtgctgctgagctgcttcagcgccgtggttcttttgagtatgcttagggagggcacttctgttagtgtgggcacaatgcagatggccggagaagaagcaagcgaagacgccaaacagaagatcttcatgcaggaaagcgatgctagcaactttctaaagcgccgcggaaaacggagcccgaaatcgagggacgaagtaaacgtagaaaatcggcagaagttgcgagttgatgaattgagaagggaatactatgaagagcaaaggaacgagtttgaaaatttcgtagaggagcagaacgacgagcaggaggaacgatcccgcgaggcagtggagcaatggcgccagtggcactatgacggactgcaccctagctacctgtacaatcggcatcacacatag

SEQ ID NO: 9224 - DNA, 729 bp, synthetic construct
  misc_feature 1..729: note = source = /note="Description of Artificial Sequence: Synthetic coding sequence"
  source 1..729: mol_type = other DNA
atggccctgaagaacaagttcagctgcctgtggatcctgggcctgtgtctggtcgccactaccagctctaagattcctagtatcaccgatccccactttatcgacaactgtattgaagcacacaacgaatggagaggcaaggtgaatccacctgcggcggatatgaagtatatgatttgggacaagggactcgcaaaaatggccaaagcctgggcaaatcagtgtaaattcgaacataacgactgcctcgacaaaagctacaaatgctacgctgcattcgaatatgtcggcgagaacatctggttggggggaataaaaagcttcacccccaggcatgctattactgcttggtataatgagacccaattctacgatttcgacagcctttcctgtagtcgagtatgcggccactatacgcagctagtgtgggctaactcattctacgtgggatgcgcggttgcaatgtgccccaatctaggtggggcttcaacagccatattcgtgtgcaactatggcccggcaggtaattttgctaacatgcctccttacgtgaggggagaatcatgctcactttgctctaaagaagagaaatgcgtaaagaacctctgcaggaccccgcagttgatcatcccaaaccaaaatccatttcttaagcctactgggagagcaccccaacagactgcctttaaccctttctccctgggctttctgttgcttaggattttctag

SEQ ID NO: 9225 - DNA, 813 bp, synthetic construct
  misc_feature 1..813: note = source = /note="Description of Artificial Sequence: Synthetic coding sequence"
  source 1..813: mol_type = other DNA
atgctgcggcagctgctgctggccgccctgtgcctggccggccccccggcacccgcgagagcatgtcagttgccgagcgagtggcgtcccctttctgagggctgccgtgctgagttggcggagaccatagtctacgctagagttctggcgctgcaccctgaagccccagggctgtataaccacctgccttggcagtatcatgctgggcaaggaggcttattctactctgccgaagtcgagatgttgtgcgaccaggcatggggatccatgctggaggtgcccgccggaagtaggctgaacctcactggcctggggtattttagctgtcatagccacaccgttgtccaggactactcctacttctttttccttcgcatggacgaaaattacaacctgctacctcacggcgtcaacttccaggacgctatcttccccgacactcaagagaatcgcagaatgttttctagtttgtttcaattcagcaactgcagtcaggggcaacagcttgctacctttagctcagactgggagattcaagaggacagtcgtcttatgtgttcatcagtgcagaaggccttattcgaggaagaggaccatgtgaagaagttacagcagaaggtggctacccttgaaaaaagaaacaggcagctgagggagcgggtcaaaaaagtgaagaggagtcttcgccaagcccgcaaaaagggacgccacctggagctcgccaatcaaaaattatccgagaaacttgctgcgggggccctgccgcacatcaacgcccggggtcctgtgcggcctccctacctgcgaggttag

SEQ ID NO: 9226 - DNA, 438 bp, synthetic construct
  misc_feature 1..438: note = source = /note="Description of Artificial Sequence: Synthetic coding sequence"
  source 1..438: mol_type = other DNA
atggacgagaactacaacctgctgccccacggcgtgaacttccaggacgccatctttcccgacactcaagagaaccggcgtatgttttcttctttattccaattctccaactgttcccaggggcaacaactggccacgttctcatccgactgggagatccaggaagatagtcgcctgatgtgctcctctgtgcaaaaagccctgttcgaggaagaagatcacgtcaagaagctgcaacagaaggtggcaacactagagaagagaaaccggcaactgcgagagcgggtaaagaaagtgaagcgctcactccggcaggcccgcaagaaaggacgccacctcgaacttgctaatcagaagctaagcgagaagctggctgccggcgccctcccacacattaatgcgcggggccccgtgcgaccgccatacttaaggggatag

SEQ ID NO: 9227 - DNA, 1830 bp, synthetic construct
  misc_feature 1..1830: note = source = /note="Description of Artificial Sequence: Synthetic coding sequence"
  source 1..1830: mol_type = other DNA
atggagctgggctgctggacccagctgggcctgaccttcctgcagctgctcttaatctcatctctccctcgggaatatacagttattaatgaggcatgccctggagctgaatggaacatcatgtgcagagagtgctgcgaatacgaccagattgaatgtgtgtgccctggaaagagagaagtggtaggatacaccatcccatgctgtcgtaacgaggaaaacgagtgtgattcatgcttaatccacccgggatgtactatatttgaaaattgtaaatcttgtagaaatgggtcgtggggaggaacccttgacgacttttatgtgaaaggcttctactgtgcagaatgtcgggccgggtggtacggaggggactgtatgccttgctcaagcagtccttgcttccacgacggcacttgtgtgctggataaagctggcagttataaatgcgcttgcctcgctgggtatacaggtcagaggtgtgagaatctactggaggaacggaactgctccgatcctgggggcccagtgaacggatatcagaagataaccggtggcccgggcctgattaatgggcgacacgcgaagatcggaactgtggtgtccttcttctgcaacaacagctatgtcctgagcgggaatgaaaagaggacctgtcagcagaatggagagtggtccgggaagcagccgatatgcatcaaagcttgcagagaaccaaaaatctccgatcttgtgcgtcggcgcgtgctgccgatgcaggttcaatccagagagacgcctctacatcagctctactcagctgcattctccaagcagaaattgcaatcagcccccaccaaaaagcccgctcttcccttcggcgacctgcctatgggctaccagcatctgcacacccagttgcagtacgaatgcatttcgccattttatcggcgcctggggagttccaggagaacctgtctccgcacaggcaagtggtccgggagggccccttcatgtatccccatttgcgggaaaattgagaatatcactgcacccaaaacacaaggtctccgctggccatggcaggctgccatttacaggcgcacaagtggcgttcacgatgggagtctacataagggcgcctggtttctcgtctgctctggcgccctggtgaacgaacggaccgtcgtcgtcgctgcacattgcgtgactgatctggggaaagtaaccatgattaaaaccgcagatctaaaggtagtgttgggtaaattctaccgagacgatgatcgagatgaaaagaccatccagtccttacagatcagcgccattatactccaccctaattacgatcccattttgttagacgccgacatcgccattctaaagctgctagataaggcccgaatcagtacacgcgtgcaacctatttgtctggccgccagccgggacctgagcacctctttccaagagtcacatataactgtggccggatggaacgtcctggctgatgtgcggagcccaggctttaagaacgatacccttagatcgggcgtggtaagtgtcgtggactctctcctgtgtgaagaacaacacgaggatcatggtataccagtgtcggtaacggacaatatgttctgcgcaagttgggaacccacagcccccagcgacatttgtacggcggaaaccggcgggattgccgctgtttcattccccggcagagcctctccagagccaaggtggcatctcatggggcttgtttcttggagttacgacaagacatgttcccacagactgtctaccgcttttactaaagttctgccctttaaagattggatcgaacgcaacatgaaatag

SEQ ID NO: 9228 - DNA, 2163 bp, synthetic construct
  misc_feature 1..2163: note = source = /note="Description of Artificial Sequence: Synthetic coding sequence"
  source 1..2163: mol_type = other DNA
atggagctgggctgctggacccagctgggcctgaccttcctgcagctcctcctcatctcttctctcccacgggaatatactgtgattaacgaagcctgtcccggggctgaatggaatatcatgtgccgcgagtgctgcgagtacgatcagatagagtgcgtctgccctggaaagcgggaggtggtgggatacacaatcccatgttgtaggaacgaggaaaacgagtgtgatagctgtctgatccatccaggatgcacaatcttcgagaactgcaagagttgtcgcaatggatcctggggaggaacacttgacgacttttacgtgaagggcttttattgtgctgagtgtcgagcaggctggtacgggggggattgtatgcggtgcgggcaagttctccgcgcaccaaaagggcaaatcctgctagagtcttatcccctcaatgcccattgtgagtggacaatccacgccaagcccggatttgtcatccagttgcgcttcgtaatgttgagccttgaatttgattatatgtgtcagtatgactatgtagaagtgcgtgatggggataaccgcgatggacagataataaaacgggtatgtggaaatgagcggcccgcaccaatccaaagtataggttcgtctttacacgttctctttcacagtgatggatccaagaattttgatggctttcatgccatctatgaggaaatcacggcatgctcgagctccccgtgttttcacgacggcacctgcgtgctcgataaggctggttcatacaagtgcgcatgcttagcgggctatactggccagcggtgcgaaaacctccttgaggagcgtaattgtagcgacccgggcggtccagtcaatggttaccagaaaataactggcggccctggtcttatcaatggtaggcacgctaagatcggtacagtagttagcttcttttgtaacaactcctacgtgttatccggcaacgaaaagcggacctgtcaacaaaatggcgaatggagtgggaaacagccaatttgcattaaagcctgtcgggagcccaagattagcgatctggtgcggcggcgcgtgcttccaatgcaggtgcagagcagagagacacctttgcaccagctctatagcgcagcattcagcaagcaaaaactgcaaagcgcccctacaaagaaaccagctttgccctttggagacctacccatgggttaccagcaccttcatacccagctccagtatgagtgtatctcaccattttacagacgcctggggtccagcaggaggacatgccttcgcaccggaaaatggagcggacgcgctcctagttgcattcccatttgtggcaaaattgagaatatcactgctccaaagactcaaggactgcgttggccatggcaggccgcaatctacagacgcacttcaggggttcatgacggctcactccacaagggtgcctggttccttgtctgttctggcgccctagttaacgagagaacagtcgtcgtggcagcccattgcgtcacagatctcggcaaagtcaccatgatcaaaacggcagacctgaaggtcgtgttgggcaaattttacagagatgacgaccgggacgaaaagactattcagtccctccagatctcagccatcatactgcaccctaattatgaccccatacttctcgatgctgatattgctattttaaaactgttagataaagcccgaattagcaccagagtccagcctatctgcctggcagcctcaagagatcttagcacttcgttccaggaaagccatataacagtcgctgggtggaatgtgctcgccgacgtccgatcacccggctttaaaaatgacacacttaggtctggggtcgtgtcagtcgttgacagcctgctttgtgaggaacagcacgaggaccatggaataccggtcagtgtgactgataatatgttctgtgcatcttgggaacctacagcaccatctgatatttgtacggccgagactggagggattgccgccgtttctttccccgggcgcgcttccccagagccacgctggcacctgatgggcttggtgagctggtcctacgataaaacgtgttctcatcgcctgtctacagctttcactaaagtgttgccgttcaaggactggatagaacgcaatatgaagtag

SEQ ID NO: 9229 - DNA, 1134 bp, synthetic construct
  misc_feature 1..1134: note = source = /note="Description of Artificial Sequence: Synthetic coding sequence"
  source 1..1134: mol_type = other DNA
atggaggccctgctgctgggcgccggcctgctgctgggcgcctacgtgttggtgtattataacctggtcaaggcgcctccttgcggggggatgggcaatcttcggggacgaacggccgtggtgaccggtgcaaactctgggatcggcaagatgactgccctggagctggcaaggcgcggagccagagtcgtgttggcctgccggtcgcaggaacgaggcgaagccgctgcctttgaccttcgccaggagtcaggaaataacgaagtaattttcatggccttggatttagcatcactagcgtctgtgcgggcattcgctacagcctttctaagcagcgagccccgtctggatattttgatccataacgcaggaatctcctcctgcggacggacccgcgaggctttcaacctcctgcttagagtaaatcatattgggccgtttcttctgacacaccttctactgccgtgtcttaaagcctgcgcgcccagcagggtggtggtggtagccagtgctgcgcactgccgggggaggctggatttcaaacgcctcgaccgacccgttgtcggctggagacaagagctacgggcatacgccgatactaagcttgccaacgtactatttgccagagagcttgcaaatcagctcgaggctactggcgtgacctgttacgctgcccaccctggccctgtgaattccgaattattcctcagacacgtacctggctggctgcggccactactgcggcccctcgcatggctggtgctccgggcacctagagggggcgcgcagacgcccttatactgcgccctacaggaggggatcgagcctctgtcgggcagatactttgcaaactgtcatgtggaggaggtaccccctgcggctagagacgacagggctgcccatagactatgggaggcatccaaacgcctggcaggactcgggcctggggaagatgcggaacctgacgaagacccacagtcggaagattcggaagctccaagctctctgagcaccccccatcccgaggagcccaccgtgtcacaaccctatccctctccccagagctcaccagacctgagtaagatgactcaccgcatccaggccaaagtcgagccagagattcaattatcctag

SEQ ID NO: 9230 - DNA, 381 bp, synthetic construct
  misc_feature 1..381: note = source = /note="Description of Artificial Sequence: Synthetic coding sequence"
  source 1..381: mol_type = other DNA
atgatcagcttccacgtgatcttcctgagcctgggccggggcaagctgttcctgcctgttaacttctgctttttaaaactcaaaaattctcaggtgcggattcctaaagatttcacctgtaacctccacgtgttatttcggaccgtgcaaggggaggacagaaatactatgtttagagggcattggtctatctacagcaggaactttcctcttgctgttgtgccagcctacgtgactgaagacggcaagaacacatcccatagagccagtggacagttctgcaatgcactgtctcagggtgagatccctagcagtctccaattggtgaatagctacgcactggaacctaggacagacatgccatgcaactttctgacatag

SEQ ID NO: 9231 - DNA, 876 bp, synthetic construct
  misc_feature 1..876: note = source = /note="Description of Artificial Sequence: Synthetic coding sequence"
  source 1..876: mol_type = other DNA
atggccgtgaccctgagcctgctgctgggcggccgggtgtgcgccgccgtgacgcgctgtggatttgcaactagaggggttgccggtccaggacctattggcagagagccggatccagatagtgattgggagcctgaggaacgggagctgcaagaggtggaatctaccttgaaaagacagaagcaggctattagattccagaagatccgcaggcagatggaggccccgggggcacccccccgcaccctgacctgggaagctatggagcaaatccgttatctgcatgaagagttcccagaaagttggtcagtgcccaggctggcagaaggattcgatgtgtctactgatgttataaggagggtattaaaaagcaaattcctccccactctggaacaaaagctgaagcaggatcagaaagtcttaaaaaaggcaggcctggcccatagccttcagcatctgcgcgggagtgggaatacaagcaagttactgcctgccgggcattcagtcagtgggtcactgctgatgcccggacacgaggctagttctaaggatccgaatcactctactgccttgaaagtgatcgagagtgatacacaccggactaacacgccaagaagaaggaaggggcggaataaggagattcaggatcttgaagaaagcttcgttccagtcgcagctcccctggggcatccaagagagctgcagaaatattctagcgacagcgaatcacccaggggcaccgggtccggagccttgccaagcggccagaagttggaggagcttaaagcagaagaaccggacaacttcagtagcaaagtcgtgcagagaggcagagagttcttcgactctaacggtaattttctgtacagaatctag

SEQ ID NO: 9232 - DNA, 2541 bp, synthetic construct
  misc_feature 1..2541: note = source = /note="Description of Artificial Sequence: Synthetic coding sequence"
  source 1..2541: mol_type = other DNA
atgttcaagtgctggagcgtggtgctggtgctgggcttcatcttcttggagtctgagggtaggcctacaaaagagggcggctacggtctaaaatcttaccagcccctcatgcggctcaggcacaaagagaagaaccaggaatccagcagagtaaaaggttttatgatccaagatgggccgttcggctcttgcgagaacaaatattgtggccttgggcgccactgcgtgacaagtagggagacggggcaagcagagtgcgcctgcatggacctctgcaagcgccattataagcccgtctgtggctccgacggcgagttttacgaaaaccactgcgaggtgcatagggccgcttgccttaagaagcagaaaattacaattgtccacaatgaagactgtttttttaagggagataagtgcaagaccaccgagtattccaaaatgaagaatatgcttctggacctccagaaccaaaagtacatcatgcaagaaaacgagaatccaaacggtgatgacatcagccggaagaaactgctggtcgatcagatgtttaaatacttcgacgcggacagcaacggtctggtggacataaacgagctcacccaggtcataaagcaggaagagctggggaaggatctctttgactgtactttgtatgtgctgcttaagtatgatgattttaacgccgataagcatctggccctcgaggagttttatagagctttccaagtcattcagcttagcctccctgaggatcagaaacttagcattacagctgccaccgtgggacagtctgccgtgctgtcctgcgctatccaaggaacactccgacctcctattatttggaagaggaacaatatcatcctgaataatctcgatctcgaagacattaatgattttggcgacgatggctccctctacatcactaaggttacaacgactcatgtaggcaactatacatgctacgctgacggctacgaacaggtgtatcagacgcatatattccaggttaacgtccctccagtaatacgggtgtaccctgaatcgcaggctagggaacctggggtcaccgctagcttaagatgccacgccgaggggatacccaagccccagcttggatggctaaagaatggaatcgacatcacgccaaagctgtcaaagcagctcactctccaggctaatggtagtgaggtacatatctctaacgtgcgatatgaggatactggcgcttacacctgcatcgcaaagaatgaggcaggagtggatgaggacatcagttcactttttgtcgaggattcagcccgcaaaaccttagcgaatattctctggcgggaagagggactcgggatagggaatatgttctacgttttctacgaagatggcattaaggtcatccagccgatcgagtgtgaattccagaggcatataaagccatctgaaaagttgctcggattccaggatgaagtgtgccccaaggcggaaggtgacgaggtgcagcggtgtgtgtgggctagcgccgtgaacgtgaaggataagtttatttacgtggcccagcccacactggaccgtgtgctcatcgtcgatgttcagtctcagaaagtcgtacaggcagtaagcactgatccagtgccagtgaagttacactacgacaagagccatgaccaggtatgggtcttgtcctggggaacgctggagaaaacctcaccaacactccaagtcattactcttgcaagcggaaatgtaccgcatcataccattcacacgcagcccgtgggtaagcagttcgacagggtcgatgattttttcattcctacaacaaccctcattataacccacatgagattcggattcatcctgcacaaggatgaagctgctctgcagaagatcgatctggaaactatgagttacatcaagaccatcaatcttaaagattacaagtgcgtgccccaatccttggcctatactcacctcgggggctattatttcattggctgcaagcctgactctaccggtgccgtgtcacctcaggtcatggtcgacggggtgacagacagcgtcatcggattcaatagcgatgttaccggcaccccgtatgtgtctcctgacggtcactacctggtgtcgataaatgacgtcaagggcctggtgcgggttcagtacattactatccgcggcgagatacaggaagcttttgatatatatactaatctgcacatctccgacttagcgtttcagccaagcttcacggaagcccaccagtacaatatttacggaagctcatctacacagacggatgtactgtttgtggagctcagttctgggaaggttaagatgattaagtctctaaaggagccactgaaggcagaggaatggccctggaaccgcaagaacagacagattcaggattccgggttgtttggccagtatctcatgaccccatctaaggactctctcttcattttagatgggcgccttaataagctcaactgcgagatcacggaggtcgagaagggaaacacagtgatctgggttggggatgcttag

SEQ ID NO: 9233 - DNA, 291 bp, synthetic construct
  misc_feature 1..291: note = source = /note="Description of Artificial Sequence: Synthetic coding sequence"
  source 1..291: mol_type = other DNA
atgcgggtgaccagcgccacctgcgccctgctgctggccctgatctgttccgtccagctgggagatgcatgcctggacatcgataaacttttagccaacgtggttttcgacgtgtcccaggatttgctaaaagaagaacttgctcgttataacccctccccgctcactgaggagagtttcctcaatgtgcagcagtgcttcgctaatgtctcggtgacagaaagatttgcccactcagtggtgatcaagaagatactgcagtcaaatgattgcattgaggcagcattctag

SEQ ID NO: 9234 - DNA, 1971 bp, synthetic construct
  misc_feature 1..1971: note = source = /note="Description of Artificial Sequence: Synthetic coding sequence"
  source 1..1971: mol_type = other DNA
atgcggaccgtggtgctgaccatgaaggccagcgtgatcgagatgttcttggtgcttctcgtcacaggtgttcacagcaacaaggagactgcgaagaaaatcaagcggccgaagttcactgttccacagataaactgcgatgtaaaggcgggtaagatcatcgatcctgagttcattgtcaagtgtccagctgggtgccaggatccaaagtaccacgtgtacggaactgatgtctatgcctcctactcatcagtgtgcggggccgcagtccatagcggcgtgttggataacagcgggggcaaaatcctggtgcgaaaggttgcaggtcaaagcggctacaagggctcgtacagtaatggggtgcaaagcctgtccctcccaaggtggagagaaagctttatcgtgctggagtccaagccaaaaaagggtgtaacctatccctctgctctgacttattcttcttcgaagagtcccgcagcgcaggctggggagaccacaaaggcctaccagcggcctcctattcccgggacaaccgcccagccagtgactctcatgcagttgctggccgtgactgtcgctgtggctacccctaccacgctgccaagaccaagtccctcagcagcctcaaccaccagtattccacgcccccaatctgtaggtcaccgctctcaggagatggacctgtggagtacagcaacttacacttcttctcaaaaccgcccacgcgccgatcctggccttgtccccaaggaagaactgagcacacagagcttagagccggtgtccctgggcgatcccaactgcaaaattgatctgagctttttgatcgatggctcgacctcgatcgggaaaagacggttccgcattcagaagcagttgctggcagacgtggcccaggctctggacatcgggccagcaggtcccctgatgggcgtcgtacagtacggggacaacccagcgacccactttaatctcaagacacacactaattctcgggatctgaagacagccatcgaaaagattacacagaggggcgggctctccaacgtgggaagggctatctctttcgtcaccaagaatttcttttctaaagctaatggcaatagaagtggggctcccaacgtggtggtggtgatggtcgacgggtggcctactgacaaggtggaggaggccagtcggctcgcgagggagagtggcataaacatattcttcataacgattgaaggtgctgctgagaacgaaaagcagtacgtggtggaaccaaattttgctaacaaggccgtgtgtaggacaaacggattttacagtttgcacgtgcaatcatggttcggcctgcacaaaactctgcagcccctggtcaagcgtgtctgcgacaccgacagactcgcctgcagcaaaacctgcttaaatagcgccgatattggctttgtgattgacgggtccagttccgttgggactggaaactttcggaccgtccttcagttcgtcacaaatttaactaaggagtttgagatcagcgataccgacactcgtattggcgctgtgcagtatacatatgagcagagactggagtttggattcgacaagtatagcagtaagcccgacatcttaaacgccattaaacgtgtcggctattggtcaggcggcacttcgaccggcgcagccatcaatttcgccctagagcaactgttcaagaagagtaaacctaacaagcgaaagctgatgattctaattacagacggaagaagctatgatgacgtgaggatacccgcgatggccgctcatctgaagggagtgattacctacgccataggagtcgcctgggcagcccaggaggaacttgaagtgatcgcaacccaccccgcaagggaccacagtttcttcgtggacgagttcgacaacctgcatcagtacgtgccaagaataatccagaatatttgcactgagtttaattctcagccaagaaactag

SEQ ID NO: 9235 - DNA, 2082 bp, synthetic construct
  misc_feature 1..2082: note = source = /note="Description of Artificial Sequence: Synthetic coding sequence"
  source 1..2082: mol_type = other DNA
atgcggaccgtggtgctgaccatgaaggccagcgtgatcgagatgtttctcgtgttactggtaactggagttcactcaaataaggaaaccgcaaaaaagatcaaacggccaaagtttacagtgcctcaaatcaattgtgatgtcaaggcaggaaaaattattgatcccgagttcattgtgaagtgtcctgcaggatgccaggatcccaaatatcatgtctatggcaccgacgtgtatgcatcctactcatctgtctgcggagccgccgtgcatagcggagtgctggacaactcaggcgggaagatcttagtgaggaaagtcgcaggccagtctggatataagggctcatattcgaacggagttcagtccctcagcctgcccagatggcgcgaaagcttcattgtgctcgaaagcaaaccgaagaaaggagtaacatacccaagcgcacttacatacagcagcagcaaatcacccgcggcacaggctggggaaacgacaaaggcctaccagagaccaccgatcccaggtactaccgcccagcccgtgactctgatgcagttgctagcagttacggtcgccgtggccacaccaaccaccctgccccgtccctcccctagcgctgcaagcacaacctccatccctcgcccccagagcgtggggcacaggagccaggagatggatctgtggtcaacagccacttacacctcttcacaaaaccgcccgcgcgccgaccccggaatacaaaggcaggatccaagcggggctgctttccagaagcccgtaggagctgacgtaagtctcggggaaatggatagctggaagcccgggtcagtgctgttggatgagggactcgttccaaaggaggaactcagcacccagtcactggagccagtttccttaggagatccaaattgtaaaattgatctctccttcctgatcgatggatctactagcattggtaagaggagattccgcattcagaaacagctcctggccgacgtggcacaggctctcgatatcggaccagctggacctctcatgggggttgtgcagtacggagataaccccgccacacattttaacttgaaaacacacactaactccagggatctgaaaaccgctatcgagaaaatcactcagcgcggaggccttagcaatgtgggtcgagctataagctttgtgactaagaatttcttctctaaagccaatggaaacagaagtggagcacctaatgtagtcgttgtgatggttgacgggtggccaactgataaggtagaagaggccagcaggctggctcgcgagtcaggaataaacatcttcttcatcaccatcgaaggcgctgctgagaacgagaaacagtacgtcgtcgagccaaactttgcaaacaaggcagtttgcagaaccaacggattctactccctgcatgttcagagttggttcggcttgcacaagactttacaacctttggtgaagcgtgtctgcgatactgatcggctggcctgcagcaaaacgtgtctgaacagtgccgacataggcttcgttattgatggcagctcctcagtgggcactgggaattttaggacagttttgcagttcgttacaaacctcactaaagagttcgagatctctgacaccgatactcgaatcggagccgttcagtatacttatgaacagaggctggagttcggatttgacaaatattcctcaaaaccagacatccttaatgcaatcaaaagagtaggctactggtccgggggcaccagcacaggagcagccattaatttcgctcttgaacaactgttcaaaaaatcaaaaccgaataagagaaagctgatgattctaatcactgacgggcgtagctacgatgacgtgagaattccagcgatggccgcgcacttgaaaggcgtgatcacttatgccattggggtggcctgggccgcacaggaggagttggaagtgatagctacccaccctgctagggatcacagcttttttgtggacgagtttgataacctccaccagtatgtgcccaggatcattcaaaatatctgtacagaattcaacagtcaaccccggaactag

SEQ ID NO: 9236 - DNA, 555 bp, synthetic construct
  misc_feature 1..555: note = source = /note="Description of Artificial Sequence: Synthetic coding sequence"
  source 1..555: mol_type = other DNA
atgttctgcctgctgcacctgtgcttctacctggccaacttcgccagcagtatcaagaggactcatgcagtgaatggctgctgtgggctgcagatgattgcactgtgggcgcaaagttctggcaatgctgatgctcgtgtcgaagagattttagccggcgaagaaagacgactggcggcgctgttgggctcccaggggatgcggttttgggtctgcctggcggcctgccgagcaatgtgggggttagctgctcggcgtggcagagccgaagacagttcttcttcgcctgtggacgcttccaagttcccttggcgaggaggacagcacaggacaaccatgatgccatgccttttacgcgtgggagttttccgcccttgccacgtgaggccgaccggggatccctcttgcgatgttcagccacctcggctggggttttcacgggtgcccgatactcaggtggcattttacggcagcgggcactgggacccaactccattctctgtccacagctgctttttcaacttccaggtccgcaagatcatctttctgctgtag

SEQ ID NO: 9237 - DNA, 864 bp, synthetic construct
  misc_feature 1..864: note = source = /note="Description of Artificial Sequence: Synthetic coding sequence"
  source 1..864: mol_type = other DNA
atgaccagcgccgcccactactaccccaagctgatgagcatcatgggcaatgtgctgcgctttctgcctgcttttgtgcgcatgaaacagcttattgaggagggctacgtgggggagccacttgtgtgcgaggtgcaggtccatggcggcagcctcctggggaagaagtacaattggtcatgcgatgatctgatgggcggaggaggcctgcatagcgtggggacgtatataattgacctactgacgttcctcacgggccagaaggcagtgaaagttcatggtctccttaagacgtttgttaaacagactgaccacattaaggggatcaggcagattaccagtgacgacttttgtacgttccaaatggtgctggagggcggcgtctgttgtaccgtgacgctgaacttcaatgtacctggggaatttaagcaggacgtgactgtcgtgggctcggccggtcgcctcctggccgtcggcacagacctgtacgggcagcgcaacagcgcacctgaacaggagctgctagtgcaggacgcgactccagtgtctaatagcctcttacctgagaaagcgttctccgatatccctagcccctatctgcggggaaccattaaaatgatgcaagccgtcaggcaggcgtttcaggaccaggatgacaggcgcacctgggacggaaggccactgacaatggcggccactttcgacgactgtctgtatgctctgtgcgttgttgatacaatcaaacggagctctcagacaggcgagtggcagaatatcgccattatgaccgaggaacctgaactgtctccagcctatctgatatcggaggcgatgcggagaagtagaatgagcctatactgttag

SEQ ID NO: 9238 - DNA, 1173 bp, synthetic construct
  misc_feature 1..1173: note = source = /note="Description of Artificial Sequence: Synthetic coding sequence"
  source 1..1173: mol_type = other DNA
atgctgcccggcgtgggcgtgttcggcaccagcctgaccgcccgggttatcatcccattgctgaaggatgaggggtttgccgtcaaggccctgtggggtcgcacacaagaagaagccgaggagctggctaaggagatgtccgtgcctttctacacatcccggattgacgaggtgctgctccaccaggacgtggatctggtatgcatcaacctgcccccgccattgacgagacagatcgccgttaagactctgggaattggcaaaaatgttatctgcgaccgaacagccaccccattggacgcctttaggatgacctccgcggcacactactatcccaagctaatgtctatcatgggaaatgtgctgcggttcttgcccgcttttgtgcgaatgaagcaattgattgaagagggctacgtgggcgaacccctagtgtgtgaggtacaggtacacggaggtagtctgttaggcaaaaagtacaattggagctgcgatgatctgatgggaggaggaggcctgcactccgtcggaacatacattatcgatttactgacttttctcaccggacaaaaagcagttaaggtgcacggtttgttgaaaacatttgtgaaacagactgaccacatcaagggcattcggcagatcacttcggatgatttctgcaccttccaaatggtactggaaggcggtgtctgttgcacagtgacactgaatttcaacgtccccggggaattcaaacaagatgttaccgtggtcgggtctgcagggcgcctgctggcggtgggtactgacctctacgggcagcggaactccgcgccagagcaggaattgctggttcaggatgctacccctgtttcaaactcgttgctgccggaaaaggccttcagtgatatcccgtccccatacctgcgagggactatcaaaatgatgcaggctgtacgccaagcttttcaggaccaggatgataggcgtacctgggatgggagacccctgactatggccgcaacctttgacgactgcctgtatgccctttgtgttgtcgataccattaagagatcttctcagaccggagagtggcaaaacattgccattatgacggaagaacccgagctgagccccgcctacttaatctccgaggccatgcgccgatctagaatgtcattgtattgctag

SEQ ID NO: 9239 - DNA, 5718 bp, synthetic construct
  misc_feature 1..5718: note = source = /note="Description of Artificial Sequence: Synthetic coding sequence"
  source 1..5718: mol_type = other DNA
atgcagagccggctgctgctgctgggcgcccccggcggccacggcggcccagcgtctcgaagaatgagactcctactgagacaggtagtgcagcgcagaccagggggtgaccggcaaagaccagaagtgcgactcctccatgctggaagtggagctgacacgggcgacacagtcaatattggggacgtgagctacaagctaaaaatacccaagaatccggagctcgttccacagaattacatttcagactcgctggcacagtcagtggtacagcacttgcgatggataatgcagaaagaccttctggggcaagacgtctttcttatagggccacccggtccgttaagaagatctatcgccatgcaatacctcgagctaactaaaagggaagtggagtatatcgctctgagccgggataccaccgagacggacctgaagcagcggcgggagatacgggccggcacggccttttatatcgatcaatgcgcggtgcgtgccgccaccgaaggccgcacgttgatcctggaaggattggagaaagctgaaagaaatgtcctgcccgtacttaacaatctgctggagaatagggaaatgcagctcgaggacgggaggttcctgatgagcgccgagaggtacgataagcttcttcgagatcacaccaaaaaagagttggatagttggaagattgtgcgtgtgtcggaaaactttcgcgtgatagcgttgggcctaccagttcctaggtattcaggtaatccactcgaccccccactaagaagccgatttcaggcccgagacatttattatctccccttcaaggaccagctcaaactgttgtactcaattggcgccaacgtgtccgcggagaaagtgagccagcttctgtcattcgcaacaaccctttgctcacaagaatctagtacgctaggattaccggatttcccattggattcactcgcagccgcagtgcaaattttagactcatttcccatgatgccaattaagcacgccatccagtggctgtacccctactccatcttgcttgggcatgaaggaaagatggcggtggagggagtattaaagcggtttgaactgcaggactcagggtccagcctgctccctaaggagattgtgaaggtggaaaagatgatggaaaatcacgtgagtcaggcttccgtgacgattcgcatcgcagacaaagaggttactatcaaagttccggcaggcaccagattactctctcagccctgcgccagtgacagattcatacagacccttagtcataagcaacttcaggccgaaatgatgcagtcacacatggtgaaggacatctgtttaattggaggaaagggctgtggcaaaaccgtgattgctaagaattttgccgataccttaggatacaacattgagcctataatgctgtatcaagacatgacagcccgtgatctcctgcaacaaaggtacaccctaccaaacggggacaccgcgtggcgctcatctccacttgtaaacgctgcgttggagggaaagctggtccttctggacggtatccatcgggttaacgccggaacactggcggtgctccaacgcctaattcacgacagggagctgagcctgtacgatggttcccgacttctccgagaagaccggtatatgcgcttgaaagaggagttgcaactgagtgatgaacagctccagaaaagatctatttttccaatccatccatcgtttaggattatcgctctggccgagccccccgtgattgggtccactgcgcaccagtggctaggcccagaatttcttacgatgttcttctttcactacatgaaacccttagtaaaatcagaagagatccaggtcattaaagagaaggtacctaacgtgcctcaggaagctttggacaaattactgtctttcactcacaagctgagggagacccaggatcctaccgcccagtccctggctgctagtttgtcaacccgccagctgttgagaatctcacgccgcctcagtcagtaccctaatgagaatttgcactctgccgtcacaaaagcatgtctctcgcggttccttccatcgctggcccggagcgccctcgagaaaaacctggccgatgccactattgagattaacaccgatgataacctggagcctgagctgaaggactataaatgcgaggttacgtctggtaccctcaggattggagcggtgagcgcaccgatttataacgcacacgaaaaaatgaaggtcccagacgttctgttctacgataatatccaacatgttatcgtcatggaggatatgctgaaggattttttgctgggggagcacctgctactggtgggcaatcagggtgtgggtaagaataagattgttgatcgatttctgcacttactaaaccggcctagagagtacatccagctccacagagataccacagtgcagacgctcactttgcagccctcagttaaggacggacttattgtatatgaagacagcccactggtgaaggccgtgaagctcggacacattctggtagtggacgaggccgataaagcccctaccaatgtgacctgcatcctaaaaactcttgtcgaaaatggcgaaatgatcctagctgatggtagaagaatagtcgccaattccgccaatgtgaatgggagggaaaatgtagtggttatccatcccgattttcgcatgatagttctggcaaacaggcctggattccctttcttgggcaacgacttctttggcacactgggggacattttttcttgtcacgctgtggacaacccgaaacctcattccgagctcgaaatgctgcgacagtatggaccaaacgtgcccgaacctatactgcaaaagctggtagcagcatttggagaactccgaagcttggctgatcaggggattatcaactatccatactccacacgagaagtcgttaacatcgtaaaacacctacagaagtttccaaccgagggcctcagcagtgtcgtgcggaatgtcttcgatttcgattcatataacaacgatatgagggagatcttaattaatacactacataagtacggcatcccaatcggagctaagccgacctctgtgcaacttgccaaggagctcacactgcccgagcagaccttcatgggttattggaccattggacaggctagaagcgggatgcagaaactgctttgtccggtggagacccaccacattgacattaaaggacccgcactgatcaacatccaggagtaccccatagagagacacgaagaaaggtcgctaaatttcaccgaggaatgtgccagctggcggatccccctcgacgagatcaacatcatctgcgacatcgccacctcccacgaaaacgaacagaacacgctgtatgtggtcacctgcaatcctgccagcttgtactttatgaatatgactggtaagtcagggttttttgtcgattttttcgatattttccccagaaccgcaaatggcgtctggcatccatttgtgacggtggcccctctgggatcccctttaaaggggcaagtagttttgcacgagcagcagtcgaacgtgattctgctacttgatacgacaggtagggctttgcataggctcattcttccttcagagaagtttacttcaaagaagcccttttggtggaataaggaggaagctgagacttataagatgtgtaaagagttcagccacaagaattggctcgtcttctataaggaaaaaggcaattcactgactgttcttgatgtgctcgaaggaagaacccacactatctctctcccaatcaatttaaaaaccgtcttcttggtggccgaagataagtggcttctggttgagagcaaaaccaatcagaagtacctgctgacaaaaccggcacatatcgaatctgagggatctggcgtgtgtcagttgtacgtgctgaaggaggaaccaccatccacaggatttggcgtgacccaggaaaccgagttttccatccctcacaagatttccagcgaccagcttagctcggaacacctatcctctgctgtggaacagaagatcgccagccctaatcggatccttagcgatgagaagaattacgcaactatcgtcgtgggattccctgatctcatgagcccatcagaagtctactcctggaaacgtccaagctcactgcataaaaggagcggcactgatacatctttctatcggggaaagaaaaagaggggcactccaaagcaatcgaattgtgtcaccctgctcgacaccaatcaggtggtacgtattctcccgcccggtgaggtcccactgaaagatatttatccaaaggatgtgacacctccacagaccagcggatacattgaggtcactgacttacaaagcaaaaagcttagatacatccccatccccaggtccgaatcactatccccttatacaacatggctgtctaccatttcagacaccgacgcactgttggccgaatgggataaaagtggggttgttacagtggatatgggcggacacataagactgtgggaaactggactcgaacggctccagcggtcactgatggagtggcggaacatgatcggacaggatgatcggaacatgcagattaccattaacagggacagcggggaggatgtcagttctccaaaacatggaaaggaagatcctgataatatgccgcatgtaggcggtaatacctgggccggaggaacaggaggccgggacactgccggtctgggaggaaagggaggaccttaccgacttgatgcgggacacaccgtgtatcaggtgtctcaggctgaaaaggacgctgtccccgaggaggtcaagagggctgcaagggaaatgggacagcgcgccttccagcagcgcctgaaggaaattcagatgtccgaatacgacgccgcaacctacgagcggttttccggagcagtccgcaggcaggtgcattcgctccggataatactggacaatctccaggctaaggggaaagagcgccagtggctgcgccaccaggctacaggtgagttggatgacgctaagatcattgacgggctcaccggcgaaaaggccatctacaaaagacggggtgagcttgagccccaactagggtcgccgcaacagaaacccaagagactgcggcttgtggtcgacgtttcagggagtatgtataggtttaaccgcatggacggacgactcgaaagaacgatggaggccgtctgcatggttatggaggcctttgagaactatgaagaaaagtttcagtatgatattgtgggtcactccggcgatggctataacattgggctggtacctatgaacaaaatcccaaaggataacaagcaacggctcgaaatcttaaagactatgcacgctcactcacagttctgtatgagtggggatcacaccctcgagggtacagagcatgccatcaaagagatcgtcaaggaggaggccgacgagtactttgtcatcgtcctgagtgatgctaacttgtctcgctatgggatacaccctgctaaattcgcccagatcttaactcgagacccccaagtcaacgccttcgccatcttcattggctctctgggggatcaggccacacgcctgcaaagaacacttccagcgggcagatcatttgtcgccatggacactaaggatatcccccagatcctccagcagatcttcacgagcacaatgttgagctctgtttag

SEQ ID NO: 9240 - DNA, 561 bp, synthetic construct
  misc_feature 1..561: note = source = /note="Description of Artificial Sequence: Synthetic coding sequence"
  source 1..561: mol_type = other DNA
atggaggccctgcccctgctggccgccaccacccccgaccacggccgccacaggagattacttctcctgcccttactgctcttcctgttgcctgcaggcgcagtgcaggggtgggagactgaggagcgccctcgaacccgggaggaggaatgccacttctacgccgggggccaagtgtatccaggggaagccagtagggtgtctgtggctgaccactctctccacttgtccaaggctaagatctcaaagcctgccccttactgggagggcactgctgtgattgatggcgaatttaaagagctgaagttaaccgattaccgagggaagtacctggtcttctttttttatcccctggactttacatttgtttgcccaactgaaattatcgccttcggtgacaggctggaagagttccgctccataaatacagaggtggtggcgtgttcggtagactctcagttcacccacctggcatggtccgtttcctacacatacataaggcgcaagaagcgtatggacctcctgctgaagcacgggcagattacactcgatatgatctag

SEQ ID NO: 9241 - DNA, 816 bp, synthetic construct
  misc_feature 1..816: note = source = /note="Description of Artificial Sequence: Synthetic coding sequence"
  source 1..816: mol_type = other DNA
atggaggccctgcccctgctggccgccaccacccccgaccacggcagacatcgtcggctcctgctactgccgctactgttatttctgttaccagcgggagctgtccaagggtgggagaccgaggaacggcctagaacaagggaggaggagtgtcatttttatgcaggaggacaggtgtaccccggcgaggcctcacgagtgtcagtcgccgaccattctctgcatctatcaaaagcgaagatctctaaacccgcgccctattgggagggtacagctgttattgacggggaatttaaagagctgaaactcactgactatcgaggcaagtatctggtgttttttttttacccccttgattttaccttcgtctgtcccacagagatcatcgctttcggggaccgtctcgaggagttcaggtccataaacaccgaagtggtggcttgctccgtcgattcgcaattcactcacctcgcctggatcaacacccctcggagacagggcggtctgggaccgatccgcattcctttgctgagcgacttgacgcaccagatcagcaaggattacggagtttaccttgaggatagcggacacactttgcgcggattgttcatcatcgacgacaaaggcattctgagacagattaccttaaacgaccttcccgtcggtcggtcagtggacgagaccctgcggcttgttcaggctttccagtatacagacaagcacggcgaagtgtgccctgcggggtggaagcctggatctgagacaattatccctgacccagctgggaaactgaaatactttgataagctgaactag

SEQ ID NO: 9242 - DNA, 558 bp, synthetic construct
  misc_feature 1..558: note = source = /note="Description of Artificial Sequence: Synthetic coding sequence"
  source 1..558: mol_type = other DNA
atggaccaccggagccggctgcggggcaccggcctgaaccggatccctggcacacagtctagggccccaagagtgcctctgccattccacgtgcagcaggaggcccgcgaaggcgaggattgggaaagagagccaccacgccaacggccgcctatttatgagcccccagagagcgaggaactccctgataacgttatggtctcgaagccagccccgtactgggagggaaccgcagtgattgacggcgaatttaaagagctcaagctgacagactacagggggaagtatctggtcttttttttttatccacttgacttcactttcgtctgccccactgaaatcatagccttcggcgaccggctggaagagttccgctctatcaacacagaggtggtcgcatgctccgtcgactcccagttcacacacctggcttggattaacactcccagaagacagggcggcctcggaccaatccggatccctctgttgtctgacctgacacatcaaatttctaaggactacggtgtatacctcgaggactctggccacacactttag

SEQ ID NO: 9243 - DNA, 843 bp, synthetic construct
  misc_feature 1..843: note = source = /note="Description of Artificial Sequence: Synthetic coding sequence"
  source 1..843: mol_type = other DNA
atggcccggttctgggtgtgcgtggccggcgccggcttcttcctggcttttctggtgcttcacagcagattctgtggttctcccgtgctgcggaacttcacgtttgcagtgagctggcggaccgaaaagattctctaccggctcgacgtgggctggccaaagcacccagaatatttcacgggtacgaccttctgtgtggctgtggactctcttaatgggctggtgtacataggccaacggggcgacaatataccaaagattctggtgttcaccgaagacggctattttcttagagcatggaattatacagttgatacccctcatggaatctttgccgctagcaccttgtatgagcagagtgtctggattactgacgtggggagtgatttcatgatcttgtggctgcatggcgaaaatggcaccggaccagcaaaattcaacataccccattccgttacccttgattcagctggaagggtgtgggtggctgataggggcaacaaacgcatacaagtctttgataaagatacaggagagtggttaggggcttggaataattgctttacagaagaagggccctccagtgttcggtttacccccgacggcaagtacttaatcgtggcgcagctgaacctgagtcgattaagtgtggtggcggcacctccagtgggatccataggagaatgtagcgtaataagtactattcagctggccgatcaagtgctgccacacttacttgaagtggacaggaagacgggcgccgtctacgtagcagaaatcggagccaagcaggtacagaagtacgtccctctgaattcttatgtgccctcgtttggatcttag

SEQ ID NO: 9244 - DNA, 1044 bp, synthetic construct
  misc_feature 1..1044: note = source = /note="Description of Artificial Sequence: Synthetic coding sequence"
  source 1..1044: mol_type = other DNA
atggcccggttctgggtgtgcgtggccggcgccggcttcttcctggccttcctggtactccatagccgcttctgtggatcccctgtgctgcggaacttcacattcgctgtctcctggagaaccgaaaaaatcctttacaggttggacgtcggctggcctaaacacccagaatacttcactggcactaccttctgtgtggcagtggactcgctgaatgggttggtatatatcggacagagaggggacaacatacccaagatccttgtgtttacagaagacggctattttcttcgagcgtggaactatacagttgatacgccccacgggatctttgcagcgagcaccttatacgagcagtccgtgtggatcaccgatgtggggtccggattcttcgggcatacagtgaagaagtattccagcttcggggatctcgtgcaagtgctcggtacaccgggcaaaaagggtaccagcctaaatccgcttcaattcgataacccagctgaactgtatgttgaggacactggagacatctatattgtagatggtgacggagggctgaacaatcgcctgatcaagctgtctcaagactttatgatactgtggctgcacggcgagaatggcacgggtccggccaaattcaacattcctcactcagttacgttggactcagccggcagagtgtgggtggcagaccgcggcaacaagcggatacaggtctttgacaaggacacaggagaatggctcggggcgtggaacaactgttttacagaagaaggcccttcctctgtgcgttttactcccgacggtaagtatctgattgtagcacagctgaatctctccagattgagtgtggtcgcagcccctcccgttggctctatcggagagtgtagtgtgatttctacaattcagctggctgatcaagtgctgccacacctcctggaggtcgatcggaagaccggagccgtctacgtggcagaaattggtgcgaagcaggtacaaaagtacgtgccgctgaactcctatgtcccgagctttggctcttag

SEQ ID NO: 9245 - DNA, 1707 bp, synthetic construct
  misc_feature 1..1707: note = source = /note="Description of Artificial Sequence: Synthetic coding sequence"
  source 1..1707: mol_type = other DNA
atggtgctgctgcactggtgcctgctgtggctgctgttccccctgagctctagaacacaaaaattacctacccgcgatgaagagctgtttcagatgcagattagagacaaggcatttttccacgacagcagtgtcatcccagatggggccgagatctcgagctacctgtttcgggatacgcctaagcgttacttcttcgtggtcgaggaggacaatacaccactatccgtaaccgtgacaccatgtgacgcccctctggagtggaaattgtctctgcaggagttgcccgaggacagatccggagaagggagtggtgatcttgagcccctcgaacagcagaagcagcagatcattaacgaggaggggaccgagttgttctcctacaaaggtaacgatgtagagtatttcatctcctcatcctcaccttctggcctttaccaactggatttgctttcaacagagaaggatacgcactttaaagtatacgcaacaaccacacctgagtctgatcaaccatacccggagctcccttacgatccaagggtggatgttactagcctaggccggactactgtgactctggcttggaagcctagcccgaccgctagcttgctcaagcagccaatccagtactgcgtggtcatcaacaaggagcataacttcaagtccctatgcgccgtggaagccaaactatccgcagatgacgcttttatgatggcccctaagccaggcctggacttttctcctttcgatttcgcccattttggatttcccagcgacaactccggaaaagagcgttccttccaagcgaaaccgtcccccaagctgggcagacacgtttattcccggcccaaggtggacatccagaagatctgcattggaaataaaaacatttttaccgttagcgaccttaaaccagacacccaatattatttcgacgtgttcgtggtcaatatcaattccaatatgtctactgcttacgtcggaaccttcgctagaacaaaggaggaggcgaaacagaagacggttgagctgaaagacggaaagatcaccgatgtctttgtcaagcgtaaaggggcaaaatttctgcgattcgcacccgtgtcatcgcatcagaaagtcaccttctttatacactcatgcttggacgctgttcagatccaggtgagaagagatggcaaattgttgctttcccagaatgtggagggaatccaacagtttcaactccggggcaaaccaaaggccaagtacctggtgcgcttgaagggcaataagaaaggggcatcgatgttgaagattttggccacaacccgtcctaccaaacaaagcttcccctccttaccagaagatactcgcataaaagctttcgacaaacttcgaacatgcagttccgctaccgttgcatggcttggaactcaagaacggaataagttctgtatctacaaaaaggaggtggatgataattataacgaagaccagaagaaacgtgagcagaatcaatgtcttggccctgacattaggaagaaaagcgagaaggtattgtgtaaatactttcattcccaaaatttacagaaggccgtgactacagagaccattaagggcctgcagccaggaaaatcctatctcttagacgtctatgtaataggacacggaggtcactctgtgaaataccaatctaaagtcgttaagactaggaagttctgctag

SEQ ID NO: 9246 - DNA, 489 bp, synthetic construct
  misc_feature 1..489: note = source = /note="Description of Artificial Sequence: Synthetic coding sequence"
  source 1..489: mol_type = other DNA
atgaagggcttcaccgccaccctgttcctgtggaccctgatcttccctagttgtagtgggggggggggcggtaaggcgtggccaacacatgtcgtatgctctgactccggcttggaggtcctctatcaatcttgtgatcccctgcaggatttcggcttctcagtggagaagtgtagtaagcagctgaagtctaatatcaatattagattcggtattattctgagggaagacatcaaagaacttttcttggacctggctcttatgtcacagggcagtagtgtcttgaatttttcgtaccccatttgtgaggccgccttacctaaattctcattctgcggccgacggaaaggcgaacagatttattatgccggccccgtgaataatccggaatttacgataccacagggcgagtatcaagtcctccttgaactttatactgaaaagaggtctacagttgcctgtgccaacgcgacaattatgtgttcttag

SEQ ID NO: 9247 - DNA, 1698 bp, synthetic construct
  misc_feature 1..1698: note = source = /note="Description of Artificial Sequence: Synthetic coding sequence"
  source 1..1698: mol_type = other DNA
atggacttcctgctggccctggtgctggtgagcagcctgtacctgcaagcggctgccgaattcgacggccgctggccaagacagattgtctcttccattgggctgtgtcgatacgggggcagaatcgattgctgctggggctgggcccgccaatcctggggccagtgccagccagtctgccagccccggtgcaaacacggcgaatgcattgggccaaacaagtgtaagtgccatcctgggtatgctggcaagacatgtaaccaggacttaaacgagtgtggtctgaagccgcggccttgcaagcacaggtgtatgaatacatacgggtcgtacaagtgttattgtttaaacggatatatgctcatgcccgacggcagctgcagttcggccctcacctgtagcatggccaactgccagtacggttgtgatgtggttaagggacaaatcaggtgccaatgtccttcaccgggactgcagcttgcgcccgatgggcggacttgtgtggatgtagatgaatgtgcgacgggccgagcctcttgtccgcgcttccgccaatgcgtaaacaccttcggatcctatatctgcaaatgtcataagggcttcgacctgatgtacatcggggggaaatatcagtgtcacgatatagacgagtgcagcttgggccagtaccaatgctcctctttcgcgaggtgctataacatccgtggatcctacaaatgcaaatgtaaagaaggctaccagggcgacggactgacttgtgtctacatacctaaggtgatgattgaacccagcggccctattcacgtgcccaaagggaacgggaccatactaaagggggatacagggaacaacaactggattcctgacgtcggatccacttggtggccccctaagacaccctacattccgcccataattacgaaccgccccacctctaaaccgacgacccgcccgactccaaaacccaccccaattccaaccccccctcccccgccacctttgcctactgaactgcgaactcccctgccaccaaccactccagagagacccacgaccggacttacaaccattgcccctgcggcatccacgccccctggtgggatcacagtcgacaaccgggtgcagactgatcctcagaagccacgaggagatgtgttcataccccgtcagccatccaacgacctcttcgaaatcttcgagatcgaacggggggtgagcgcggatgacgaggcgaaagacgacccaggagtactggtgcattcctgtaatttcgaccacggtttgtgtggatggattcgggagaaggacaacgacctccactgggagccaattcgggatccagccgggggtcagtacctgacagtgtctgccgctaaggccccggggggtaaagcagccaggctcgtgcttccgctagggagattgatgcactctggggacctgtgcctgagcttccggcataaggtcaccggcttgcatagtggaacactccaggtctttgttagaaaacatggagcccacggggctgcactgtggggcagaaacggagggcatggctggagacagactcagatcactctgagaggcgcggacattaaaagcgtagttttcaaaggagagaaacgacgggggcacactggagaaatcggcctggatgacgtgtcgttgaaaaaagggcactgttctgaagagagatag

SEQ ID NO: 9248 - DNA, 1413 bp, synthetic construct
  misc_feature 1..1413: note = source = /note="Description of Artificial Sequence: Synthetic coding sequence"
  source 1..1413: mol_type = other DNA
atgaagcggagcgtggccgtgtggctgctggtgggcctgagcctgggagtgccccagtttggcaagggagatatctgcgatcctaacccatgtgaaaatggaggaatatgtctcccagggctcgccgatgggagtttctcttgcgagtgtcctgacggctttacggatcctaattgctcctctgtcgtagaagtgggcccttgcactccaaatccgtgccacaacggcggcacatgcgaaatctctgaagcctacaggggtgacaccttcatcggatatgtatgtaagtgcccccgggggttcaatgggatacactgccaacacaatatcaatgaatgtgaggttgagccctgcaaaaacggaggaatttgcaccgaccttgtcgcgaactattcttgtgagtgccctggcgagttcatgggccggaactgtcagtacaagtgctctgggccattgggaatcgaagggggaataatatctaatcagcagataacggcgtcctcaacacacagagccctgtttggtctgcagaagtggtacccttactatgctagactaaacaaaaaaggcttgatcaacgcctggacagccgctgagaacgatagatggccctggatacaaattaaccttcagcgtaagatgagggtgactggcgtaatcacccagggcgccaaacggatcgggagccccgagtacataaagagctacaagattgcctactctaacgatgggaagacatgggcaatgtacaaagtaaaaggcacgaacgaagacatggtgttccgaggcaacattgataataatacaccgtacgcaaacagctttacaccccctataaaggcccagtacgtccggctctatccacaggtgtgtcgtcgtcactgtacactcaggatggaactgctggggtgcgagctctctggctgctcagagccattaggcatgaagagtgggcacattcaggactaccaaattaccgcaagttccatatttagaaccctcaatatggatatgtttacttgggagccccgcaaggccaggctcgacaaacagggcaaggtaaacgcctggacgagcgggcataacgatcagtctcagtggctgcaggtagatctgctggtacctaccaaggttacaggcattatcactcaaggggcgaaggattttggccatgtgcagtttgtgggcagttacaagttagcctacagcaatgacggagagcattggaccgtctaccaagatgagaaacagcgcaaagataaggtgtttcaggggaacttcgacaacgacacccatcgaaagaacgtgattgacccgcctatatatgcacgacatatacgcattctgccttggtcctggtacgggcggatcactctcagatctgagctgctgggttgtacggaggaggagtag

SEQ ID NO: 9249 - DNA, 1254 bp, synthetic construct
  misc_feature 1..1254: note = source = /note="Description of Artificial Sequence: Synthetic coding sequence"
  source 1..1254: mol_type = other DNA
atggccagctacctgtacggcgtgctgttcgccgtgggcctgtgcgcgcccatttattgcgtaagccctgccaacgctccatccgcataccctcgccctagctcaacaaagagcaccccagcctcacaggtgtattccctgaacaccgatttcgcgttccgattgtacaggaggctagtgctggagacaccgtcccagaatatttttttttctcccgtgtcagtgtcgacatccctggctatgctgtccttgggcgcccactcggtcactaagactcaaattctccaaggtttaggttttaatctgacccatacgccagagtccgcaatacaccagggcttccagcatctggtccacagtttaactgtgccatcaaaagatctcactctgaagatgggatcagctctgtttgtcaagaaggaattgcagctgcaagcaaacttccttggcaacgtcaagaggctgtacgaggccgaagtgttctcaaccgacttcagtaacccatcaatcgctcaagcaaggattaattcccacgtaaagaaaaagactcaggggaaggtcgtcgatatcatccagggattggatctgctgacagctatggtcctagtcaaccatatcttttttaaagccaagtgggagaaacctttccatcccgaatacacccgaaagaattttccctttctcgtcggggagcaagtgactgttcatgtaccaatgatgcaccagaaggaacagtttgcctttggtgtagatacagagctcaactgcttcgttttacagatggattacaagggggacgccgtggctttttttgtccttccctcaaaggggaaaatgagacagttggaacaggccctatccgccagaaccctcagaaagtggtcccactctctccagaagcgctggatcgaggttttcattcctagattttccatcagtgcctcatacaacttagaaactattctacctaaaatgggtatccaaaacgtgttcgacaaaaatgctgacttttcgggaatcgctaagcgggatagcctgcaagtgtctaaagccactcataaagctgtgctcgacgtttcagaagagggcaccgaggccactgcagcaacaactacgaagttcattgtgagaagcaaagacggccctagctactttacagtgtcattcaaccgaacttttctgatgatgatcacgaacaaggcaactgacggaattttatttctgggcaaagtcgagaaccctaccaagagctag

SEQ ID NO: 9250 - DNA, 486 bp, synthetic construct
  misc_feature 1..486: note = source = /note="Description of Artificial Sequence: Synthetic coding sequence"
  source 1..486: mol_type = other DNA
atgctgatgcccgtgcacttcctgctgctgctgctgctgctgctgggcggcccccgcaccggactgccccataagttttacaaggccaagccgattttctcttgccttaatacagctttatctgaagcagagaaaggacagtgggaggatgcttccctcctgtctaagaggtcctttcactatctacgcagtagggacgctagcagcggtgaagaggaagaaggcaaagaaaaaaagaccttccccatatctggtgccagagggggtgctaggggaacccggtatcgatatgtgtcgcaagcccagcccagagggaagcctcggcaggatactgcaaagagcccacaccgcaccaagtttaccctgagtttggatgtgcccacaaatattatgaacttgctcttcaacatcgcaaaagcaaagaacctccgagctcaggctgcggccaacgcacacttaatggctcaaatcgggaggaaaaaatag

SEQ ID NO: 9251 - DNA, 2091 bp, synthetic construct
  misc_feature 1..2091: note = source = /note="Description of Artificial Sequence: Synthetic coding sequence"
  source 1..2091: mol_type = other DNA
atggccatggcccggctgggcagctggctgggcgaggcccagtggcttgccctcgtgagcctttttgtcgcggctttggctacagtgggcctatacttagctcagtgggccctggcccgcgccaggccccaaccgcaacgcagggctgttgagccgggagagggcccccggcccggctccgacgcactcctcagctggattcttacgctgggcagctggaggtcccagtggcaggcagcttgggtaactgctctcaacgaagaggccgagcgcaaaggggggcctcccttcctaagctttgaggaggacccaaggcagcaagctcttgaactggttgttcaagaagtgtcttctgtgttacggtctgcagaagagaaggtggtggtatgccacgtagtgggccaggcgatccaattcctggtttctgagaccccagcgctgggagcaggatgccggctctatgatatgaggcttagcccgttccacctgcagctcgagttccacatgaaggaaaaaagggaggatctgcaaataagttggagctttattagcgtaccagaaatggccgtaaacattcaacctaaagcccttggagaggatcaggtggctgagacgagtgcaatgtcggatgtattgaaagacattctgaagcacctggccggatccgccagtcccagtgtggtcctcattactaaacctacgacagttaaggaggcgcagaatttacaatgtgcagcctcaaccgcccaggagtcttgcccaccaaaacctccaagagcacacgaactcaagcttctggtcaggaatattcatgtccttttgttgtctgaacccggagccagtggacacattaacgctgtatgcgtcgtgcaattgaacgacccggtacagcgtttctcttctacgctcactaagaatactccagacctgatgtgggaagaggagttcacatttgagctcaacgcaaaaagcaaggagcttcatctccagattagcgaagctggcaggtcctctgaaggcttgctggccaccgccaccgttccactcgatctatttaagaaacaaccttccggaccacaaagctttacgctcacctctggcagcgcttgcggttcctcggtactcggctccgtcactgccgaattcagctacatggagcccggagagcttaaaagctggcccatacccccacccgtgccagccgccaagatcgaaaaagataggacagtgatgccttgcggcacggtggttactactgtcacagcagtgaaaactaagccaagagtggacgttggaagggccagccccctgagttcggacagccctgtcaagacccccataaaagtgaaggtgattgaaaaggacatctcagtgcaggccatagcctgcagaagcgcgccagtctccaaaacactgtcctcaagcgacacggaattgcttgtactcaatggcagcgatcccgtggccgaagtcgcaattaggcagctctcagagtcttccaagctgaaattaaaaagcccaaggaagaaaagcactatcattatctcaggaatttcaaagacttccctcagtcaagaccatgatgccgccttgatgcagggctacacagcttccgtcgattctacgcaccaggaggacgcaccttcacacccagagcgagctgcggccagtgccccacctgaggaggccgaatctgcccaagcttctctggcccccaagccccaggaagacgaactggattcatgggatctggaaaaggagccccaggctgcggcttggtcttcacaggttctgctggatcctgacggagacgaattgtccgaatcttcaatgtcagtgttggaaccaggtactgccaagaagcacaagggcgggattttgcgcaaaggagcaaagctgttcttcagacgccggcatcagcagaaagaccccgggatgtcgcagagccacaatgacttagtctttctggaacagcctgagggcagtaggcgtaagggcattactctcacaaggatcctcaacaaaaaactattgtcacgtcaccgtaataaaaacactatgaatggggcccccgtcgaaccttgtacatag

SEQ ID NO: 9252 - DNA, 669 bp, synthetic construct
  misc_feature 1..669: note = source = /note="Description of Artificial Sequence: Synthetic coding sequence"
  source 1..669: mol_type = other DNA
atgcccgccagcagccccttcctgctggcccccaagggcccccccggaaatatgggtgggcccgtgagggaacctgccctttcagtagctctttggctgagctggggtgccgctctgggtgccgtagcatgtgccatggcactgcttacccagcagaccgagttgcagagtctcagaagagaggtgagcagacttcagggcaccggcgggcctagtcaaaacggggagggctacccatggcagagcttgcccgagcagcactcagtcttgcacctggtacctattaatgctaccagcaaagacgacagtgacgtgacagaagtcatgtggcagccagcactgaggcgtggtcggggcttacaagctcagggctacggtgtgagaatccaggacgccggtgtttacctgctgtacagccaggtgctgtttcaggacgtgacattcacaatggggcaggttgtctccagagagggccaggggaggcaggagacattattccgatgtatcaggtcaatgccaagccaccccgatcgagcatataactcttgttacagcgccggcgttttccacttgcaccagggagacatcctgtccgtcatcatcccgcgtgcccgtgccaagctgaacctttcccctcatggaaccttcctgggcttcgtcaagctctag

SEQ ID NO: 9253 - DNA, 2205 bp, synthetic construct
  misc_feature 1..2205: note = source = /note="Description of Artificial Sequence: Synthetic coding sequence"
  source 1..2205: mol_type = other DNA
atgtggggcctgctgctggccctggccgccttcgcccccgccgtgggcccggccctcggtgctccacggaactctgttctcggccttgctcagccagggaccaccaaggtgccgggcagcacccccgcactgcacagctcgccggcccagcctcccgccgagacagcgaacgggacaagcgaacagcatgtgcggatacgggtgatcaagaagaaaaaggtgatcatgaagaaacgcaagaagctcacactgacacggccgaccccccttgtcactgctgggcccttggttacacccactccggcagggacattggacccggcagagaaacaggaaactggctgcccgcctctaggcctggagagccttcgggtatccgactcgaggttggaagcctcatcctctcagagctttggtctcggccctcatagaggaaggttgaatatccagtcgggactcgaggacggcgacctgtacgacggcgcctggtgcgccgaggaacaggacgccgacccgtggtttcaggttgacgctggccaccctacccgatttagtggcgtgatcacacaggggcggaattctgtgtggaggtatgactgggtgacatcttataaggttcagttttcaaacgattcccgaacatggtggggcagtcgcaatcactcaagcggaatggacgccgtgttcccggcaaacagcgacccagaaacaccggtactaaacctgctccctgagcctcaagttgccagatttatacgcctattaccccaaacatggctgcagggaggggcgccttgtctgagagcagagattctcgcttgcccggttagcgaccccaatgacttattccttgaggcaccagcctcaggcagttctgatccacttgactttcagcaccacaattacaaagccatgcgcaagttaatgaaacaggttcaggagcagtgcccaaatatcactcgtatatatagcataggaaagtcctaccagggcctgaagttatacgttatggaaatgagcgacaagccaggagagcacgagctcggagaaccagaagtgagatacgtagccggcatgcacggaaatgaggcactcgggagagaattgttgctcctgttgatgcagtttctgtgccacgagttccttcgaggcaacccacgggtcacaagactgctgtctgaaatgaggatccacctgctccccagcatgaacccagatggatacgaaatagcctaccaccgcggaagtgagctggtcggctgggccgaggggcgctggaacaaccagtctatcgatctgaatcataattttgcggatctgaacaccccactgtgggaggcccaggatgacggcaaggtgccacatatcgtgccgaaccaccaccttcctctgccaacatactatacattacccaatgccactgttgctcccgaaacccgtgctgttatcaagtggatgaaacgcattcctttcgtgctgagcgcgaacttacacggcggagaattggttgtgagctacccattcgacatgactcggaccccatgggctgcccgcgagctgaccccaacccctgacgacgctgtctttaggtggctgtcaacagtgtacgcgggctctaacctggcaatgcaagacacgtcccggcgcccatgccattcacaagacttttcagtacacggtaatatcataaacggcgcagattggcataccgtgcctgggagtatgaacgacttctcttacctccatacgaactgctttgaggtgacagtggagctgtcttgcgacaagttcccccatgagaatgaactgccacaagagtgggaaaataacaaggatgctctgctgacgtacctggagcaggtgcgcatgggcatcgctggagtggtgagggataaggacacggagctcggcatagccgacgctgttatcgccgtcgacgggatcaatcatgacgtgacaaccgcctggggcggggactattggagactgttaactcccggtgattacatggtgaccgcgagtgctgagggatatcactctgttacgagaaattgtcgcgtgaccttcgaggaaggtccctttccctgcaattttgttttgaccaaaacgcctaagcaacgactgcgggagctcctggcagccggggcaaaagtgccccccgatctgcgacggaggcttgagcggcttcggggtcagaaagactag

SEQ ID NO: 9254 - DNA, 759 bp, synthetic construct
  misc_feature 1..759: note = source = /note="Description of Artificial Sequence: Synthetic coding sequence"
  source 1..759: mol_type = other DNA
atgcgggcccccctgctgccccccgcccccgtggtgctgagcctgctgattctgggatctggccactacgccgccggcttggatcttaacgacacctactcaggcaagcgcgaacccttcagcggtgaccactcagcagacggttttgaggtgacctcacgctctgagatgagctctggcagcgagatttccccagtaagcgaaatgccttctagctcggagcccagctcaggcgcagattatgattactctgaggagtacgataatgagccccaaatccctggatatatcgtcgatgactccgtgcgggtggagcaagttgtgaagccgcctcagaacaaaaccgaaagcgagaatacatccgacaaacccaagcgcaagaagaagggtggaaagaacggaaaaaataggaggaacagaaagaagaagaacccttgtaacgcagagttccaaaacttctgtatccacggagagtgtaaatatattgagcacctggaagccgtgacgtgcaagtgccagcaggaatacttcggagagcgttgcggcgaaaaatcaatgaaaacccatagcatgatagactcttccttaagcaaaattgcactggccgctatcgctgccttcatgtccgctgtgattctgactgccgttgctgtaatcactgtacagctgcgccgtcaatacgtgcgtaagtatgaaggggaggccgaggagagaaagaaactacggcaggaaaacggcaacgtgcatgccattgcatag

SEQ ID NO: 9255 - DNA, 8487 bp, synthetic construct
  misc_feature 1..8487: note = source = /note="Description of Artificial Sequence: Synthetic coding sequence"
  source 1..8487: mol_type = other DNA
atgcccaagcgggcccactggggcgccctgagcgtggtgctgatcctactgtgggggcaccctagagtggcgctggcctgtccacacccctgtgcctgctacgtcccttccgaagttcattgcacttttaggtctcttgcttccgtacccgcgggaatcgccaaacacgtggaacgaattaaccttggctttaattctattcaggctcttagcgaaacctccttcgcgggactcaccaagctggagttactcatgatacacgggaacgagatcccctccatccccgacggggcgctgagggatctgtcttcactgcaagttttcaaattctcgtataacaagcttcgcgtgattaccgggcaaaccctgcaaggcctcagcaacctcatgaggctgcatatcgatcacaacaaaattgagtttattcatccacaggcctttaacggcctcacttctctgcgcctgcttcatttggaaggcaaccttctgcaccagttgcacccgtctacgtttagcacatttaccttcctggattactttaggttatctactatacgacatctgtacttagccgagaacatggttagaaccttgccggcctccatgctcagaaacatgccactgctggagaacctgtatctgcagggaaatccatggacttgcgactgtgagatgcgttggttcctggaatgggacgccaagagcagaggcatattaaaatgcaaaaaggacaaggcctacgaagggggacagctttgcgccatgtgtttctcccccaagaaactttacaagcacgaaattcataaactgaaggacatgacttgtctgaagccctcaattgagtcgcccctgcggcagaaccgtagtcggagtatagaagaggaacaggaacaagaggaggacggcggcagccaactgatattagaaaaatttcagctgccacagtggagtatctccctgaacatgacagatgagcatggtaacatggtcaatcttgtttgtgacatcaaaaaacctatggacgtttataaaatacacctcaatcagacagatcccccagacatcgatatcaatgcaacagtggctctagatttcgaatgcccgatgactagagagaactatgagaagttgtggaaacttatagcctattactctgaggtcccagtgaaactgcaccgtgaactgatgcttagtaaggacccccgcgtgtcatatcagtaccggcaagacgccgacgaggaagccctgtactatacaggagtgagagctcagatactagcagaaccagaatgggttatgcagcctagcatcgatattcagctgaaccgaagacagtcaactgcaaagaaagtcctcctgtcatattacacacaatatagccagaccatctccactaaggacacaagacaagccagaggcaggtcctgggtgatgatcgaaccttccggagctgtacaacgggatcagaccgtgctggaagggggaccctgccagctcagctgtaatgtaaaagcctcagagtctccctcaattttttgggtcctccctgacgggagtatactgaaggctccaatggacgatcctgattccaaattttctattttgtcttccggttggctgcgtattaagagtatggagcctagtgactcagggctgtaccagtgcatcgctcaggtgagagacgagatggataggatggtgtacagggtgttggtgcagagcccttccacgcaacccgccgagaaagataccgtgacaattggaaaaaatccgggcgagagcgtgaccctgccatgcaacgctctggcgatcccagaggcccacctgtcgtggattctgccaaatcgtcggatcattaacgacttagctaacactagtcatgtatacatgttgcccaatggcacactatccattcccaaggtgcaagtgagcgatagcggttattatcgctgtgtggcagttaatcagcaaggcgccgaccatttcacagtggggatcacagtcactaaaaagggctctggcctgccaagtaagagaggtcgcagacctggtgcgaaagcactctcaagggtgcgcgaggatatagtggaagacgaaggcggatccggaatgggagacgaggaaaacacatctcggcggctgctgcaccccaaggaccaagaggtgtttctgaaaactaaggatgacgccattaacggagacaaaaaagccaaaaagggacgccgtaagcttaagctgtggaaacattccgaaaaggaacctgaaaccaatgttgccgagggccgcagggtctttgaaagccgccgccgcattaacatggctaacaaacagattaaccccgaaaggtgggcagacatactcgccaaggttcgaggaaagaaccttccgaaagggaccgaggttccacctcttatcaagactacaagccctccttcgttatcgctcgaggtgacgcctccattccctgcgatatcgccaccgagtgcatctcccgtgcaaactgtgacatccgctgaagaaagctccgcggatgttcccctgctcggggaggaagaacacgttctagggactatttcatcagccagcatgggtctggagcataatcacaatggagtgatactggttgagcccgaggtgacctccacacccctggaagaggtggttgatgatctatcagaaaaaaccgaagagatcacatcgaccgaaggtgaccttaaggggaccgccgctcccacactgatctctgagccatatgagcctagccccaccttgcacacccttgatacagtctacgaaaagccgacacacgaggagactgctacagaaggctggagtgccgcggatgtggggtcaagtcccgaaccgacttctagcgagtacgagcctcccctagatgctgtgagcctcgccgaatccgagcctatgcagtattttgacccagatctggaaacaaaaagccagcctgatgaagataaaatgaaggaagacacattcgctcatctgactccaactccgacgatatgggtcaacgacagctccacttcacagttatttgaggattcaactataggggagccaggagtacccggccaaagccacctgcagggtttaaccgacaatatccatctcgtcaagagcagcctgtccacccaggacacactacttatcaagaaaggtatgaaagagatgtcacagacactgcagggcggcaacatgttggagggggaccctacacactccaggagctccgagagcgaagggcaggagtctaaatcaattacgctgccagattccactctgggcattatgagcagcatgtcccccgtcaaaaagcctgccgaaaccaccgtgggcacactcttagataaagacacaaccaccgccacgaccacgcctaggcagaaggtggctccttcctccaccatgtcaacccaccccagccggcggcgtccgaatgggcgacgtaggttgcgccctaacaaattcaggcacagacataaacagactcctcccacaactttcgcccccagcgagaccttctccacccagcctacccaagcccccgatattaagataagttcgcaggtggagtcctcccttgtgccaactgcttgggtcgataataccgtgaacacaccaaaacaacttgaaatggagaagaatgccgaacccacgtccaagggtaccccgcgtcgcaaacatgggaaaagacctaacaagcatcgctacactccttctaccgtctcgtctcgggcgtcagggtccaagcccagccctagcccagaaaacaagcatcgcaatatagtgacacctagctctgaaaccattcttctgccacggacggtcagtctcaaaactgaggggccctacgactccctggactacatgaccaccacacgaaagatctattcctcataccccaaagtgcaggagactctgcctgtcacctataagcccacgtctgacggcaaagagataaaggacgacgtggctaccaatgtcgataagcataaatccgacatattagttaccggggaaagcatcactaatgccatccctacctctaggtcactggtgtctaccatgggagaattcaaggaggagtcatcccccgttggctttcccggtaccccaacttggaaccccagtcgtaccgcccagccaggcaggctccagacgggaattccagttacaacgtctggggagaatttaacagaccccccactccttaaggaactggaggacgttgacttcacatcagaatttctgtccagtctcaccgtgagcacacctttccatcaagaggaggccggaagtagcacgactttatctagcatcaaagtggaggtagctagctcacaagctgaaaccactactctggaccaggatcacctggaaaccacagtggccattctattatctgaaacacgcccacagaaccatacccccactgctgctcgaatgaaagagcccgcctctagctccccgagtaccattctcatgagtcttggccagactaccaccaccaagccagcactgcctagcccccggatctcccaagctagtagggattccaaggaaaatgtttttctcaactatgtggggaatcctgagacagaggcaacacccgtgaacaacgaagggacccagcatatgagtggtcccaatgaactctctacacccagctcggatcaggatgcatttaacctctcaactaaactggaactcgagaaacaagttttcggttccagatccctgccccgcggcccggattcccaacggcaggacgggagggtgcacgctagccatcagctcacgcgagtgcccgcgaagccaattcttccaaccgcaaccgtgcgcctcccggagatgagcacacagtccgcttcacggtattttgttacctcccagtctccgcggcactggactaacaaaccagaaataacgacttacccaagcggggcgcttcccgagaataaacagtttaccaccccacggttgtcttccaccacaattcctctgcctctgcacatgtccaagccatccattccatccaaattcacagatcggcgaactgatcagttcaatggttattctaaagtgtttgggaataacaacatcccagaagcccgtaatccagtgggtaaacctccttcccctcggatcccacactattcaaacggcagactccccttttttaccaataaaactctgtcatttccgcagctgggcgtgacccgccggcctcagattcctacgtctccagctcctgtgatgagggaaagaaaagtgatacccggcagctataatcgaatccattcccattcaacctttcatttagactttggaccacccgcgcctcccctccttcacacccctcagaccacagggtctccctcaacaaacctccagaacatcccaatggtgtccagtacccagtcctccatttcttttatcacaagttccgtccagagctcaggttccttccaccagagctctagcaagttttttgctggcgggcctccagcgagcaagttttggtctctgggagagaagcctcaaattctaactaaatcaccccagaccgtgtccgtgactgctgagaccgacaccgtgtttccatgcgaggcaactggtaaaccaaagccttttgtcacgtggaccaaagtctccactggcgcattgatgactccaaataccagaatccagcgatttgaggtgctgaaaaacggaactctggtgattcgaaaagtgcaggtgcaggatcgcggccaatatatgtgtaccgccagcaacctgcacggcttagaccgcatggtcgttctgctatctgtcactgtgcagcagcctcagatcctggcctctcactaccaagatgtgactgtctatttgggggacaccatcgcaatggagtgcctggccaaaggaactccagcgccgcagatatcttggatctttcccgaccggagagtgtggcagactgtaagcccggtggaggggagaattactttgcatgagaaccggaccctgtccattaaggaggcatctttttcggacaggggcgtatacaaatgcgtcgcatctaacgcagccggagctgatagcttggctattaggttacacgtggctgctttacctcccgtgatccaccaggaaaaactggaaaatatctcgctccctcctggcctgtccatccatattcattgtacagccaaagctgcacccttgcccagcgtgagatgggtgctgggagacgggactcaaatccgcccatcccagtttctccacgggaatctgtttgtgttccctaatggaaccctgtatatccgaaacctggcccctaaagacagcggacggtacgaatgcgtggccgcgaatctggttggttcagctaggaggactgtccagctaaatgtccagcgcgcggccgcgaatgcgcgcataactggtactagcccacgtcgtactgatgtacgatacgggggcactctgaagctcgattgtagcgcctccggcgacccttggccacgaattttatggaggctcccctctaagaggatgatagacgccctgttttcttttgacagtaggattaaggttttcgctaatggcacgctcgtcgtgaagagcgtaacagacaaggacgccggcgactacctctgcgttgcgcggaataaggtaggcgatgactatgtggttctcaaggtggatgtggtcatgaaacccgccaaaattgaacacaaagaggaaaacgatcacaaagtgttctatggaggcgatcttaaagtggactgcgtggctaccggcctccctaatcccgagattagctggtcactgccagacggtagtttggtgaactcgtttatgcagagcgatgactcaggaggacgcaccaagagatatgtggtgttcaacaacggcactctgtatttcaacgaggtgggaatgcgggaggaaggcgactacacctgcttcgcggaaaatcaggtgggcaaggacgagatgcgcgtccgggtgaaggtggtcaccgctcccgccacaatccggaacaaaacttacctggccgttcaggtaccatacggcgatgtggtcaccgtcgcctgcgaggccaagggcgaacctatgccgaaagttacgtggctgtcccccacaaataaggtcattccaacttccagtgagaagtaccagatttaccaagacggtaccttgcttattcaaaaagctcagcgaagcgactctggaaactacacctgtctggtgcgaaactcggcaggcgaagacaggaaaactgtatggatccacgttaacgttcaaccacctaaaattaacgggaatcctaatccaatcaccacagtgagggagatcgccgccggcggctctagaaagctcatcgattgcaaagccgaagggatccccactcccagggtactgtgggcctttccggagggggtcgtcttgcccgccccctattatgggaatagaataaccgtgcatggaaatggatctctcgacattcgatcgctgaggaaatccgatagcgtgcagctggtgtgcatggctaggaacgagggcggggaggccagactgatactgcaactgactgttttggagccaatggagaaaccaatctttcatgatccgattagtgagaaaattacggctatggccgggcacacaatcagtctcaattgctctgctgctgggacgccaacaccctctttggtatgggtccttcccaatggcaccgatcttcagtcaggccagcagctccagcggttttaccacaaagctgatgggatgcttcacatcagcggactgagtagtgtagatgccggagcctataggtgtgtggcccgtaacgcagctggtcatactgaacggctggttagcctgaaagtgggtctgaaacccgaagccaataagcaatatcacaacctcgtcagtataataaacggggaaaccttgaaacttccttgcacaccaccgggcgcaggacaagggcggttcagctggaccctgccaaatggcatgcatctggaaggacctcagactctgggcagggtaagtttgctggataacggcactctaactgtcagggaggccagtgtctttgaccgcggcacatacgtgtgtagaatggagacggaatacggacccagtgtgacctcaatccccgtgattgtcatcgcctatccccctcgtattacaagcgaacccacgccagtaatctatacgcgtcctggcaataccgtgaagctgaattgcatggctatgggtatccccaaggccgatattacctgggaactgcccgacaaatcccacctgaaagccggcgtgcaggcccgcttgtacgggaacagatttctgcatccgcagggctcattgactatccagcatgccactcaacgggacgccgggttttataagtgcatggcgaagaacattctcggaagcgactcgaaaaccacatatattcatgtcttttag

SEQ ID NO: 9256 - DNA, 3330 bp, synthetic construct
  misc_feature 1..3330: note = source = /note="Description of Artificial Sequence: Synthetic coding sequence"
  source 1..3330: mol_type = other DNA
atgcggctgctgctgctggtgcccctgctgctggcccccgcccccggatcctcggcgccaaaggtgcggaggcagagcgacacatggggcccatggtcacagtggtcaccatgttcaaggacatgcggcggaggggtttcctttagagagagaccttgctattctcagagaagagatggcggaagttcctgtgttggtcctgcgaggagccatcgtagttgcaggactgagagctgtccagacggagcgcgggattttcgagcagaacagtgcgcagagttcgacggcgccgaattccaggggcggcgataccggtggctgccatactattccgctcccaacaaatgcgaacttaactgtataccgaagggagagaatttttactataagcacagagaagctgtggtcgacggcaccccttgcgaacctggcaagagagacgtctgtgtcgacggaagctgcagggtggttgggtgtgatcacgagctcgacagctcgaagcaggaggataaatgtctgcgctgcggtggggatggcaccacctgttacccagtagccggtactttcgacgccaacgatctgtctcgggggtacaatcaaatactaatcgtccccatgggagctacttctattctcattgacgaagccgctgcgtcaagaaacttcctcgccgtcaagaatgtcagaggagagtactatttaaacggacactggaccattgaagccgcccgtgctctacccgccgcatctaccatactgcactatgaacgcggtgccgaaggtgatttagcacctgagaggctccacgctcgggggcccacttccgagcccttggtgatcgagctcatctcccaggagcccaacccaggcgtacactacgagtatcacctgccattgcggcgtccctcaccaggcttcagctggtctcacggatcgtggtctgactgcagcgccgagtgtggtgggggacaccagtctcggcttgtgttttgcactattgaccatgaggcctaccctgatcatatgtgccagaggcagcctcgacctgctgatagacgaagctgcaacctccacccatgcccagagacaaaacgatggaaggccgggccctgggctccctgtagtgccagctgcggcggagggtcacagagccgctctgtgtattgcatctcaagcgatggagctgggatacaggaagctgtggaggaggctgagtgcgccggacttcctgggaagccccccgctattcaagcttgcaaccttcagcgctgcgcagcgtggtccccagaaccctggggtgagtgtagcgtgagctgcggcgttggagtgagaaagagaagtgtcacttgtaggggggagagaggttccctactgcataccgccgcatgcagcctggaggacaggcctcccctgaccgagccttgcgttcatgaggattgtcctttgctctcagatcaagcatggcacgtcggaacatggggtctttgttccaagtcctgttcctcagggacccggcggcgacaagttatctgcgcaattggcccgccttcccattgtggtagcctgcaacactccaagcctgtggacgtggagccatgcaatacccaaccctgccatttaccccaggaagttccatctatgcaggatgtgcatactccagcctctaacccctggatgcccttgggacctcaagaaagccccgcctccgattctcgcggccaatggtgggccgcccaagaacatccatctgctcgaggagatcataggggcgagcggggtgatccccggggggatcaagggacccacctgtccgcattaggtccggctcccagtctccaacaaccaccttaccagcaacccttgcggagcggatctggtccacacgactgccgccattctccacacgggtgctgtcctgatgggcacacggccagcctgggacctcagtggcaggggtgtcccggggccccctgccagcagagcaggtatggatgttgtcctgacagggtaagtgtggccgaaggtcctcatcatgctggttgtaccaagagttacgggggggattccacaggtggcatgcctagatccagggccgtggcatcaacggtgcacaacactcaccagccccaagcgcagcagaacgagccatccgaatgcagagggtcccagtttgggtgctgttatgataacgtcgctacagccgctggccccctgggcgagggctgcgtcggccaacctagccatgcgtaccctgtcaggtgcctcctaccctcagctcacggatcctgtgccgactgggccgctagatggtactttgtcgctagcgtgggtcagtgcaataggttttggtacggaggctgccacggcaacgccaataactttgcctcggaacaggagtgtatgtctagctgccagggctcattgcacgggcccagacgccctcaaccgggggcgtccggaagatcgacacacaccgacggtgggggatcttcaccagcaggggaacaggagcccagccagcaccgcaccggcgccgctgtgcagagaaagccatggccgtcaggtggcttgtggcgacaggatcagcagcccggacctggcgaggctccccacactcaggcattcggcgaatggccatggggccaagagctgggaagcagggcccctggactgggaggagatgccgggagcccagcccctccttttcattccagttcatatcgcatatccttagctggcgtggaaccgtcactggtccaagctgccctggggcaactggtgcgcctgtcatgctcagatgatacagcccctgagagccaggcagcctggcagaaagatggacaacctatttcctccgaccggcacaggctccagtttgatggcagtttgatcatccacccactgcaggccgaggacgctggcacatattcttgtggaagcacacgtccaggccgagattctcagaaaattcaattgagaattatcggcggggacatggcagtcctttcagaagccgaactgagccggttccctcagccaagagaccctgcacaagatttcggacaggccggggcagctggccccctgggggctattccttcgagccatccccagcccgccaaccggctgcggctggaccagaaccaaccgcgggttgtagatgcgagcccgggtcagcggatcaggatgacatgtcgcgcagaggggtttcccccgcccgcaatagaatggcagcgcgatgggcagcctgtctcctcccctagtactcatcgccccgcccaaggtccttggcagggcctgcgccgacccgcccgcgctggtcaactgtag

SEQ ID NO: 9257 - DNA, 405 bp, synthetic construct
  misc_feature 1..405: note = source = /note="Description of Artificial Sequence: Synthetic coding sequence"
  source 1..405: mol_type = other DNA
atgaagagcgtgctgctgctgaccaccctgctggtgcccgcccacctggtagccgcctggtccaataactatgcggtcgactgcccacaacattgcgactcttccgaatgtaagagctccccaagatgtaagcgaaccgttttggacgactgtggttgttgtcgggtgtgcgccgctggcaggggcgaaacgtgctacagaaccgtttcgggcatggatgggatgaaatgtggccctggactgaggtgtcaaccaagcaatggcgaagacccattcggggaggaattcgggatctgtaaggagcatgatatggcttcaggggatgggaatatcgtgagggaggaagtggtaaaggagaatgctgccgggagcccggttatgcgcaagtggctgaacccacggtag

SEQ ID NO: 9258 - DNA, 555 bp, synthetic construct
  misc_feature 1..555: note = source = /note="Description of Artificial Sequence: Synthetic coding sequence"
  source 1..555: mol_type = other DNA
atgaagagcgtgctgctgctgaccaccctgctggtgcccgcccacctcgttgccgcgtggtcaaacaactatgcagtagactgcccacagcattgtgatagttcggaatgtaaaagttctccacggtgcaagaggactgtgctggacgattgcggttgctgccgtgtgtgcgccgctggccgcggagagacctgttacaggaccgtttccggcatggatgggatgaagtgtggaccaggcctcaggtgtcagccttcgaatggggaagacccatttggtgaggagttcggcatctgcaaagactgcccttatggcacattcgggatggattgcagagagacttgcaactgccaatccgggatctgcgatagagggaccggcaaatgtctcaagttccctttcttccaatacagcgtaaccaagtcctcgaatcgcttcgtctccctgaccgaacacgatatggcttctggagatggaaatatcgtgcgcgaagaggtcgtcaaagagaacgcggcaggctccccggtgatgagaaaatggttgaaccctcgttag

SEQ ID NO: 9259 - DNA, 597 bp, synthetic construct
  misc_feature 1..597: note = source = /note="Description of Artificial Sequence: Synthetic coding sequence"
  source 1..597: mol_type = other DNA
atgcccatccccgccagccccctgcacccccccctgcccagcctgctgctctacttgttactggagctggccggagttacacacgtgtttcatgtccaacagacagagatgagccagacagtcagcaccggagaatccattattctcagctgttcggtcccgaacaccctccccaatggacccgtcctctggtttaaaggcacaggaccgaaccgcaagcttatctacaattttaaacaaggcaattttccccgtgtaaaggaaataggagatacgactaagccagggaacacagacttcagcacaaggattagagaaataagcctcgcggatgctggaacctattactgtgtgaagtttatcaaaggacgtgctatcaaggagtatcagtctggcaggggcacacaggtcttcgtgaccgccgaacagaaccctcgccctcccaaaaatagaccggccggacgcgccggctctagagcacaccacgacgctcatacttgcctgagtgcgttgccggaaagaaactccaccaactatttcgttcagccatgctgctgcctccgcctgcttgggctcaccggcctgctcagcaaatag

SEQ ID NO: 9260 - DNA, 594 bp, synthetic construct
  misc_feature 1..594: note = source = /note="Description of Artificial Sequence: Synthetic coding sequence"
  source 1..594: mol_type = other DNA
atgcccatccccgccagccccctgcacccccccctgcccagcctgctgctctatctcctcttggaactggccggggtgacccatgtgttccatgtgcagcaaacagagatgagccaaacagtttccaccggcgagtcgatcatcctctcttgcagcgtccccaataccctcccaaacggtcccgtactctggttcaagggaactgggccaaatcgcaagctgatatataactttaagcagggaaattttccccgagttaaagagataggtgacaccactaaacctggaaacacggatttcagcacccggatccgcgagattagcctagcagacgctggaacctactattgtgtcaaattcatcaaaggacgcgcgatcaaggagtaccagagtggaagaggaacccaggtttttgtcacagagcagaacccccgtccccctaagaataggcccgccgggagggctggaagtcgagcccatcacgacgctcacacatgcctgtctgccctaccagaaaggaactcaacaaattatttcgtacagccttgctgttgtcttaggctactcggacttactggcttactgagcaagtag

SEQ ID NO: 9261 - DNA, 1563 bp, synthetic construct
  misc_feature 1..1563: note = source = /note="Description of Artificial Sequence: Synthetic coding sequence"
  source 1..1563: mol_type = other DNA
atgaccaccgacgacaccgaggtgcccgccatgaccctggcccccggtcatgcagccctcgagacacagacccttagtgccgagacgagcagtcgtgccagcacccctgccgggcctattcccgaggctgaaacacggggggcaaaaaggatatcccccgcgcgagagaccagatcattcactaaaacatcacccaactttatggtgttgatcgctacctcagtagagacctccgccgcctcaggctcccccgaaggggcaggaatgaccactgtacagactataacggggtcagacccacgggaggccatcttcgacacactgtgcaccgatgacattagcgaggaggcaaaaactctcactatggatatactgacccttgcgcatacgagcactgaagccaaaggactcagttcagagagtagcgcctcaagcgacggcccccaccctgtcataactcccagccgcgcatccgagagcagcgcctcttccgacggacctcacccagttataacaccttcacgagcgtctgagtcctctgcaagcagtgatgggccacatccagtgatcaccccatctcgtgcgagtgaaagtagcgcgagctccgatggacctcatcctgttataaccccaagctggtcccccggctcagacgtcacattgctcgccgaagccctggtcacagtaactaatatagaggtaatcaactgcagcatcacggaaatcgaaaccacaaccagctctatccccggcgcctccgatactgacttgattcccactgagggtgtcaaggccagcagtacatctgatccccctgccctcccagatagtacaaacacgaaaccccacattaccgaggtgacagccagtgctgaaacactatccaccgctggcactaccgagagcgctgcacccgacgcgacgattggtacccccttacctacaaactctacaattgagcgggaagttacagcaccaggggctacgaccttatcaggcgccctcgctacaggcaatccgttggaagagacaagcgcattgagcgtggagactccctcgtacgtgaaggtcagcggggcagccccggtatctatcgaagccgggtcagcggtcggtaagaccacctcctttgccggcagttccgccagctcttactcacccctcgaggccgctttaaagaatttcacgccctctgaaaccttgacgacggacatcgcaaccaaagggccctttcctaccagcagggatcccctaccttccgtgccccctacgactaccaacagctcccgcggaacaaactctacactagccaagattactaccagcgcaaagacaacgatgaaaccgccaactgctacccccactacagcacgaactaggcctaccaccgatgtgagcgccggggaaaacggaggctttttgctgcttaggctctccgttgcttcgcccgaagacctcaccgacccgcgggtggcagagcgtctcatgcagcagctccatcgagagcttcatgcccatgcaccacatttccaggtcagtctgctgagggttaggagaggctag

SEQ ID NO: 9262 - DNA, 600 bp, synthetic construct
  misc_feature 1..600: note = source = /note="Description of Artificial Sequence: Synthetic coding sequence"
  source 1..600: mol_type = other DNA
atgctgtggcggcagctgatctactggcagctgctggccctgttcttcctgccattctgcctttgtcaggatgagtatatggaatcacctcagactggaggactaccccccgactgctcaaaatgctgccatcacgggaacaatggaaacaacggcgcaactgggcataagggagaaaagggatatcctggaataccgcctgagctgcaaatcgcattcatggcttcactcgcgacgcatttctcgaaccagaactccggtatcattttctcctccgtggaaacaaatatagggaactttttcgacgtgatgacagggcggtttggcgcaccggtgtcaggcgtctactttttcacgttctctatgatgaagcacgaagatgttgaggaggtgtacgtgtacttgatgcataatggcaatacagtattcagcatgtactcgtacgaaatgaaaggcaagagcgatacctcgagtaatcacgctgtgttaaaactggctaaaggcgatgaggtctggctgagaatgggcaacggagcactccatggagaccatcagagattcagcacattcgccggattcctactgttcgagaccaaatag

SEQ ID NO: 9263 - DNA, 960 bp, synthetic construct
  misc_feature 1..960: note = source = /note="Description of Artificial Sequence: Synthetic coding sequence"
  source 1..960: mol_type = other DNA
atgctgtggcggcagctgatctactggcagctgctggccctgttctttctgcccttctgtctgtgccaggatgagtatatggaggtgtccgggcggacaaacaaggtcgtcgcaaggatagtgcagagccatcagcagactggacggtccggcagcaggagggagaaagtcagggagcggagtcaccccaaaactggtactgtcgacaacaacactagcacagacttgaaaagtttacggcctgacgaactccctcatcctgaagtcgacgatctagcgcaaattaccacgttctggggccagtcaccccagacaggtgggctgccaccggattgctccaaatgttgtcatggtgattacagcttccggggttatcagggtcccccagggccacccggaccaccagggattcctggcaatcatgggaacaacggcaataacggcgctaccggccatgagggtgcaaagggtgagaagggcgataaaggggacttgggtcctaggggcgaacgaggacagcatgggcccaaaggcgaaaagggatatccgggaatcccaccagaactgcagattgccttcatggcctcactggcgacacattttagcaaccagaattccggcattatcttttcctctgtggagactaacataggcaatttctttgatgtcatgacaggccgattcggagcaccagtgagcggggtctacttcttcactttctcaatgatgaagcatgaggatgtagaagaagtgtacgtgtatcttatgcataatggaaataccgtattctcaatgtattcctatgaaatgaaaggtaagagcgacaccagctccaatcacgcggtgctgaaactggctaagggggatgaagtctggttgaggatgggcaacggcgcgctgcacggtgaccatcagagatttagtacctttgcaggctttcttctgttcgagacaaagtag

SEQ ID NO: 9264 - DNA, 855 bp, synthetic construct
  misc_feature 1..855: note = source = /note="Description of Artificial Sequence: Synthetic coding sequence"
  source 1..855: mol_type = other DNA
atgaccaagagcagcctgcggcccctgcagaagcagagcccccagaccggagggcttccacccgactgctccaaatgttgtcatggcgactattcttttagggggtatcaaggaccacccggaccacctggcccccctggtattccaggtaaccatggcaataacggaaacaatggcgccacgggtcacgaaggcgccaaaggtgagaaaggagacaagggagatctgggaccgaggggggaaagaggacagcacggccccaaaggtgagaagggctatcctggaattcctcccgaactgcagatagcctttatggcctctttagccacccacttcagcaatcagaactccggcatcatcttcagtagcgttgaaactaatattggtaatttctttgacgtaatgacagggagatttggcgccccggtttccggtgtctattttttcaccttttctatgatgaaacacgaagacgtggaggaagtatatgtgtatctcatgcacaacgggaacaccgtcttttcaatgtatagttatgaaatgaaaggtaagtcggatacctcctctaatcacgcagttctgaaactagctaaaggcgacgaagtgtggcttcgcatgggtaacggagccctacatggcgatcatcagaggttcagcacatttgctggatttctccttttcgaaacaaaatgccatggcgagaccccagcgggtccaagagattctgcggccggtaagtccaaggcctatctctgccaggccgaatggatatggcccgtgaggaagctgctcccagtgtcttggcccagataccaactgttcggcttcgtgcggtggaaggagcagcatatatag

SEQ ID NO: 9265 - DNA, 234 bp, synthetic construct
  misc_feature 1..234: note = source = /note="Description of Artificial Sequence: Synthetic coding sequence"
  source 1..234: mol_type = other DNA
atggccacccggagcgtgctgctggccctggtggtgctgaacctgctcttctacgtccctcccggcagatctggcccaaacgtctacatccagaagatttttgcgtcctgctggcgtcttcagggcacgtgtagaccaaaatgtctgaagaacgagcagtacagaattctgtgcgatactatccacctctgttgcgttaaccccaagtacctacccatcctgaccggtaaatag

SEQ ID NO: 9266 - DNA, 237 bp, synthetic construct
  misc_feature 1..237: note = source = /note="Description of Artificial Sequence: Synthetic coding sequence"
  source 1..237: mol_type = other DNA
atgaacctgtgcctgagcgccctgctgttcttcctggtgatcctgctgccaagcggaaaaggcatgtttggtaatgatggggtgaaggttcgcacatgtacctcacagaaggccgtgtgcttcttcgggtgccctccaggataccgctggatcgcattttgtcacaacatccttagctgctgtaaaaacatgacccgattccaaccgccccaagctaaggatccctgggttcactag

SEQ ID NO: 9267 - DNA, 627 bp, synthetic construct
  misc_feature 1..627: note = source = /note="Description of Artificial Sequence: Synthetic coding sequence"
  source 1..627: mol_type = other DNA
atgggcgcccagggcgcccaggagagcatcaaggccatgtggcgggtcccagggaccacgcgtagaccagttacaggcgaatctcccgggatgcataggcctgaggcgatgttgcttctgctaaccttggcactactgggtggcccgacctgggccggtaaaatgtacgggccaggaggcgggaagtacttttctacaactgaagactacgatcacgaaattacgggtctccgggtgagcgtggggctcttattggtgaaatctgtacaggtaaaactcggggatagctgggatgtaaagctgggggccctggggggcaacacccaagaagtgaccctgcagcccggtgagtacattacgaaagtgttcgtggcatttcaggcatttctgagggggatggtgatgtatacctccaaggataggtatttctattttggcaagctggacggccagatctcctctgcatacccatcccaagaaggccaagtccttgtgggaatttacgggcagtaccagcttctgggcatcaaaagtattggcttcgaatggaactatccactggaggaaccaacaactgagcctccagtcaacttgacatactcagcaaattcaccggttggaaggtag

SEQ ID NO: 9268 - DNA, 288 bp, synthetic construct
  misc_feature 1..288: note = source = /note="Description of Artificial Sequence: Synthetic coding sequence"
  source 1..288: mol_type = other DNA
atgaagttcctgctgctggtgctggccgccctgggcttcctgacccaagtgataccagctagtgccgggggttcgaaatgcgtgagtaacacacctgggtattgcagaacttgttgtcattggggcgagaccgccctctttatgtgcaacgcttctcgcaaatgttgcatatcatattctttcctcccgaaacctgatttgcctcagctgattggtaatcattggcagagtagacgacgcaacacacagaggaaagataagaaacaacaaacaactgttaccagttag

SEQ ID NO: 9269 - DNA, 339 bp, synthetic construct
  misc_feature 1..339: note = source = /note="Description of Artificial Sequence: Synthetic coding sequence"
  source 1..339: mol_type = other DNA
atgttcgtgctgctgtacgtgaccagcttcgccatctgcgccagcggacagcccagaggcaaccagctcaagggcgagaactacagtcctcgctatatatgttcaatcccaggccttccaggcccaccagggcctcctggggcaaatggcagtcctggaccacacggccggattgggctgcctggaagggatgggagagacggaaggaaaggtgagaaaggtgagaagggaacagctggtttgcgcgggaaaaccggccccctgggtctggccggggagaagggtgatcaaggagagaccggcaaaaagggcccaattggccccgagggtgaaaaatag

SEQ ID NO: 9270 - DNA, 300 bp, synthetic construct
  misc_feature 1..300: note = source = /note="Description of Artificial Sequence: Synthetic coding sequence"
  source 1..300: mol_type = other DNA
atgggcctgttcatgatcatcgccatcctgctgttccagaagcccaccgtcacagagcagcttaagaagtgttggaacaactacgtacaaggacattgtaggaaaatctgtcgagtgaacgaggtgcccgaggccctgtgtgagaacggccgctactgttgcctgaacatcaaggagctcgaggcctgtaaaaaaatcactaaacccccaagaccaaaacccgccacactggcactgaccctccaagactacgtgactattatagagaactttccaagcctgaagacacagagtacttag

SEQ ID NO: 9271 - DNA, 336 bp, synthetic construct
  misc_feature 1..336: note = source = /note="Description of Artificial Sequence: Synthetic coding sequence"
  source 1..336: mol_type = other DNA
atgaagagcctgctgttcaccctggccgtgttcatgctgctggcccagctggtaagtgggaactggtatgttaaaaagtgtttgaacgatgttggcatctgtaaaaagaagtgcaagccggaggagatgcacgtgaagaacgggtgggctatgtgtggtaagcagagagattgctgtgttccagccgataggagagctaactaccccgtattttgtgtacagaccaaaacaactaggatatctacagttacagcaacgaccgcaacaacaactctgatgatgacgactgcctccatgagctcgatggcaccaacccccgtctcacctacaggttag

SEQ ID NO: 9272 - DNA, 1698 bp, synthetic construct
  misc_feature 1..1698: note = source = /note="Description of Artificial Sequence: Synthetic coding sequence"
  source 1..1698: mol_type = other DNA
atggaggacagcgacagcgccgccaagcagctgggcctggccgaggcagctgctgtggccgctgcagccgcggttgcagcagctgccgccgctgcagctggaggtgaggcagaggagcccgttttgagtagggatgaggacagtgaagaggatgctgacagcgaggcggagcgagaaacgcctcgtgtcactgccgtggccgtgatggcggctgagccggggcacatggatatgggagccgaggctctgcccggaccagatgaagccgccgctgcagccgcttttgcggaggttaccacagtgacagtagcaaatgtgggggccgcagccgacaacgtctttacaaccagcgtggcaaacgcagcgtcaattagtggtcatgtgcttagtgggcgcactgctcttcaaatcggagacagtctaaacacagagaaagcaacactgatcgtagtgcacactgacgggtccattgtggagacgacaggcctgaagggacccgccgctccactgacacccggtcctcagtcacctcccactccgcttgcccctgggcaagaaaagggagggaccaagtataactgggaccctagcgtttatgactccgaactcccagtccggtgcaggaatatttcaggtactttgtacaagaataggctgggctcggggggccgagggagatgcatcaaacaaggggagaattggtactcgccaacagagtttgaggccatggcagggagagcttcctctaaggactggaagagatctattaggtacgctggaagaccactgcagtgcctcattcaggatggaattctcaaccctcatgccgcctcatgcacctgcgccgcatgttgtgacgacatgactctgagcgggccggttcgactgtttgttccgtacaagcgcagaaagaaagagaatgaactgcctacaacacctgtgaaaaaagatagtccaaaaaacataacgctgctgcccgctaccgccgccacaacttttaccgttactccgtccggtcaaatcaccaccagcggggccctgacatttgatcgggctagtaccgttgaagccaccgccgtgatatccgagagccccgcacagggggacgtgtttgccggcgccactgtgcaggaggcgtccgtgcagcccccatgtcgggcttcacaccccgaacctcattatccagggtaccaagattcctgtcagattgccccgttcccagaagctgctctccccacgtcccatcctaagatcgtgctgacctctctacccgctctggccgtccccccacccacaccaacaaaggccgcgcctcccgccctggttaacggcctggagctgtcagagccacgcagctggctatatttggaagagatggtgaactccttactcaataccgctcaacagctcaaaactctgttcgagcaggccaagcatgcttccacttatagagaagctgcaactaaccaggccaaaatccacgccgacgccgagaggaaggaacaatcatgtgtgaactgtggccgggaagccatgtcagagtgcaccgggtgccacaaggttaactattgcagtaccttctgtcagcggaaagactggaaggatcatcagcatatttgtggacaatcagcagcagtgacagtacaagcagacgaggttcatgtggcagagagtgtgatggaaaaagtcaccgtgtag

SEQ ID NO: 9273 - DNA, 471 bp, synthetic construct
  misc_feature 1..471: note = source = /note="Description of Artificial Sequence: Synthetic coding sequence"
  source 1..471: mol_type = other DNA
atgaacatcctgatgctgaccttcatcatctgcggcctgctgaccagggtgacgaagggatctttcgagcctcaaaaatgttggaagaacaacgtggggcactgtcggcgacggtgtcttgacacagaaaggtacatactgctctgcaggaacaagctcagctgctgtatatcaattatctcccacgagtacaccagacgacccgcgtttcccgtgatacatttggaggacatcaccttggactacagcgacgttgattcttttacaggcagccctgtgtcaatgctgaatgacctgattacctttgatacgaccaagtttggcgaaactatgactccggaaacaaacactccagagactacgatgcccccttcagaggcaaccacaccagagacaacaatgcccccaagcgagaccgctacgagcgaaaccatgccgcccccaagccagaccgcactaacacacaactag

SEQ ID NO: 9274 - DNA, 837 bp, synthetic construct
  misc_feature 1..837: note = source = /note="Description of Artificial Sequence: Synthetic coding sequence"
  source 1..837: mol_type = other DNA
atgggcggcccccgggccctgctggccgccctgtgggccctggaggccgctggcacagcagccctgcgcatcggcgccttcaatattcaatctttcggcgatagcaaggtcagtgatcctgcctgcggatccattatcgccaagattctcgccgggtacgacctggcactggttcaggaggttagagaccccgacctttcagctgtttcagccctaatggagcagatcaactccgtgtctgaacacgagtactctttcgtgagttctcagccactgggaagagatcagtacaaggaaatgtacctgttcgtgtacagaaaggatgccgtgtcagttgttgatacgtatctttatcctgaccccgaggacgtgttctctagagagccgttcgtggtcaaattctcagcgcctggaacagcacaaaacctcgtgctcatccctctacacgcggctccacaccaggccgtagccgagatagacgcactctatgacgtgtatctggatgtaatcgacaaatgggggactgatgacatgctgtttcttggcgactttaacgcagattgctcctacgtccgagcacaggactgggcggctattcgtctgagaagcagcgaggtcttcaaatggctgatccccgacagcgctgataccacagtgggcaattctgactgtgcctatgataggatcgtcgcctgtggcgcaagactccggagatctctgaagccacaatccgccactgtgcacgattttcaggaggaattcgggttggaccagacgcaagctctcgctatatccgatcatttccccgtcgaggtgacattgaaatttcaccgctag

SEQ ID NO: 9275 - DNA, 3039 bp, synthetic construct
  misc_feature 1..3039: note = source = /note="Description of Artificial Sequence: Synthetic coding sequence"
  source 1..3039: mol_type = other DNA
atggccgaggccgccctggaggccgtgcggagcgagctgcgggagttccctgcggccgccagagagctatgtgtgccacttgctgtcccatatctcgataagccccccaccccgctgcatttttaccgcgattgggtgtgccccaaccggccgtgcatcatccgaaacgctcttcagcattggccagccctccagaagtggtcgctcccttacttccgagcaactgtgggatctacagaggtgagcgtggcagttactcccgacggctatgcggacgccgtgcgtggggatcggttcatgatgcccgcagagcgtagactcccgctgtccttcgtactggacgtcttagaagggcgtgcccaacaccctggtgttctttatgtgcagaagcagtgtagcaatttacctagcgagctgccccagctgctgcccgatctcgaaagtcatgtgccttgggcaagtgaagccctcggcaaaatgcccgatgctgtaaacttctggctcggcgaagcagccgccgtgacatccctacacaaggaccactacgaaaatttatactgcgtagtgtccggggaaaagcactttttgtttcaccctccatctgacaggccatttatcccttacgagctgtacacacctgcaacttaccagctcaccgaagaaggtacctttaaagtggtggacgaagaggctatggaaaaggccgaggtctcccggacctgcctgctgaccgtccgagttttacaggcacaccggctaccatctaaggacctggtgacaccttctgattgctacgtgactttgtggcttcccactgcctgttctcatcggttacagacgagaacagtgaagaactcctcttctcccgtgtggaaccagagtttccacttcagaatccaccggcagctgaagaacgtgatggagcttaaagtgtttgatcaggatctagtcacaggcgatgacccagtgcttagcgtgctgtttgatgcgggcacactgcgtgccggggaattccggagagaaagtttttctctaagcccgcagggagaaggacggctggaagtggagttccggttgcagtctttggcagacaggggagaatggctcgtaagcaatggagtcctggtggcccgggagctctcttgcctccatgttcagctcgaggaaacgggcgatcaaaaaagttccgaacacagggttcagctggtggtcccgggctcttgtgaagggccacaggaagcttcagtcggcaccgggactttcagatttcattgcccagcctgttgggagcaggaattaagtatcaggcttcaagatgcgcctgaggagcagctcaaggccccgcttagcgcactgccctctgggcaggtcgtgcgtctcgtgttcccaaccagccaggagcctctcatgcgggtggaactgaaaaaggaggcgggcctgcgtgagctggccgtgcgactgggtttcggcccctgcgcagaagaacaagcctttctgagcagaaggaagcaagtggtagccgccgcccttaggcaggccctgcaacttgacggggaccttcaggaggatgagatcccagtggtggcgataatggccactggcggcggaattcgggcgatgacctcgctctatgggcagctagccggcctgaaagagttaggtctactggattgtgtgagctatatcaccggagcaagtgggagcacatgggccctcgctaatctttatgaggatcctgaatggagccagaaggacctggccggacccactgagctgttaaagacacaggtaactaagaataagctgggggtgctcgcccccagtcagctgcaacgctatcggcaagaactagcagaacgggctcgtttgggctatccctcctgctttactaacctgtgggcactgatcaacgaggcgcttctgcacgacgaaccgcacgaccacaagttgtccgatcagcgtgaggctctatcgcacggacaaaacccgctgcccatctattgtgcactcaataccaaggggcagagtctgacaaccttcgagttcggcgaatggtgtgaattctcaccgtacgaggtgggtttccccaagtacggggcctttatacccagcgagctcttcgggtccgagtttttcatgggccaattgatgaagcgactcccagagtccaggatctgttttcttgaaggcatctggtccaatctctacgccgctaacctgcaggattctctttactgggccagcgagccttctcagttttgggaccgttgggttcggaaccaggccaacctggataaggaacaggtcccacttctcaagattgaagaacctcctagtaccgccggccgcatcgctgaattcttcactgacctacttacttggcggcctttagctcaggccacgcacaatttcctgcggggcctgcacttccataaggattatttccagcatccccattttagcacctggaaggctaccacattggacggcctacccaatcagctgactcccagtgagccacatttgtgtctcctggatgttggctacctgataaacaccagctgcctgccacttctacagcctactcgggacgttgacctaattctttccctggactacaacctgcacggcgcttttcagcaacttcaactgctcggacggttttgccaggaacaaggaatcccattccctcctatttcaccttccccggaggaacaactccagccaagagaatgccacacattctcagatcccacttgcccaggcgctcctgccgtgctgcatttccccctggtaagcgactccttcagggaatattcggcccccggggtccgaagaacgccggaagaagccgcagcaggcgaggtgaacctatcatcaagcgattcaccataccattacaccaaggtgacctattcccaagaagatgtcgacaagcttttacatctcacccactacaacgtttgtaataatcaagagcagctgttagaggccctgaggcaggccgtgcagcgaagaaggcagcgccgcccccattag

SEQ ID NO: 9276 - DNA, 1548 bp, synthetic construct
  misc_feature 1..1548: note = source = /note="Description of Artificial Sequence: Synthetic coding sequence"
  source 1..1548: mol_type = other DNA
atggcctggccctacttcctggactgccaccggtacttcacccgggaagacgaaggatgttacgacccattggagaagctgagaggcggcctagaggccgatgaggccctcccctctgggctgccaccaacctttatccgattctcccaccactcttacgcccaaatggtgcgtgtcctgcgtagaacggccagcagatgcgcccatgttgcacggacgtacagtattggacggtccttcgacggccgcgaattactggttatcgaattctcatccagacctggacagcatgaactgatggaacccgaggtgaaactgatcggcaacattcacggaaatgaggtcgcaggcagagagatgttgatttacctcgcacagtacctctgctcggaatatctgttgggaaaccccagaattcagagacttcttaatacaacccgaatccatttgctgccatccatgaacccggacggctatgaggttgccgccgccgagggggcaggatacaacggatggacttcaggaagacagaacgcacagaatctggacttgaacaggaattttcctgatttgacctcagaatattatcgcctagcagagacaagaggcgctcggtccgatcacatccctattccccagcactattggtgggggaaagtcgcaccagaaacgaaagcaatcatgaagtggatgcagaccatcccgttcgtgctgtcagcttctctgcacggcggcgacttggtggtttcctaccccttcgactttagcaagcatccccaggaagagaagatgttttctcctacaccagacgagaagatgttcaaactgttgagcagagcatatgctgatgtgcaccctatgatgatggacaggtccgaaaataggtgcggagggaacttcctcaagcgggggtccataatcaacggagcagattggtattcattcacaggcggcatgagcgactttaattaccttcatactaattgcttcgaaatcacagttgagctgggctgcgtcaagtttccgcctgaggaagcgctctacatcctatggcagcataacaaggaatccctactgaattttgtggagactgtgcatcgaggcataaaaggcgtggtgacggacaagtttggcaagcctgtcaagaacgctcggatttctgttaaaggaatcagacacgatatcactactgcgccggacggagattattggagattgcttcctcccggtatccacattgttatcgcccaagccccggggtatgctaaagtcatcaaaaaagtgatcatccccgctcgcatgaagagggccggtagggtagacttcatcctgcaaccgctgggaatgggtcccaagaactttatacacggcctgcgcagaacaggtccccatgatcccctgggtggcgcatcatcccttggcgaagcaaccgagcccgaccctctgcgtgcccggcgtcagccaagtgccgatggaagcaaaccgtggtggtggtcctacttcacctcgctgagtacccaccgccctcgatggttactcaagtattag

SEQ ID NO: 9277 - DNA, 285 bp, synthetic construct
  misc_feature 1..285: note = source = /note="Description of Artificial Sequence: Synthetic coding sequence"
  source 1..285: mol_type = other DNA
atgcggaccctggccatcctggccgccatcctgctggtggccctgcaggcgcaagccgagccgttacaagccagagcagatgaggtggcggcagcccctgagcagattgctgccgatatccctgaagtagttgtatcgctggcctgggatgaaagtttggcgccaaagcatcctggatccagaaaaaatatggcatgctactgccgtattcctgcctgcatcgccggtgagcggaggtacgggacttgtatctaccaggggcgactctgggcattttgctgttag

SEQ ID NO: 9278 - DNA, 420 bp, synthetic construct
  misc_feature 1..420: note = source = /note="Description of Artificial Sequence: Synthetic coding sequence"
  source 1..420: mol_type = other DNA
atgggcaaccccggcggcgtgggcagcgagcggatgcgggtggcccgtagaacccgaaacgtctgccgctgtcccagagccgctgggcccggggtgccagagcccagggctgcaccactgccactgttagctatggcaccacccccggcttgccgttcgccgatgtccccaccacctccaccgttgctgctgctgctgctatccctggccctgctgggcgcacgggctagggcagaacctgccggcagcgcggtgccagcccagagccggccgtgcgttgattgtcatgcctttgaattcatgcagcgagcattgcaggatctgcgcaaaactgcatgctccctagacgcccggaccgagacccttctattgcaggccgagcgaagagcgctgtgtgcatgctggcctgcagggcattag

SEQ ID NO: 9279 - DNA, 471 bp, synthetic construct
  misc_feature 1..471: note = source = /note="Description of Artificial Sequence: Synthetic coding sequence"
  source 1..471: mol_type = other DNA
atggcccccgccgtgacccggctgctgttcctgcagctggtgctggggcccactctggtgatggacatcaaaatgcagatcgggagtcgcaatttctacaccctgagcattgactaccctcgcgtcaattaccccaagggattccgtggatactgtaacggcctcatgagctacatgcgtggaaagatgcaaaactccgactgtccaaaaatccactatgtgattcatgcgccgtggaaggcaatccagaagttctgcaagtactcggacagcttttgcgagaactacaatgagtactgcacccttacgcaggatagtctgcctatcacggtgtgttctttatctcatcagcagccccccacctcctgctattacaactccactctgaccaatcaaaagctttatctcctgtgctcgagaaaatatgaggccgatcccatcggaattgcagggttgtacagcggcatttag

SEQ ID NO: 9280 - DNA, 444 bp, synthetic construct
  misc_feature 1..444: note = source = /note="Description of Artificial Sequence: Synthetic coding sequence"
  source 1..444: mol_type = other DNA
atgatcatcatggtgatcatcttcctggtgctgctgttctgggagaatgaggtgaacgacgaagcagtgatgtctacactggaacatctccacgtcgattaccctcagaatgatgttcctgtcccagctcggtattgtaatcacatgataatacagcgcgtgatccgcgagccagatcacacttgtaaaaaggagcatgtgttcatccacgagcgacctaggaaaatcaatggaatctgcatcagccctaagaaggtggcctgtcaaaacttatcagcaatcttttgctttcaaagtgaaacaaaattcaagatgaccgtttgccaacttatcgaggggaccaggtatcccgcatgtcgctaccactacagtcctactgagggattcgtgcttgttacttgcgatgacctgcgcccagattccttcctgggttacgtgaagtag

SEQ ID NO: 9281 - DNA, 453 bp, synthetic construct
  misc_feature 1..453: note = source = /note="Description of Artificial Sequence: Synthetic coding sequence"
  source 1..453: mol_type = other DNA
atgcggttcatggccggccccgccggcagccagagcctgggccccctgtgcttccactctagcccccaggcgctgtatacagtgttgttgatcgtgcttgtaatgatgagcctggtgttcggcaagttcgttcctgtaaattgggagccaccacagccacttcccttcccaaagtatctaagatgctaccgatgcctgctggagactaaagaactggggtgtctgttgggttccgacatttgccttacgccagctggaagctcctgcatcacactgcacaagaagaactcttcaggctccgacgtgatggtcagcgattgtcgctccaaagagcagatgagtgactgcagcaacactagaaccagccccgtgtctggtttttggatttttagccagtattgcttcctggacttttgcaacgatccccaaaatagaggtttgtatactccctag

SEQ ID NO: 9282 - DNA, 2742 bp, synthetic construct
  misc_feature 1..2742: note = source = /note="Description of Artificial Sequence: Synthetic coding sequence"
  source 1..2742: mol_type = other DNA
atgggccccgaggccctgagcagcctgctgctgctgctgctggtggcaagcggggatgctgatatgaaaggccattttgacccagcaaagtgtcggtatgccctaggcatgcaggatcgcactatccccgactccgatatctccgcatcctcttcttggtctgacagcacagctgccagacactctcgactcgaatcttcagacggagatggggcctggtgtcccgccggctctgtgtttcctaaagaggaggagtatctccaggtagatctgcagaggctccaccttgttgctttagtgggtactcagggacgacatgctggcggactcggaaaagaatttagcagatcttacaggttgagatattcacgggacggtcggagatggatgggttggaaggatagatgggggcaggaagtgatctctggcaatgaagacccggagggcgtggtgttgaaggacctcggcccacccatggtggctaggctcgtccggttttatcctagggcagaccgcgtgatgtctgtgtgcctccgtgtggagctgtacggatgcttgtggcgggacggtctgctgagctacacggcgcccgtgggtcagactatgtatctgtctgaggccgtgtacttgaacgattccacttacgatggacatactgttgggggtctacaatatggtgggctaggtcagttggctgatggcgttgtgggacttgacgactttcgcaagtctcaggaactccgagtctggccaggttatgattacgtgggatggagtaaccactccttctctagcggatacgtggagatggagtttgaatttgaccgccttcgtgcatttcaggccatgcaggtccactgcaacaacatgcatacactcggagcacgcctacctggcggcgtggaatgcagattcaggcgtgggccagctatggcgtgggaaggcgagcccatgaggcacaatctgggcggcaatttgggggatccgagggccagagcagtgagcgtgccgctcggcggaagggtcgctagatttctgcagtgccggtttctgttcgcaggcccttggctgcttttttctgagatttcattcatcagtgacgtagtaaacaactcctcccccgccttgggggggaccttcccgccagccccctggtggcctcctggcccaccgccgacgaatttttcatccctcgagctcgagcccaggggccaacaaccggtagcaaaggccgaagggtcgccaacagcgattctcatcggctgccttgtcgcaatcattctgctcctcctgctgatcattgccttgatgctgtggcggcttcattggcggaggcttttatctaaagccgagcgcagagttctcgaggaggagctgactgtgcacctttccgtgcccggggatacaatcctcatcaacaaccgacccggaccaagggagccgccgccctaccaggaacccaggcccagagggaatcctcctcattcagcaccttgcgtgcccaacggaagcgccctactccttagtaatcctgcttaccgactgctgctcgccacctatgcccggcccccacgcggtcccggccccccaacacctgcctgggccaaacctactaacactcaggcctatagtggggactacatggaaccagagaagcctggcgcccccctgctcccgccgcccccgcaaaactcagtaccacattacgccgaagcagacattgtcactctccagggcgtcaccggcggtaacacctatgccgtccccgctctgccacctggggcggttggagatggcccaccccgggttgacttccctcggtcacggctgcgcttcaaggagaagctcggggagggccagttcggagaagttcacctatgtgaggtagattcgccacaagacctggtgagcctggactttcctctgaatgttagaaagggacaccctttgttggttgccgtcaaaatcttgcggcccgacgcaacaaaaaacgcgcggaacgacttcctgaaagaggtgaagataatgtctaggctgaaagaccccaatattatacgtttgcttggcgtgtgcgtgcaagatgacccgctgtgcatgatcacagattatatggaaaatggggacctgaatcaattccttagcgctcaccagctcgaggacaaagccgccgagggagctcctggagatgggcaggcagcacaggggccaacgatcagttaccctatgctgctgcacgtggctgcccagatcgcttcgggcatgcggtacttagccacactcaatttcgttcaccgggatctcgcaacacgcaactgcctcgtgggagagaactttacaatcaaaattgccgactttggaatgagccggaacctgtacgcaggcgactactatagggttcaaggcagggcagtgcttcctatcaggtggatggcctgggagtgtatcctgatggggaagttcacgacagcaagcgatgtgtgggcattcggagtcaccttatgggaagtgctcatgttgtgtagagcccagcccttcggccagcttacagacgagcaggtgattgaaaacgcgggcgagttcttccgtgatcagggccgccaagtttatctttccaggcctccagcctgtccacagggactctacgagctgatgctgcggtgttggtcacgagagagtgaacagcggccccccttcagccaactccaccgatttctggcagaagatgccctgaacaccgtgtag

SEQ ID NO: 9283 - DNA, 453 bp, synthetic construct
  misc_feature 1..453: note = source = /note="Description of Artificial Sequence: Synthetic coding sequence"
  source 1..453: mol_type = other DNA
atgcggttcatggccggccccgccggcagccagagcctgggccccctctgctttcactctagtccgcaagcactgtacaccgtgctgctgatcgtccttgtgatgatgtctctcgtgtttggcaaattcgtaccggtcaactgggaacctccgcagcctcttcccttccctaagtaccttcggtgctaccggtgtctcttagagacaaaggagctaggttgtttattggggtccgacatctgtcttactccagccggcagctcttgcatcacactccacaaaaaaaattccagcggttctgatgtgatggtgtcagactgtcgctcgaaagagcaaatgagcgattgttccaacacaagaaccagcccagtgtccggtttctggatatttagccagtactgctttttggatttttgtaacgacccgcagaatagggggctctacaccccctag

SEQ ID NO: 9284 - DNA, 567 bp, synthetic construct
  misc_feature 1..567: note = source = /note="Description of Artificial Sequence: Synthetic coding sequence"
  source 1..567: mol_type = other DNA
atgttccaccagatctgggccgccctgctgtacttctacggcatcatcctcaactccatataccagtgccctgagcactcccagctgacaactctcggcgttgacgggaaggagttccccgaggtgcatttagggcagtggtatttcattgctggggccgccccaaccaaggaagagctcgcgacctttgacccagtagataacattgttttcaacatggctgccggatctgctccaatgcaactgcacctgcgggctacaataagaatgaaggacggtctgtgtgtgccgcgcaagtggatctaccacctcaccgagggcagcacggatctgcgaactgagggaagacccgatatgaagactgagctgttcagctcttcctgtccaggaggaatcatgctgaatgagaccggccagggatatcagaggtttctgctctacaatcgcagtccacaccccccagagaaatgtgtggaggagttcaagtcacttacttcgtgcctcgactctaaggccttcctgctcaccccacgcaatcaggaggcttgcgaactgagtaacaactag

SEQ ID NO: 9285 - DNA, 2535 bp, synthetic construct
  misc_feature 1..2535: note = source = /note="Description of Artificial Sequence: Synthetic coding sequence"
  source 1..2535: mol_type = other DNA
atgggccccggcgcccccttcgcccgggtgggctggcccctgcccctgctggtggtgatggctgccggtgtcgcgcccgtgtgggcaagccatagccctcacctgccgagacctcactcacgggtccctccacatccctcatctgaaagacgggccgtctatatcggcgccttgttccctatgtcagggggctggccggggggtcaggcttgccagcccgccgtcgaaatggctcttgaggatgtgaattctagacgggatattctgcccgattatgagttaaaactgatccaccacgactcgaagtgtgatccaggccaagccacaaagtacctatacgaactcctctacaacgacccgattaagattatcctaatgcctgggtgcagttctgtgagcaccttggtagcagaagctgctcgtatgtggaatttaatcgtgttgagttacggaagctcttcacctgccctgtctaacaggcaacggttccccaccttctttaggacgcacccctcagccacactgcataacccaacaagggtgaaacttttcgaaaaatgggggtggaagaaaatcgcgactatccagcagactacagaagtcttcacctccactttggacgatttggaagagagagtgaaggaggcaggtattgagattacatttagacagagcttttttagtgatccagccgtgccggtgaagaatctgaaacggcaggatgctcggatcatcgtgggcttgttttacgagaccgaggcacgcaaagtgttttgcgaggtatacaaagagcggttgttcggcaagaaatatgtgtggttcctaatcgggtggtatgccgacaactggtttaaaatttatgatccgagcatcaattgcactgttgacgagatgacagaggccgtggagggccacattactaccgagattgtgatgctcaatcctgctaatacccgctctatcagcaacatgacatcacaagaattcgttgagaagttaaccaaaagacttaagcgacacccggaggaaactgggggctttcaggaggccccgctggcttacgacgccatctgggccctggcactcgctctgaacaagacaagcggaggtggtggaaggtcaggggtgcgcttagaagacttcaattataataatcagacaattaccgaccaaatctatcgggcaatgaacagcagctctttcgagggagtatccggccatgtggtattcgatgcgtccggttcacggatggcctggaccctgatcgaacagctacaggggggaagctacaaaaagatcggctactacgatagtacaaaggacgacctgtcctggtctaaaactgacaaatggatcggcggtagccctccggcagatcagaccctggttattaagacatttcgattcctgtcccaaaaactgttcatttccgtctcagtcctgtcgtcgttaggtatcgtgctggctgtcgtgtgcttgtccttcaacatctacaacagtcatgtgcgctacatacaaaacagccagccaaacctgaacaatttgaccgctgtggggtgctccctggccctcgccgcagtgttccctctcggcttggatgggtatcacatcggccggaaccaatttccttttgtatgtcaggctagattatggctgctgggtttggggttcagcctgggctatggctcaatgttcacaaaaatatggtgggtgcatactgtgtttacaaagaaagaggaaaaaaaggaatggaggaagacactcgagccctggaagttgtacgcaaccgtgggcctgctggtgggcatggatgttctgacgctagcaatatggcagatcgtagatcctcttcacaggactatcgaaacattcgccaaagaagaaccaaaggaggacattgatgtctctatccttccacagctcgaacactgtagttctagaaagatgaatacatggctcgggatcttctatggttataagggcctgttgctcctgctcggtatatttctggcctacgagaccaaatctgtgagtacagagaagatcaacgatcatagggcagtgggtatggcgatctacaacgtggcagttctgtgcctcatcaccgcccctgtgactatgatactgagctcccaacaggacgctgccttcgcctttgcttcactggctatagtgttctcctcttatatcacactagttgttctgttcgtacccaaaatgcgaaggctgatcacgcgcggggaatggcagtccgaagcccaagataccatgaaaactggttcaagtaccaacaataatgaagaggagaaatctaggttactagaaaaggagaaccgggagctcgaaaagatcatcgccgagaaagaggaaagggtgtccgaactgaggcatcagctgcagagtagacaacaactgcgctctaggaggcaccctcctacccccccagagcctagcgggggacttccccgaggtccgcctgaacctcccgatcgcctgtcctgcgatgggtctcgagtgcatctgctttataaatag

SEQ ID NO: 9286 - DNA, 237 bp, synthetic construct
  misc_feature 1..237: note = source = /note="Description of Artificial Sequence: Synthetic coding sequence"
  source 1..237: mol_type = other DNA
atgggcagcggcctgcccctggtgctgctgctgaccctgctgggcagttcacatgggaccggcccggggatgacactgcaactcaaactaaaagagtcatttctgacgaattcctcgtatgagagctcgtttctggagctcttagagaagctgtgcctgctgttgcaccttccaagcgggacctcggtgacactgcaccatgccaggagccaacaccacgtagtgtgtaatacatag

SEQ ID NO: 9287 - DNA, 2700 bp, synthetic construct
  misc_feature 1..2700: note = source = /note="Description of Artificial Sequence: Synthetic coding sequence"
  source 1..2700: mol_type = other DNA
atgctgctgctgctgctgctggcccccctgttcctgcggccccccggggctggcggagctcagactcccaacgccacctccgagggctgtcagatcatccaccccccttgggaaggggggatccgttatcgcgggctgacacgggatcaggtgaaggcaataaattttttacctgttgactacgagatcgaatatgtatgccgcggagaaagggaagtagtggggccaaaggtgcgtaaatgcctggcgaacggatcatggaccgatatggacaccccctcaagatgtgtcaacaggacaccccacagcgaacgaagagccgtctacatcggagcactattcccaatgagtggcgggtggcccggggggcaggcgtgtcagccagctgtcgagatggccttggaggacgtgaattctcggcgggacattctgccagattacgaactgaagctcatacaccatgactccaaatgcgatcccggccaggctacgaagtatctgtatgaactgctgtacaatgaccccatcaagataatcctgatgcctggatgcagctctgtttcaacactggtggcggaggccgccaggatgtggaacctgatcgtccttagctatggatcctcatcaccggccctgagtaacaggcagagattccccactttctttcgtactcacccttctgccaccctgcataatcctacaagggtaaaactgttcgagaagtggggttggaaaaagatcgccactatccaacagaccacagaggtttttacttcaaccctggacgacctcgaagagagagtgaaagaagccggtatcgagattacgtttaggcagagcttcttctccgacccagccgttcccgtgaagaacctgaagaggcaggatgctcgaataatcgtcgggctcttctacgaaaccgaggcccggaaggtgttctgcgaggtgtacaaagaacggctgtttgggaaaaagtatgtgtggttcttaattggatggtatgcggacaactggtttaagatatatgaccctagcattaattgtaccgtcgacgaaatgaccgaagcagtggagggtcatataacaactgagatcgttatgctcaacccagccaatacacggtctattagtaacatgacctcccaagagttcgtggaaaagctgacgaagcggttaaaacgccacccagaagagactggaggatttcaggaggcaccccttgcatacgacgcgatctgggctttagccctagctttgaacaagactagcggcggcggcggccgatctggtgttagactagaggacttcaactataataatcagactattactgatcaaatctatcgggcaatgaactcctctagcttcgagggagtgagtggccatgttgtattcgatgcctctgggtcgaggatggcttggacccttatagagcagctccagggcggaagctacaagaaaatcggatactacgatagtacaaaagacgacctttcctggtccaagacggacaaatggattggcggctctcctcccgctgatcaaacccttgtcatcaagacattccgatttctgtcccagaaactcttcatcagtgtctcagtgctttcatcgcttggcatcgttctggccgtggtttgtctgagctttaatatttacaactctcacgtgcggtatattcagaattcccaaccaaatctgaacaatctgacagctgtgggctgtagcctagcactcgccgccgtcttccccctgggcctcgatggatatcacatagggcgtaatcagtttcctttcgtctgccaggcccgactgtggctcctgggtctgggttttagtttagggtacgggtcaatgttcacaaaaatctggtgggttcatactgtttttactaaaaaggaagagaaaaaggaatggaggaaaaccctggaaccatggaagctttatgctaccgtcggattgctggtgggaatggacgtgctgactttagcaatctggcagatcgtcgatcccttgcaccgcacgatcgaaacgttcgccaaggaggagcctaaggaagacatagatgtcagtattttgccccagctggagcactgctcctctcggaaaatgaacacctggttaggaatcttctacggatacaagggtctcctcctcctactcggcatcttcctggcatacgagacgaaaagcgtgtccacagagaaaatcaacgaccaccgagccgtcggaatggcgatctataacgttgctgttctgtgtctgatcactgctcctgtaacaatgatcctgagttctcagcaagacgcggccttcgccttcgcctccctggccatcgtgttttcttcttacatcaccttggtggttctcttcgtaccgaaaatgaggaggctcatcactagaggtgaatggcagagtgaggcccaggacacaatgaagactgggagtagtacaaacaataatgaggaagagaagtctcgattacttgaaaaggaaaatagggagctcgagaaaattattgccgaaaaggaggaacgggttagcgagttgaggcaccagctgcagtctagacagcaactccgaagcagacggcacccacctactccccctgagccttcaggagggttacctcgtgggcctccagagccacccgatagattgtcgtgcgatggaagcagggtgcacttactctataaatag

SEQ ID NO: 9288 - DNA, 2886 bp, synthetic construct
  misc_feature 1..2886: note = source = /note="Description of Artificial Sequence: Synthetic coding sequence"
  source 1..2886: mol_type = other DNA
atgctgctgctgctgctgctggcccccctgttcctgcggccccccggagccggcggcgctcagacccccaatgccacatcagaaggctgccaaattatacaccccccatgggagggcggaattcggtatcgggggcttaccagagaccaggtgaaagccatcaactttttgccagttgactatgagatcgaatatgtctgccggggggagcgggaagtagttggccccaaagtgaggaagtgtctcgctaatggaagctggactgatatggacaccccgtctcgctgtgtgcggatctgcagcaaaagctacctgacgctggagaacgggaaagtgtttttgaccggtggggaccttcccgccctcgacggcgccagggtggattttcggtgtgaccctgattttcacttggtaggcagctctcgcagcatttgttctcagggacagtggtcaacccccaagccccattgccaggttaataggaccccccacagtgagcggcgtgccgtgtatataggggcactgtttcccatgagcggaggatggccaggcggacaagcctgccagcctgcagtggagatggccctcgaggatgtgaattcaagacgggacattcttcccgactatgagcttaagttaatccaccacgactctaagtgtgatcctggtcaggccactaagtatctgtatgaactcctgtacaatgacccgatcaagattatacttatgcctgggtgcagctcagtttccacactggttgctgaagccgcaaggatgtggaatcttatcgtcctgagctacgggtctagcagccccgccttgagtaacagacagaggttccccacattcttccgaacccatccttcagccacattgcataatcccacccgggttaagctttttgaaaaatggggctggaagaagattgctacgattcagcagacgactgaagtcttcacaagtacccttgatgatctcgaagaacgggtgaaagaagcggggatcgaaattacattccggcaatcctttttcagtgatcccgccgtgccagtaaaaaacctcaagaggcaggacgcccgcatcatcgtaggcttattctacgaaacagaggcacggaaggtattctgtgaagtctataaggagcgtctctttggaaaaaagtatgtgtggttcctgatcggttggtatgccgataattggttcaagatttacgaccccagtattaattgcacagttgacgagatgacagaagcagtcgagggtcatatcacaactgaaatcgtaatgctgaaccccgccaatacaagatctatctccaacatgacctcgcaagagttcgtggagaagctgaccaagcgtcttaaaagacacccagaggaaacggggggctttcaggaagctccactggcctatgatgcgatttgggccctggcccttgccttgaataaaaccagcggtgggggcggccgatcgggcgttaggttagaagacttcaactataacaatcaaactattaccgaccagatctaccgtgccatgaactcaagttctttcgaaggcgtgtcaggacacgtggttttcgacgcttcaggcagtcgcatggcatggacactcatcgaacagttacaggggggcagctataagaagatcggttactatgattccaccaaggatgatctaagctggtctaaaaccgacaagtggattggaggttcccccccagctgaccagaccctggtgatcaagacttttagatttctgtcccagaagctttttatatcagtgtcagtgctttcatccttgggcatcgtccttgccgtggtttgcctgtcttttaacatctataacagtcacgtccggtatatccagaactcccaacctaatctcaacaatctgactgcagtgggttgctcattagccctggccgctgtttttccccttggattggatggttatcacataggacgcaatcagtttcccttcgtctgtcaggcaagactgtggctactcggcctggggttctctctggggtacgggagcatgttcactaaaatatggtgggtccacaccgtctttacaaaaaaggaggagaagaaggagtggcggaagacattggagccatggaagctttacgccacagtaggcctactagtaggaatggacgtcctcactctggccatttggcagattgtagaccccctgcaccgaaccatcgaaacctttgcaaaagaagagcccaaagaagacatcgatgtgagtatattgcctcaactagagcattgttctagcaggaaaatgaatacctggttgggcatcttctatggatataaggggcttctgcttctcttgggaatctttctggcttacgagaccaagtctgtgtctacagagaaaattaatgaccaccgcgccgtcggaatggccatctataatgtggcagtgctttgcctgataactgccccggtgacaatgatcctctcatcacaacaggacgccgcattcgcctttgcgtctctggctatcgtgttttctagctacataacactcgtggtgctgttcgtaccgaagatgcggcgactcatcacccggggcgagtggcagagcgaagcgcaggacaccatgaagacgggatccagtaccaataataatgaggaagagaagagcagactgcttgagaaagagaacagagaactggaaaagatcatcgcggaaaaggaggagcgggtctcagagctcagacatcagctccagagcagacagcagctcagaagcaggcgtcatcctcccactcccccagagccttctggagggctccccagaggaccccccgagcccccggacagattaagttgtgatggcagtcgggtacatctcctctacaagtag

SEQ ID NO: 9289 - DNA, 2535 bp, synthetic construct
  misc_feature 1..2535: note = source = /note="Description of Artificial Sequence: Synthetic coding sequence"
  source 1..2535: mol_type = other DNA
atgggccccggcgcccccttcgcccgggtgggctggcccctgcccctcctggttgtgatggccgcgggtgttgcccccgtttgggcgtcccactctccccacttaccccgccctcactccagggttccccctcaccccagttccgagcggagagcagtctatatcggcgctctgtttccaatgtctggtggatggcccggcggccaggcttgtcaaccggccgtcgagatggccttggaagacgtgaattctcggagggatatcctgcctgattacgaattaaagttgattcatcacgattcaaaatgtgacccaggtcaagccaccaaatacctttacgaattactgtacaacgaccccataaaaattattctcatgccagggtgttcctctgtgtctactctggtggcggaggctgcaagaatgtggaacttgattgtgcttagctacggctctagcagtccagccctcagtaacaggcagcggtttcctaccttcttcaggactcatcctagtgccactctccacaaccctacaagggtgaaactcttcgaaaagtgggggtggaagaagatcgcaactatccagcaaacaaccgaagtgtttacgagcacactggatgatctcgaagagcgggtaaaggaggcaggtatcgagattaccttccggcagtcttttttctcggatccagctgtgccggtgaaaaacttgaaacgccaggacgcccgcatcatcgtaggactcttctatgaaacagaggcacgaaaggttttctgcgaggtgtacaaagagagattattcggcaaaaaatacgtttggttcctcatcgggtggtacgcagacaactggttcaagatctatgatcctagcataaactgtacagtcgacgaaatgaccgaggcagtagagggtcacatcaccactgaaattgttatgctcaatccagcgaatacacgatctatctctaatatgacttcgcaggaatttgtggagaaactgaccaagcgcctgaagcgacaccccgaggaaactgggggattccaggaagccccccttgcctatgacgccatctgggcactggcacttgcactgaacaagacatcaggtggaggcggcagatccggcgtgcgattggaggatttcaactacaataaccaaaccatcacagatcagatctatcgagctatgaattcttcttcttttgagggggtgtcagggcacgtggttttcgacgcgagtggtagcaggatggcatggacactgatcgaacagcttcagggcggaagctataagaaaattggttattacgacagtactaaagacgacctgtcctggtctaagaccgacaagtggatcggagggagccctcctgcagaccagactttggttatcaagacatttcggttcctgagtcagaagctttttataagcgtgagtgtgttgagctccttaggcatagtgctggctgtagtgtgcttgtcattcaacatctacaacagccacgtccgctatatacaaaactcccagccgaatctgaacaatctgaccgcagtcggatgcagtttggctctggctgccgtattccctcttggactcgacggataccacattggtcgaaatcagttccctttcgtgtgtcaagcccggctatggctgctagggctcgggtttagccttggctatggaagcatgtttactaagatatggtgggtgcacaccgttttcactaaaaaggaggagaagaaggagtggcgcaaaaccctggagccctggaaactctatgccactgtaggcctgctggtggggatggatgtcttaaccttggccatttggcagatagtggatccactgcatagaaccatagagacgtttgccaaggaggagcccaaagaggatatcgatgtctcaatcctccctcaactggagcattgttcttcccggaagatgaatacctggctgggcattttttatggatataaagggctgttgctcctcttgggtattttccttgcctatgagacaaaatctgtgtcaactgagaaaattaatgaccatcgggcagtgggaatggcaatatacaatgtggctgtgctgtgtctgatcactgcacccgtgactatgatcctctctagccagcaggacgctgccttcgcattcgcctccttggcaatcgtgtttagttcttacattaccctggtggtcctgttcgttccgaaaatgcgcagattgatcacacgcggagagtggcaatctgaggctcaggacacaatgaagaccggcagctctaccaacaacaatgaagaggagaaatcgagacttcttgagaaagagaatagggagctggagaagattatcgccgagaaagaggagagagtaagcgagctgcgtcatcaattgcagtccagacagcagttgcggtctaggagacaccccccgacaccccccgagccgtctggagggctgccccgtggtccgcctgaaccacctgaccgcttatcttgcgatggatcacgagtacacctgctgtataaatag

SEQ ID NO: 9290 - DNA, 2535 bp, synthetic construct
  misc_feature 1..2535: note = source = /note="Description of Artificial Sequence: Synthetic coding sequence"
  source 1..2535: mol_type = other DNA
atgggccccggcgcccccttcgcccgggtgggctggcccctgcccctcttagttgtaatggccgctggcgtggcacccgtctgggcctcacacagccctcatctaccgagaccccactccagggtccctccacacccctcatctgaaagacgcgccgtttatattggtgcattattccccatgtccggcggctggcccggcgggcaggcctgccaaccagctgtggagatggcccttgaagatgtgaattccaggcgcgacatactgcctgactacgaactgaagttgatacaccatgactcaaagtgcgatccgggtcaagctacgaaatacctctacgagcttctgtacaacgaccctattaagatcatacttatgcccggatgtagttctgtatctaccctggtggcggaagccgcacggatgtggaacttaatagtccttagttacggctcaagctctccagctctcagcaacaggcaaaggttccccacatttttcaggacccatccttcagccaccttgcacaaccctaccagagtgaagctgttcgaaaaatggggttggaaaaagatcgccaccattcagcagaccaccgaagtattcacatcaacattagacgatctggaggagcgcgtaaaagaagccggtatagaaatcacctttcggcagtcattcttctcagatcccgcagtcccagtcaaaaacctcaagcgccaagatgcccgtattatcgtgggactgttctacgaaactgaagcccggaaggtcttttgcgaggtgtacaaggaaagactatttggtaaaaaatatgtgtggttcctaatagggtggtacgctgacaactggtttaagatctacgacccctctatcaactgtacggtggacgagatgactgaggctgtggagggccacattaccactgagattgtcatgcttaatccagccaacacgcggtccatcagtaacatgaccagtcaggaatttgtggagaagctgacaaaaagattgaagagacatcctgaggaaactggcgggtttcaagaggcgccactggcctacgatgcaatctgggcattggcactggccctcaataaaacttcaggtggtggcggacggtccggtgtgcgtctggaagatttcaattacaataatcagaccatcaccgatcaaatctacagagcgatgaacagctctagtttcgaaggagtctccggacatgtagtgtttgacgcttccggctctcgcatggcctggactctcattgagcaactgcagggcggctcgtataagaagattgggtattacgactctaccaaagatgatctgtcttggtctaaaacagataaatggataggcgggagtcctccagccgatcagaccttggtcattaaaaccttccgttttctctctcagaagctgttcatctccgtatcagtactctcttcgctggggatcgtcctggctgtggtgtgtctcagctttaacatctacaattctcacgtcaggtatattcaaaactcacagcccaatttgaataatctgacagccgtcggatgttccttggccctggctgccgtattccctctggggttggacggctatcatatcggcaggaaccagttcccctttgtctgccaagccaggctctggttgctgggtctgggattttctttgggttatggctcaatgttcaccaagatttggtgggtacatacagtctttactaagaaagaggaaaaaaaggaatggcgcaagacgctcgagccatggaagctctacgctacagtgggcctcttggtcgggatggacgttctgacattggctatttggcagattgtggatcctttgcatcgaacgattgagacctttgcaaaagaagagccaaaagaagacatcgacgtctcaatcttgcctcagctggaacactgcagcagccgcaagatgaatacctggctgggtatattttacggttacaaaggcctcctgctcctgttgggtattttcctggcctatgaaaccaagagtgtaagcacagaaaagatcaacgatcacagggcagtgggtatggccatttataatgtggctgttctgtgtcttatcacagcccccgtgacaatgattctgtccagccagcaagacgctgccttcgctttcgctagcttggccattgtgttttcttcctacattactctggtcgttctgttcgttcccaaaatgcgcagactgattactcgaggggagtggcagagcgaagcccaggacaccatgaaaaccgggtctagcaccaacaataatgaggaggaaaaatcccgccttctggaaaaagagaatagggagcttgaaaaaataattgcagaaaaagaagagcgcgtgagtgaattaagacaccaacttcaaagcagacagcagcttagatcccgtcggcatcctcccactccacctgaaccatccggcggactccccagaggcccacctgaacccccagataggttgagttgtgatggaagcagagtgcacctgctctacaaatag

SEQ ID NO: 9291 - DNA, 2700 bp, synthetic construct
  misc_feature 1..2700: note = source = /note="Description of Artificial Sequence: Synthetic coding sequence"
  source 1..2700: mol_type = other DNA
atgctgctgctgctgctgctggcccccctgttcctgcggccccccggagctggtggtgcgcaaacccctaatgcgacgagtgaaggctgccaaatcattcaccctccttgggaggggggcattaggtacaggggcctcacacgcgatcaagtcaaggccattaacttccttccagttgattatgagattgagtatgtgtgtcgaggggagagagaggttgtcggaccaaaggttagaaagtgcctcgctaacggaagctggacggatatggatactcccagtaggtgcgtaaatagaacgccacattctgaaaggcgggctgtgtatatcggagcgttatttcccatgtctggcggatggccaggagggcaggcctgtcagccagcagtggagatggccttggaggacgtcaacagccgcagggatattcttcccgactacgagctgaagctgatccaccacgactcaaagtgcgatccaggccaagcaaccaaatacctgtacgagctgctgtacaatgaccccattaagataattctgatgccaggatgctcttcggtgtcgaccctggtggctgaagccgctagaatgtggaatttgatagttttaagttatggaagctcctctcccgccctttctaacagacagcggttccctacgttcttcaggacccacccctcagctacgctccataaccctacacgggtgaagttattcgagaagtggggatggaaaaaaattgcaactatccaacagaccaccgaagtgtttacctctacgttagacgacctggaggaacgcgtgaaggaggccggcatcgaaattacctttcggcagagcttctttagtgatcctgctgtacctgtaaagaatttaaagcgccaggatgcgcgaattattgtgggccttttctacgagactgaggcgaggaaagtgttttgtgaggtgtacaaggaacgactttttggtaagaagtatgtgtggtttctcatcgggtggtacgccgataactggtttaagatttacgatccaagcataaactgtaccgtggacgaaatgaccgaagccgtggagggtcatataaccaccgagatcgtaatgctgaaccctgccaacacacggtccatatccaacatgacttctcaagaatttgtcgagaaactcacaaagcggctgaagcgccaccccgaggagacaggcggattccaggaggccccactggcctacgacgcgatctgggcactcgctctcgccctgaataaaacctctggcggcggcggacgctctggcgtaagactggaggattttaactataataatcaaaccataacggatcagatctacagggcaatgaactcaagcagttttgaaggggtcagcgggcatgtcgttttcgacgcctccgggagtagaatggcctggactctgatcgagcaactccagggggggtcctacaagaaaatcggctactatgactccaccaaggatgacttgtcttggagcaagactgacaagtggatcggcgggagtccaccagctgatcagaccctggtgatcaagacgtttcgattcctctctcagaaacttttcatttctgtaagcgtgctttcctcattggggattgtgctggcagtggtctgcctctcatttaatatctacaatagccacgtcaggtacatacagaacagccaacccaacctgaataatctgacagcagtcggttgttccttggcattggcggcagtatttccactggggctggacggatatcacatcggacgtaaccagttccccttcgtttgtcaggccaggctgtggcttctgggtttaggcttttctctggggtacgggtccatgtttactaagatctggtgggtccacaccgtgttcactaagaaggaggagaaaaaggaatggagaaaaaccttggagccttggaaactgtatgcaacagtaggccttctggtgggcatggatgtgctcaccctggctatctggcagatagtggatcctttgcatagaaccatcgagactttcgcgaaggaggagccgaaggaagacattgacgtgtccatattgccccagcttgagcactgctccagcagaaagatgaacacatggctcggcatattctacggctacaaagggctcttgcttctgctcggaatttttctggcatacgaaaccaagtcggtttcgactgagaaaattaacgaccacagggccgtgggtatggccatctacaatgtcgccgtcctctgcctgatcaccgcgcctgttactatgatcctgagcagtcagcaagacgcagcctttgcatttgcttccctcgctatcgtattttcctcttatatcactctggtggtactgttcgtaccaaagatgcggagactgatcactcgaggggagtggcaaagcgaggctcaagatacgatgaaaacaggttctagcacaaacaacaacgaggaggaaaagagtcggctgctagagaaagagaaccgtgaactggagaagattatcgcagaaaaagaggagagagtttccgagctgaggcaccagctacagagcaggcaacaactgcgtagtcgaagacaccctcctaccccccccgaaccgtcagggggactgcccagagggccgccagaaccacctgatcggttgtcctgtgatggctcgcgcgtccatctcctgtacaaatag

SEQ ID NO: 9292 - DNA, 2886 bp, synthetic construct
  misc_feature 1..2886: note = source = /note="Description of Artificial Sequence: Synthetic coding sequence"
  source 1..2886: mol_type = other DNA
atgctgctgctgctgctgctggcccccctgttcctgcggccccccggtgccggcggtgcgcagacgccgaacgctacgtccgaaggctgtcagattatccatcccccttgggagggcgggatccggtatcgggggctgaccagagaccaggtgaaggcgatcaattttctgcccgtggactacgagatcgagtatgtctgccgcggtgagcgcgaagttgttggacctaaggtgcggaaatgcctggccaatggaagttggacagacatggacacaccttctagatgtgttaggatctgctccaaatcctatctaaccctggaaaacggaaaggtctttctgacgggcggagacttgccagcactggatggcgcacgagtggactttaggtgtgacccagattttcacctggtcggcagcagccgatcgatttgtagccaagggcagtggagtacaccaaagccccattgtcaggttaatcgcacaccgcactcagaaaggagagccgtgtacatcggggcccttttcccgatgagtgggggctggcctggcggccaggcatgccagcctgcagttgagatggcgctcgaagacgtcaacagccggagagatattctgcccgattatgaattgaaattgattcatcatgatagtaaatgtgaccctggacaggccactaagtatctttatgaattgctgtataacgaccctattaagattatactgatgcctggctgtagttccgtgtctactctcgtggcggaggctgcgagaatgtggaatctgatcgtactgtcttatggttccagctcaccagcgctcagcaatcgacagcgtttcccaacattcttcaggactcacccaagtgctacgctgcataaccctacacgcgttaaattgttcgaaaaatggggctggaaaaaaattgccaccatccagcagactacggaggtgtttacctccacgttggatgatctcgaggaacgggtgaaggaggccggcattgagatcacattccggcaatcttttttcagcgacccagctgtgcctgtcaagaatctgaaaagacaggatgctaggatcatcgttggtcttttttatgagacagaggctcgcaaggttttctgtgaagtatacaaggagcgcttattcggcaagaaatatgtctggtttctcatagggtggtatgcggataactggttcaagatttatgatccatcaataaattgtactgtggacgagatgaccgaggcagttgagggccacatcacaaccgaaatcgttatgctgaatccggccaacacccgctcgatctcaaacatgacgtcacaggagtttgtagaaaaactcacaaagagactaaagagacacccagaggaaaccggtggattccaagaagccccacttgcttacgacgccatatgggctctggctctggctctgaacaagacgagcggtggtggtggcagatccggcgttcgccttgaggattttaactacaataatcagacaatcacagatcaaatctaccgggcaatgaattcttcatccttcgagggggtgtccggccacgttgttttcgacgcttccggaagccggatggcatggacactcatcgaacagctccaaggggggtcatataaaaaaattggctattacgactctaccaaagacgacctctcgtggtcgaaaacagacaaatggatcggcgggagccccccagcagaccaaacgcttgttatcaagacttttcgcttcctgagtcagaagcttttcataagtgtaagtgtgctctctagcctggggattgttctcgcggtggtgtgtctgagcttcaacatttataattcacacgttaggtacatacagaacagccagccaaacctcaataacctgaccgcggtagggtgctccctagccctggccgctgtcttcccgctgggtttagatgggtaccatatcggtaggaatcagttcccatttgtgtgccaggcaagattgtggctccttggccttggcttctcacttggatacggatcgatgtttacaaaaatctggtgggttcacaccgtgttcacaaaaaaggaggagaaaaaggagtggagaaagaccttagaaccctggaaactctacgccactgttggactgctggttgggatggatgtgcttaccctcgccatttggcagatcgtggatcccctccacaggacaattgaaacatttgccaaggaagaaccaaaggaggatattgatgtctctatattgccacaactcgaacattgtagcagtcggaagatgaatacctggctgggtatattttatggttacaaggggctcctgctgcttctcgggatttttctcgcttacgaaactaaatctgtgagcactgagaaaatcaacgaccacagagcagtcggcatggccatatataacgtggcagtgctctgcctgataaccgcgcccgtcaccatgatcttgtcttcccagcaggatgctgccttcgccttcgctagcctggctattgtgttttcatcttacatcactctagtagtgctgtttgtaccaaaaatgcgacgcttaataacccggggagagtggcagagtgaggcccaagatacaatgaaaactggctcaagcaccaacaacaacgaagaagaaaagagccgcctccttgagaaggaaaacagagaactcgagaagataatcgctgagaaggaggagcgtgtgagtgaactcagacaccagttgcagagtcgtcagcagctgcgctcccggagacatccccccaccccccctgaaccatccggagggctgccaaggggcccacctgaacccccggacaggcttagctgcgatggctcaagagtgcatctgctctacaagtag

SEQ ID NO: 9293 - DNA, 2535 bp, synthetic construct
  misc_feature 1..2535: note = source = /note="Description of Artificial Sequence: Synthetic coding sequence"
  source 1..2535: mol_type = other DNA
atgggccccggcgcccccttcgcccgggtgggctggcccctgcccctgcttgtcgtcatggccgcaggcgtggctccggtgtgggcaagccattcccctcatcttcctcgaccccattctagggtgccgccgcacccaagctcggaacgacgtgccgtttacatcggggccttgtttccaatgagcgggggctggcccggaggccaggcatgtcagcctgccgtagaaatggcgctggaagacgtgaacagcagaagagacattctgccagattatgaacttaagttgatccaccatgatagtaaatgcgacccggggcaggcgacaaaatatctctatgagttactgtataatgatccaattaagataattcttatgcccggttgttcatccgtttcaacacttgtcgccgaagctgctcgcatgtggaatctcatcgtgttgtcctacgggagcagctctcccgcgctcagcaacagacaaagattcccaacatttttcagaacacatccttcagctacccttcacaaccccacccgagtaaagctgtttgagaagtgggggtggaagaagatcgccaccatccagcagacaaccgaggtattcacatccacattggacgaccttgaggagcgggtcaaagaggcgggcatcgaaattacgtttcgacagagctttttctctgacccagctgttcccgtcaaaaatctcaagaggcaggacgcaaggattatagtggggcttttctatgaaactgaggcccggaaagtattttgcgaggtctataaggagcggctcttcggtaaaaaatacgtttggttccttatcgggtggtatgcagacaactggttcaagatttatgacccaagtatcaactgtactgttgacgagatgaccgaggcagtggagggccacattaccacggagatagtcatgctgaatcctgcaaataccaggtctatctcaaacatgacaagtcaagaatttgtggagaaacttactaagcgattaaagaggcatccagaggagactggaggctttcaagaggcccccctagcctacgatgccatatgggctttggccctggccctaaataagacatctgggggcggggggaggtccggagtccggctagaggatttcaattacaacaaccagactatcacagatcagatctaccgggcaatgaattctagttctttcgaaggagttagcgggcatgtcgtcttcgacgcaagcggcagcaggatggcctggactctcatcgaacagctccagggcgggagctacaagaagatcgggtattacgactctaccaaggacgaccttagttggagcaagactgacaagtggattggcggaagcccacccgctgaccaaactctggtgattaaaactttcaggttcctgagtcaaaagctgttcatctccgtctctgtgctgagttcgctagggatcgtgctcgcggtggtgtgcctgtcttttaacatttataatagccacgttcgatacattcagaacagccagccaaatctaaataatctgacggcagtgggttgctccctcgccctggccgcagtttttcccctaggtctggacggctaccatatcggccggaaccaatttcccttcgtctgccaggcacgcctctggttgttaggtttgggtttttctctcggctacggatcaatgttcaccaagatctggtgggtacataccgtttttacaaaaaaagaagaaaaaaaggaatggcggaagactctagagccatggaagttgtatgctactgttggcttgctcgtaggcatggacgtgctgacactagcaatttggcagatcgtcgatccactgcaccgcacaatcgaaactttcgcgaaggaagaacctaaagaggatatcgacgtcagcatcctgccacaactggagcactgcagctcacggaagatgaacacatggttagggatcttctatggctataaaggactcctgctcctgctgggtatattcctggcctacgaaacaaaatccgtgagcaccgaaaaaatcaacgaccaccgggctgtcgggatggccatctataacgtggctgtgctgtgtctgattactgcccctgtcaccatgattctgtcctcacagcaggacgctgcgtttgcatttgccagcctggctatcgtgttttcgagctacattaccttagtggttctattcgtgcctaaaatgaggcgcctgataacaagaggcgaatggcagtcagaagcacaggacactatgaaaactggaagttctactaacaataatgaggaagaaaagtctaggctactcgagaaggagaaccgcgaactggaaaaaataatcgccgaaaaggaagagagagttagcgaacttagacatcagctgcagtccaggcaacagttgagaagtaggcggcatccgcccacgcctccagaaccaagcgggggcctgccccgggggccaccagagccaccagatcgccttagctgcgacggatctcgcgtccacctgctctataaatag

SEQ ID NO: 9294 - DNA, 3090 bp, synthetic construct
  misc_feature 1..3090: note = source = /note="Description of Artificial Sequence: Synthetic coding sequence"
  source 1..3090: mol_type = other DNA
atgccccccaccaagagcgtgagcgagcccgtgcccttcgagaccgaggccccatcgatgacaatcgtgccgaccacagacatcgaacccgtcacggtgcggaccgaagccacggtcaccacgctggccccaaagacctcccagcgcacgcgtaccaggaggccccgccccaagcacaagacaaccccacggcccgaaactctgcaaaccaaattggactttggacctatcactcccgggacttcatccgcaccaacaactacgacaaaacggacacgtagaccacacccaaagcctaagaccacccctcatccagaggttcctcagaccaaactggttcccgccaccattctggaacccgtgcttcgcactgaggccagcgggaccactgccgtccccgccacaatttttgaacctgtgtcgcctatcaaagaagcaccgggcaccacttttgtgcccgtcactgacctcgaacctgtcacctttagaaccgaaattccagccacaaccctcgcaacgaaaacttctaagcggactaggccacccagaccacggccaaagacaactccatcaccccaggctccagagactaagccggtccctgcaacagttcttgagcccgttacgctgagaccagaagcctctaccaccctggcttctaaaacctcacagagaacgcggaggcctcgcctgagaaccaagaccacaccgcgaccagaggcgcccgaaagtaaaccagtgccaaccgccgaactgaagccagttaccctcagaacagaaacttgggttacaacacaggcacctaagacatcccagcgcacccgacgaccccggccaaagaccaagaccacaccttcgcctgaggttccacagactaagctagtaccatccaccgacctggagcctggtactctgcggacagaggccccaaagaccatggttgtcacaactgtgctagaaccagacacctttcgcactaaattcccagaaaccactttagctcctaaaacccaacgcacacgccgtcccaggcccaggccaaaaacaactagctccccagaagtgccacagaataagagtgtaagtgttacagggtttgagccagtggtgcattcaactgacgccccaggtacaactttcgccttaactgaactgcaaacgcttatcctgaagcccgtgacctcccccagtttagaaatgacagagtctcaaccagtctcagacgttcttgaatccgtcacactcagcaccgaaagccctaaagagactatcgcccctgccaaaactgattatgtttacccaacagctaaggcgcccttatggccagaggaaccgaagaccgaagttgtggagagcataacctacgtgtcagagccaccagagacaaccctggagactagtcctctgccctcacagtcgattacattgcctagcccagatgaaccgcagacggagcccgcaccaaaacaaaccccacgtgcaccccctaagcccaagacttccccaaggccacgaatacctcagacacaaccagtgcccaaggtgccacagagagtaaccgctaagccaaagactagtcctagtccagaggtatcctatacaaccccagcgccaaaagatgtcttgctgccccacaaaccataccccgaggtgtcacagagtgaaccagcccccctagaaacccgcggcatcccctttatccccatgattagcccatccccttcgcaggaagaactccaaaccaccctagaggaaaccgatcaaagtacacaggagccttttacaaccaaaattccccggactacagagctggcaaaaactactcaagcccctcatagattttatactacggttcgccctcgaacgtccgacaagcctcacatccgcccaggagtgaagcaagccccgaggccatcgggtgctgatcgcaacgtgagtgtggattcaacccaccctactaagaagcccggaactcgccgccctcccttacccccccggcctacccacccccggcggaagcccctaccacccaacaatgtcaccggcaaaccgggaagcgctggaattatttcgtccgggccaatcactactccaccactaaggtcgacaccgagacccactggcacgccgctggaacgcatagaaactgacatcaagcagccaaccgtgccagcttctggggaggagcttgaaaacattaccgatttttccagctctccaacgcgcgagaccgacccgctggggaaacctcggttcaagggccctcacgtcagatacatccagaagcccgataacagcccctgtagcatcaccgacagtgtgaaacgtttcccgaaggaggaagctacagaaggaaacgccacatcacctccccagaatcctcctaccaatttgaccgtagtgacagtggagggatgtccctctttcgttatcttggattgggaaaaaccgcttaatgacactgtgacagaatacgaagtcatatcccgagaaaacggctcgtttagcggtaaaaataaatcaatccagatgacgaatcagacttttagcacggtggaaaacctgaaacctaacacgtcatatgagtttcaggttaagccaaaaaatcctctcggcgaaggaccggtgtctaatactgttgccttctcaactgagagtgccgatcctcgagtatcagaaccggtatcagcaggtcgtgacgctatatggaccgaaaggccctttaattctgactcctattcggagtgcaagggaaagcaatatgtaaagcgcacctggtacaagaagtttgtaggcgtacagctgtgtaacagcctgcgctacaaaatttatctgagtgactctctgaccggcaagttctacaatatcggcgaccagcgcgggcacggcgaagatcattgccaattcgtggattcgttcctcgacggccgcaccggccaacagctgacctccgaccagttgcctatcaaagaaggatactttcgcgctgtgaggcaggagccggtccagttcggcgaaatcgggggccacacccagatcaattatgtccagtggtacgagtgtggaaccactattcccggcaagtggtag

SEQ ID NO: 9295 - DNA, 2355 bp, synthetic construct
  misc_feature 1..2355: note = source = /note="Description of Artificial Sequence: Synthetic coding sequence"
  source 1..2355: mol_type = other DNA
atgaccatcgtgcccaccaccgacatcgagcccgtgaccgtgcggacagaggccactgtgacgactttagcccctaagactagccagagaacccgcactcgtagacctcgcccaaagcataaaacaaccccccgacccgaaacccttcagactaaactggactttggcccgatcacgcctggaactagttctgcgccaacaactactactaaacggaccagacggccgcacccaaaaccaaagacaacaccccatcctgaggttccacaaaccaaattggcccccaaagtaccccaaaggactcacagaccacaccctaagcccaagactacactgtctcctgaggaactgcagacagagcttgtgcccgtgacagatctcgagccagtgacattccgcactgaaattcctgcgactacactggcgactaagacctcaaagcgcactagacctcccagaccccggcccaagaccactccctcccctcaggccccagaaaccaagcccgtacccgccacagtgttggagccagtcacattgcggcccgaagcaagcaccaccctggcctctaaaacaagtcagcgaacacggagaccgcggctccggaccaaaaccactcctcgccccgaagccccggagtcaaagccagctccaaaacagacaccacgcgccccgccgaaaccaaaaacttctccaagacctagaattcctcagacacagccagttcctaaggtacctcagagagttaccgccaagcccaaaacctcaccctcccccgaggtgtcctacacgactccggcccccaaggatgtgctcctgccgcacaaaccatatcccgaggtgtcccagtccgagcccgcgcccttagaaacccgaggcatcccattcatccccatgatatccccaagcccatcacaagaggaattacagacaaccttggaggagactgatcagtcgactcaagagccattcaccactaaaatcccacgtactacagaactcgctaagacaacgcaggcaccacatcggttctacaccaccgtgaggcccagaacttccgacaaaccccatatccgccctgtgttaaatcgcaccacgaccaggcctacgcgtcctaagccatcagggatgccctcaggaaacggggtcggcaccggcgtcaagcaggcccctcgtccatctggcgccgatagaaacgtgtccgtggacagcacacatccgaccaaaaagcccggtaccagaaggcccccgctccctcctcgaccaactcacccaagacgaaagcccttaccacctaacaacgtgaccggcaagccggggtccgccggaattataagcagcggccctattacaacaccgccgctgcggtccactccccggccaaccggtaccccactcgaaaggatcgaaactgatataaaacagcccaccgtgccagcctcaggagaggaacttgagaacatcactgatttttcttcatcacccactagagaaactgacccactcggaaagccaaggttcaaggggccccatgttcgatacatccagaagcccgacaacagtccatgtagcatcaccgatagcgttaaacggtttcccaaggaggaggcgaccgagggtaatgctacaagccctccgcagaatcccccaaccaatctgactgtggttacggtggaggggtgtccttcattcgtcatactcgactgggagaagccgctcaatgacactgtcacggagtatgaggtgatttctcgagagaacggcagtttcagcggcaaaaataaatcaatccagatgacaaaccagacattctccaccgtcgaaaatctgaaacccaacacttcctatgaattccaagttaagccaaaaaaccctctgggggaggggccagttagcaacaccgtggccttctccacagagtcggcagatcctcgggtatccgaacccgtatccgcaggcagagatgctatctggacagagaggccgttcaactccgactcatattctgagtgcaaaggaaaacaatacgttaaaagaacttggtacaaaaagtttgtgggcgttcaactttgcaactctttacggtacaagatttacctgagcgactctctgactggaaaattttacaatatcggcgatcaacgcggtcacggagaggaccactgccagtttgtggacagcttcctcgacggcagaactggccaacaactgacaagcgaccaattgcccattaaagagggctattttagagcagtgcgccaggagccagtacagttcggagaaattgggggtcacacccagatcaattacgtgcagtggtatgagtgcggaaccaccatccctggcaagtggtag

SEQ ID NO: 9296 - DNA, 1584 bp, synthetic construct
  misc_feature 1..1584: note = source = /note="Description of Artificial Sequence: Synthetic coding sequence"
  source 1..1584: mol_type = other DNA
atgctgatgctgttcgtgttcggcgtgctgctgcacgaggtgagcttatctggacaaaacgaagccccccctaacacgcacagcattccaggtgagccgctgtacaactacgccagtatccggctcccagaggaacacatcccattctttttacacaataataggcacattgcaacagtgtgtagaaaggacagcctctgcccgtataaaaagcatcttgagaaattaaagtactgctgggggtacgagaagagttgtaaacctgaatttagattcgggtatcctgtctgtagttatgttgacatgggatggacagatacgctggaatccgccgaagacattttctggaagcaggccgatttcggttatgcacgagagagactagaagagatgcacgtgttatgtcagccaaaggagacgagcgacagttcattagtgtgctctagatacctccagtattgccgagcaaccaacctgtatctggatttgaggaacattaagcgaaatcatgatcgtttcaaagaagatttctttcagtcaggggagatcgggggtcattgcaaactggacataagaacactgacaagtgagggacaacgaaagagcccgctccagtcatggtttgcagaactgcagtcttacacccagcttaacttccggccaattgaggatgctaaatgcgatatcgtgatcgaaaaacccacgtattttatgaaactggatgccggcgtcaatatgtatcaccacttttgtgactttatcaacctgtacataacacagcacgttaacaatagctttagcacagatgtgtatatcgtcatgtgggacacctctagttatggttacggtgacctcttcagcgacacatggaatgcctttaccgactatgatgtgattcacctgaagacttatgatagcaagagggtgtgcttcaaagaagcagtgtttagcctcttaccccggatgcgctacgggctattttacaacactccattaatttcaggttgtcaaaacacgggtctctttagagccttcgcccagcatgtcctacacagactgaatatcactcaggagggtccaaaagacggcaagatccgggtaacaattctggccagatccactgaatacagaaaaatcctcaatcagaatgaactggtaaacgccctcaagaccgtgtctactttcgaagtccagattgtcgattacaagtacagagagttgggcttcctggaccagcttcgtatcactcacaatactgacatattcatcgggatgcacggagccgggctcacgcacctgctgttccttccagactgggccgcagtctttgagctgtataattgcgaggacgaacgctgttatctagacctggcccggttgcggggagtacactacataacctggcgacgccaaaataaagtgttcccacaggacaaaggacaccatcctactctgggcgagcatccaaagttcaccaattatagctttgatgttgaggagtttatgtacctagttctccaggcggccgaccatgttcttcagcaccccaagtggcccttcaaaaagaagcacgacgaactgtag

SEQ ID NO: 9297 - DNA, 2004 bp, synthetic construct
  misc_feature 1..2004: note = source = /note="Description of Artificial Sequence: Synthetic coding sequence"
  source 1..2004: mol_type = other DNA
atgggcagcagccggctggccgccctgctgctgcccctgctgctgatcgtcattgatttatcagatagtgcgggcattggcttcagacacctcccacactggaatacaagatgtcctctggcctcccacacagatgactcctttacaggatccagcgcatacattccatgtaggacctggtgggcactgttttcgacaaaaccttggtgcgttcgtgtgtggcactgcagtagatgcttgtgccagcacctattatcagggggaagtggccttcaaagaggcctatttcacctactggttcagaagtctaagaagtctagcacttttaagttctataggaggcataagatgcccgcccctgctcagaggaagctgctccctcggcggcaccttagcgaaaaatctcatcatatctctatcccctcgccagacatatctcacaagggcctgcgttccaaaagaacccagcccagcgacccagagacctgggagtcactgccgagactagactctcagcggcacggcggacccgagtttagtttcgacctgctaccggaggctcgcgccataagggtgactatctcatccggaccggaagtgagtgtcagactgtgtcaccagtgggcattggaatgcgaggaactgagtagcccttatgatgtgcagaaaatcgtcagcggaggacatacagtggaactgccttatgaatttctgctaccttgcctgtgcattgaggctagttatctccaagaggatacagtgcggcggaaaaagtgtccctttcagtcatggcccgaggcatatggctctgacttttggaagtccgtccactttaccgattattcacagcatacgcagatggtcatggcacttacgctgcgctgtccccttaaactcgaggccgccctgtgccagcggcacgactggcacacactatgtaaagatctcccaaatgccacagctagagaatctgatggctggtatgtgctcgaaaaagtggatttacatccccagctttgcttcaaattctcgtttggtaacagctcccacgtagaatgtccacaccagacaggtagtctcacatcgtggaacgtttcgatggatacccaagctcagcaactgatcttgcatttttcatcacgtatgcacgctactttctctgccgcctggagtctacccggactgggccaagacactttggtacccccagtgtacaccgttagtcaggctcggggctcatccccggtcagccttgacctcattatcccttttttgcggcccggctgctgtgttctggtctggcgctctgatgtgcagttcgcatggaaacatctattgtgtcccgatgtttcataccgacatctgggcctgctcatcttagcactccttgctctattaaccctcttaggagtagtcttagctctgacttgcagacgaccccagagtggcccaggccctgccagacccgtactgctcctccacgcagcggactccgaagcccagcggagactggtgggagcattagcagaacttctgagggcggcgctggggggaggtagagacgtgattgtcgacctgtgggagggaaggcatgtcgcaagggtcggcccacttccgtggctgtgggccgcgcgtactcgcgtggccagagaacaagggaccgtgctgctgctgtggtcgggagccgatctgaggccagtttccgggcccgatccacgcgcagccccattgctggccttgctgcatgctgcccctcggcccctcttattgttggcctacttcagtcgtctgtgcgccaaaggagatattccgcctcccctaagggccttgccccgttaccgcttacttagggatcttcctaggctacttagggcacttgacgcaaggccgttcgccgaggcaaccagctggggtcgactaggtgccaggcaaagacggcagagtagattggaactttgtagtagactcgagagggaggctgcgcgactagccgatctcgggtag

SEQ ID NO: 9298 - DNA, 1101 bp, synthetic construct
  misc_feature 1..1101: note = source = /note="Description of Artificial Sequence: Synthetic coding sequence"
  source 1..1101: mol_type = other DNA
atgcccatgatcagcgtgctgggcaagatgttcctgtggcagcgggagggtccaggaggacgttggacctgccaaactagtagaagagtttcaagcgacccagcctgggcagtggaatggattgaactcccacgaggcctctctctctccagtctggggtccgcccgaactctgcgtggatggagccggtcaagccgtccgtcgtctgtggattcacaggacctgcccgaagtcaacgtcggagatacagtggcaatgcttcccaaatccaggcgtgcgcttaccattcaggagattgccgccctcgcccgctcttccctgcatggaatctcccaagtggtgaaagaccacgtgactaagcccaccgcaatggcccagggtcgcgttgcgcacctgatcgagtggaagggctggtcaaaaccttccgacagtccagccgccttagagtcagcatttagtagctatagcgatctgtcagagggcgagcaggaggcccggttcgcagccggcgtcgccgagcagtttgcgattgcggaggcaaagctgcgcgcctggtcgagcgtcgatggggaggactcaactgacgatagttacgatgaagattttgccggcggaatggatacggatatggccggacagcttccactcggaccccacctccaggatttatttactggacaccgcttctccaggcccgtccggcaggggagtgtagaaccggagtctgactgcagccaaacggttagccccgacacactctgctcttctctctgtagtctggaggatgggttgctcggctctccagcgcgcctggccagtcagttgctgggcgacgaactgctgttggctaaactgcccccttctcgagaatccgcatttagaagcctgggccctttagaagcgcaggatagcctttataattccccactgaccgagagttgcctctccccagccgaggaggagcctgccccatgtaaagactgccagccgctctgtccccctctaacgggatcatgggagcggcagcggcaagcatcagacctggcgagctctggagtagtctcactggatgaggacgaggccgagcccgaggagcagtag

SEQ ID NO: 9299 - DNA, 5172 bp, synthetic construct
  misc_feature 1..5172: note = source = /note="Description of Artificial Sequence: Synthetic coding sequence"
  source 1..5172: mol_type = other DNA
atgcagttccagctgaccctgttcctgcacctgggctggctgagctacagcaaggctcaggacgattgcaatcgcggagcatgccaccccaccacaggcgatctgctggtgggcagaaacactcagttgatggctagtagcacttgtgggctctcgagggctcagaaatactgcatcttgagctatctcgagggagagcagaagtgcttcatttgcgattcaagattcccgtatgacccctacgaccaaccgaactcccatacgatcgagaatgttatagtatcctttgaacccgatagggaaaagaaatggtggcagtccgagaacggactagatcatgtcagtatcagactggatcttgaagcattgttccgcttttcccacctgattcttacattcaagactttccgcccagcggcgatgcttgtggagagatcaacagactacggccataattggaaggtgtttaaatactttgccaaagattgtgctacttcattcccaaacataaccagcggacaagctcaaggcgtgggggatattgtgtgtgacagtaaatacagcgatatcgagccttccactggaggagaggtggtcttgaaagtgttagacccctcctttgagatcgagaatccatacagtccgtatatccaggatctggttactttgactaacctacgcataaacttcacaaaactacataccttaggggacgcacttctgggccggaggcagaatgactctctcgacaagtactattacgctctgtacgagatgatcgtacgtggtagctgcttttgtaacggtcacgcctcagagtgtagaccaatgcagaagatgagaggggacgtgttcagcccccccggaatggtgcatggccagtgtgtttgtcagcacaatactgacgggcccaattgtgagaggtgcaaggatttctttcaggacgccccatggaggccagctgcagacctgcaagataatgcatgccggtcatgctcctgtaacagtcactcctcgaggtgtcactttgacatgactacttacctggcatctggggggctctccggaggagtctgcgaggactgtcagcataacacagaagggcagcattgtgatcgctgcagaccattattctaccgcgaccctttgaagacgatcagcgacccgtacgcatgtatcccatgcgagtgtgacccggacggaaccataagtggcgggatttgcgtcagtcattcggaccctgcactcgggagcgttgctggccaatgcctgtgtaaagagaacgtagagggcgctaagtgtgaccagtgcaaacccaaccactatggcctgagtgccactgatccgctgggctgtcagccgtgtgattgtaatcctctgggttcactgcctttcctgacctgcgatgtggacacggggcagtgtctctgcctgagttatgttacaggtgctcattgtgaagagtgcacagtcggatactggggcctcggaaatcatctgcacggctgcagcccctgtgactgtgacatcggcggcgcttattctaacgtgtgttcccctaagaatgggcagtgtgaatgtcgcccacacgtaacaggacgctcatgtagcgaacctgcaccaggatacttctttgcccccctgaacttttacctatacgaagcagaggaagcgaccacgctgcaggggcttgcgcctttggggagtgaaactttcgggcagtcccccgccgtacatgtcgtacttggcgagccagtccccgggaatcccgttacatggacgggtcccggcttcgctcgggttttacccggagcaggcctgaggtttgccgttaataacatcccatttccggtggacttcacaattgcgatacattacgaaactcagtctgccgcagattggactgtgcagatcgtagttaacccgccagggggctcagaacactgtattccgaaaacactgcagtcaaaaccacaaagcttcgcactgccggcagcgactcggattatgctgcttccaacccccatctgtttagagcccgatgtgcagtactccatcgacgtttatttttctcagccgttacaaggagagtctcacgcacattcccacgttttggtcgattcactcggtctgatccctcagattaactccctcgagaacttctgttcaaagcaagacctggacgaataccagttgcataactgtgtggagattgccagcgcaatgggaccccaggtcctgccaggcgcctgcgagagactgatcatatctatgtccgccaagctgcacgatggcgccgtcgcatgtaaatgtcaccctcagggctcagttggttcttcatgttcgcggctgggcgggcagtgccaatgtaaacccctggtggtaggcaggtgttgtgacagatgctccactggttcctatgacctcggacaccacgggtgccacccatgccactgtcacccgcagggtagtaaggatacagtctgcgaccaggtcacggggcagtgtccttgtcatggcgaggtatcaggaagacgctgcgacagatgcctggcagggtactttggctttccctcttgccacccatgtccttgtaatcgctttgctgagctgtgcgaccctgagaccggatcttgttttaattgtggcgggttcaccactggtaggaattgtgaaagatgtatcgatggctactacggaaacccgagctccggacaaccatgtagaccatgtttgtgtccagacgaccccagttccaaccagtacttcgctcacagctgctatcagaatctctggtcaagcgacgtcatttgcaattgtctgcagggctacacggggacgcagtgcggcgaatgcagtaccggattctacggaaatcctcgcatctccggcgccccttgtcagccttgtgcctgcaataataatattgatgtcactgacccggagtcctgttccagagtgaccggagagtgcctccgttgcctgcataatacccagggagccaactgtcagctgtgcaaaccaggacactacggatctgccctgaaccagacctgcagaaggtgcagctgccatgccagtggtgtgtcccccatggagtgtccccctggaggaggagcctgcttgtgcgatccagtgactggcgcttgcccatgtttgcctaacgttacggggctcgcctgcgatagatgtgcggatggctattggaatctggtaccagggcggggatgccagtcctgtgattgcgatccccgaacatctcagtctagtcattgcgatcaactaaccggacagtgtccatgtaagctgggatacgggggaaaaagatgctctgagtgccaagaaaactattatggggaccctcctggaagatgcattccatgtgactgtaatcgggctggcactcaaaaaccaatctgcgatcccgataccggaatgtgtcgctgcagagagggggtgtccgggcagcggtgcgataggtgtgcaaggggacactcccaggagttcccgacatgtctgcagtgtcacctgtgcttcgaccagtgggatcatactatcagtagccttagtaaagccgtccagggactgatgaggctggccgctaatatggaggacaaaagagagaccttaccggtgtgtgaagcagacttcaaagatcttcgaggaaatgtgtccgagatagaacgtatcctcaagcacccagtttttccatccggcaaattcctgaaagttaaagattaccatgactccgtacgtcgccagatcatgcagttgaacgagcagctaaaggctgtctacgaattccaggacctcaaagatacaattgagagggcgaaaaatgaggcggatctcctcctggaggacctccaggaagaaattgacctccagagtagtgtcctgaatgcttctatcgcagacagtagcgaaaacattaaaaaatactaccacatctcgagttctgccgagaagaaaataaacgagacatcatctaccatcaatacttcggctaacactagaaatgacctgctgacaatcctcgacactttgacttctaaggggaacctgtccctggaaagactgaaacaaattaagattcctgatattcagattctcaatgaaaaggtgtgcggagatccaggtaacgttccgtgtgtgccgctgccctgcggaggggctctgtgcaccggtcgcaaagggcaccgtaaatgccgaggtcctgggtgtcatgggagcctgacactgtctaccaacgcgctgcagaaggctcaggaggccaaatccattattaggaatcttgacaaacaggtgagggggctgaagaaccagattgagtcgattagcgagcaggcagaagtgtccaagaacaacgctctgcagctcagggaaaagctgggaaacattagaaaccagtctgattccgaggaggaaaatattaacctgtttatcaagaaagtgaagaattttcttctggaagagaatgtgcctccggaggacatcgagaaagttgccaatggtgtattggatatacacctgcccattcccagtcagaacctgacagacgagttggtgaaaattcagaagcacatgcagctctgtgaagactaccggacagacgagaatagactcaatgaggaagcagatggagcccagaagctcctggtgaaagcaaaagccgctgaaaaagcagcaaacatactcctcaacctggacaaaactctgaaccaacttcagcaggctcagattacccaggggcgtgcaaacagtacaattacacaactaacggctaacatcacaaagatcaagaagaacgttcttcaggccgagaaccaaactcgagagatgaagtcagaactggagctggccaagcaacggagcggcctcgaggacgggctgtccctgctccagaccaaactgcagagacaccaagatcatgctgtgaacgctaaggtccaggccgaaagtgcccaacatcaggctggcagtctggaaaaagagtttgtggaattgaagaagcagtatgccatcctgcaaaggaagacatcaaccacaggtctgactaaggaaaccctgggcaaggttaagcaattaaaggatgccgcagaaaagttggccggcgacactgaagccaagatacggcgcataactggctgcttccaaaactctgccagatag

SEQ ID NO: 9300 - DNA, 5286 bp, synthetic construct
  misc_feature 1..5286: note = source = /note="Description of Artificial Sequence: Synthetic coding sequence"
  source 1..5286: mol_type = other DNA
atgcagttccagctgaccctgttcctgcacctgggctggctgagctatagcaaagctcaagatgactgtaatcgtggtgcatgccacccaacaaccggggacctgcttgtgggaagaaatacacaactcatggcaagttcaacatgtggactaagccgcgcacaaaaatactgtatactatcatacttagaaggggagcagaaatgttttatctgtgatagccgattcccctacgacccatatgatcagccaaatagtcatacaatagagaacgtgatcgtgtcttttgagcccgacagggagaaaaagtggtggcagtcagaaaatggcctggaccatgtttccattcgtctagatttggaagcactgttccgattcagtcatcttatattgacattcaaaacctttagacctgctgccatgctcgtcgaacgcagtacagactacgggcacaattggaaggtttttaagtacttcgctaaggattgcgccactagtttcccaaatattacttccggccaggcgcagggcgtgggggatattgtgtgtgatagcaagtactccgacattgagccctctactggcggcgaagtagtgcttaaggtgctggacccctcattcgagatcgagaacccttactccccttatattcaagacttggttactctgaccaacctgcgaattaattttactaagcttcacactctcggagatgcactgctcggtagaaggcagaatgatagcctggacaagtactattatgcactgtacgagatgattgtgagaggatcatgcttctgcaatgggcacgcttctgagtgtcgaccaatgcagaaaatgagaggcgatgtgttctcacctcccggcatggtgcatgggcagtgtgtatgtcagcacaacacagacgggcctaactgcgagcgatgtaaggatttttttcaggatgccccatggagaccagcagccgacctccaagacaatgcatgtcgtagctgcagttgcaacagccactcctcccgctgccatttcgatatgactacttatctcgctagtggagggctttcagggggggtctgtgaggactgtcagcacaacactgaaggacagcattgcgatcggtgtaggcccctgttttacagggatcctcttaagacaatatccgacccctatgcttgcattccgtgtgaatgcgaccctgacggaaccatctctggaggtatttgtgtcagccactcagaccccgctcttggctcagtggccgggcaatgtttatgtaaggagaatgttgagggtgcaaagtgcgaccagtgcaagcccaatcactacggccttagtgctactgacccattgggatgtcagccctgtgactgtaatcccctggggagcctgccgtttctgacatgtgatgtcgacactggtcagtgtttgtgcttgtcttatgtgacaggtgctcattgcgaagagtgcaccgtgggctactggggcctgggcaatcatctgcacggatgtagcccatgtgactgtgacatcggtggcgcctactccaatgtgtgcagtcctaagaatggacaatgtgagtgtaggccccacgtcactggcagaagctgttccgagcccgccccaggatacttcttcgccccccttaacttctacttgtacgaggcagaggaggccactaccctccagggcctcgccccgttaggctccgagacctttggccagtcccccgccgtccatgtggtgctcggagaacccgtgccagggaatcctgttacatggactggtccgggcttcgcaagggtgctcccaggtgccggactgcgtttcgccgtgaacaacattccctttccagtcgatttcacaattgcaattcactacgaaacccagtctgccgccgactggacagttcagatcgtggtgaatccccctgggggctccgagcattgcatccccaaaaccctacagtcaaagccacaaagcttcgctctccccgccgccacgagaatcatgctcttgccaacccctatttgtcttgagcctgatgtgcagtatagcatcgacgtgtatttcagccaaccccttcaaggcgaaagccacgcacattcacacgtgctggtggatagcttgggactcatccctcagataaactcactcgaaaacttttgctcaaagcaggatttggatgagtaccagctgcacaactgtgtggagatcgccagcgctatgggacctcaagtgttgccgggcgcctgtgagaggctcattataagcatgagcgccaaactgcatgacggcgccgtcgcctgcaaatgccatccacagggaagcgtgggatcttcttgttctcgacttgggggccaatgtcaatgtaaacctctggtggtgggcaggtgttgtgatcgttgttctactggcagctacgatctcgggcaccacggatgccatccttgccactgccacccacagggatcaaaggacacagtctgcgatcaggtgacgggccaatgcccctgccatggagaggtgagtggtaggaggtgcgaccggtgcctggctggatacttcggctttccgtcctgccatccctgcccctgtaaccgtttcgccgagctgtgcgaccccgagactggctcttgcttcaattgtggcggattcactacagggcgaaattgtgagcggtgtatcgacggatactatggcaacccgagcagcggccagccttgccggccctgcctctgccctgacgacccgtcaagcaaccagtatttcgctcacagctgctaccagaatctctggtcaagtgacgtgatctgcaactgcctccagggctacaccggtacacagtgtggtgaatgttccactggattttacggcaaccccagaattagcggtgctccatgccagccctgtgcatgcaacaataatatcgatgtcaccgatcccgagagttgctcacgagtcactggcgagtgcctccgctgtctgcataatacacagggagctaactgccagctgtgtaaaccaggacattacggttctgctctcaatcagacttgtcggcggtgttcttgccacgcctctggggttagcccaatggagtgccccccaggaggaggtgcctgcctatgcgaccctgtaactggagcatgcccttgcctgcccaatgtgacaggtctggcatgtgaccggtgtgcggacggctattggaacctcgtcccaggcaggggatgtcagtcctgcgactgtgacccgcggacctcccagtcttcccattgcgaccaactcaccgggcagtgtccttgcaaactggggtatggcggaaagaggtgcagcgaatgtcaggaaaattactacggcgaccctccaggcagatgtatcccatgtgactgtaacagggcgggcactcagaaaccgatttgcgacccagataccggaatgtgcaggtgtcgcgagggtgtttctggacagcgttgcgatcggtgcgctcgaggacattcccaggaattcccgacttgcctgcaatgtcatttatgttttgatcagtgggaccacaccatcagctccctatccaaggcagtgcaaggcctgatgcggctcgccgccaatatggaagataaacgggagacacttccagtctgcgaggccgacttcaaggacctgaggggaaacgtatcagaaatcgagcgaatactcaaacacccagtgttcccctctggcaagtttctcaaggtcaaggattaccatgattctgtacggcgccagattatgcagctgaatgaacaacttaaagccgtttatgaattccaggatctcaaggatacgatcgagagggccaaaaatgaagctgatctgctgctcgaggacttacaagaagaaatcgatttgcagagctccgtgctcaacgccagcatcgccgactcatccgaaaacataaagaagtattatcacattagcagttctgcagaaaaaaaaatcaacgagacatcctctactattaacacctccgcgaatacacgtaatgacctgcttaccatactggatacgctcacttctaagggtaacttaagcttggagcgactcaagcaaatcaagatccccgacatacagatcttaaatgagaaggtgtgcggggaccctggcaatgtcccctgtgttccgctgccatgcggtggagccctatgcactggccgaaagggccaccgcaagtgcagggggccgggttgtcacggttccctgacgttgagcactaatgctttacagaaagcacaagaggcaaaatctatcattcgtaatctcgataagcaagtccgcggactgaagaaccagattgagagcatctctgaacaggccgaggtgagcaagaataacgctctccagttgagagagaagttggggaacatcagaaaccaatctgattccgaagaggagaatatcaatcttttcattaaaaaagtcaagaacttccttctggaggaaaacgttccacccgaggacattgagaaggtggccaatggcgtgcttgacatacatctgccaatcccgtcccagaacttgactgacgaattggtaaagatccagaagcatatgcagctatgtgaggactaccgtactgacgagaatcgccttaacgaagaggctgacggggcccagaagttgctcgtcaaggcaaaggcagccgaaaaggccgccaacatcctcctcaacctggataaaacacttaaccagttacaacaggcccagatcacacagggacgagccaattccacaatcacccagctcacagccaatattacaaagatcaagaagaacgtgcttcaagcagagaaccagacccgggaaatgaaatccgagctggaattggccaagcaaaggtccgggcttgaagacggcttatccctgctgcaaacaaagctgcagcgccaccaggatcatgccgtgaacgccaaggtgcaggccgaaagtgcacagcatcaggctggaagcctcgagaaggaattcgtggaattgaagaagcagtacgcaattcttcagcggaagacgtctacaacagggctgacgaaggaaactctcggcaaggttaaacagttgaaagacgccgccgagaagctggctggtgacaccgaagcgaagattaggaggatcaccgacctggaaaggaaaatacaggatctcaacttgtcccgccaagccaaggcagaccagctacgtattcttgaggatcaggtagttgcgatcaagaatgaaattgttgaacaggaaaagaagtatgctaggtgttactcgtag

SEQ ID NO: 9301 - DNA, 1455 bp, synthetic construct
  misc_feature 1..1455: note = source = /note="Description of Artificial Sequence: Synthetic coding sequence"
  source 1..1455: mol_type = other DNA
atgggcgccgaggccctgcccggccccgacgaggccgccgccgccgctgctttcgccgaggtaactactgtgaccgttgcgaatgttggagctgcagcagataacgtgttcactacttcagtggccaacgcagcaagcatcagcgggcatgtgctaagtggcaggaccgcactacagataggcgattccctcaatacagagaaggctaccctgattgtagtccatacggacggatcgattgttgagaccaccgggctgaaaggccccgccgcacccttgaccccaggcccccaaagccccccgacacccctcgctcctggccaagagaaaggcggcacaaaatacaattgggacccttcagtgtatgactctgagttgcccgtgcgctgtcgcaacatttcaggcaccctgtacaagaaccggctcggctcggggggccgcggacgctgtataaaacagggagaaaactggtattcgcccacagagttcgaggctatggccgggcgcgcttcctctaaagattggaagcggagcatacgctacgccggcagaccgctacaatgccttattcaggacggcattctgaacccgcacgcggctagctgtacatgcgccgcatgttgtgacgacatgacactcagtggaccggttcgtcttttcgtgccctacaaacggcggaagaaagaaaacgagctaccaacgaccccagtcaagaaagacagccccaagaatattaccctgctgccggctacagccgccacaaccttcactgtgaccccgtctggtcagattacaacgagcggagccctaacctttgatcgagcatccaccgtcgaagccactgctgtcatttcagagtcacctgcccagggggatgtgtttgcaggggccactgtgcaggaagcctctgtgcagccaccttgccgggcctctcatcctgagccgcactaccccggataccaggattcatgccagatcgccccttttccagaggcggcccttccaacatcccatccaaagattgtcctcacgtcactgcccgcattagccgtgccgcctcctactcctacaaaagctgcccccccagcgctcgtgaacgggctggaactaagtgaacctcgcagttggctgtatttagaggagatggtgaattccttattaaacacagcgcagcagctcaagactctatttgagcaggctaagcatgcctcaacctatcgagaagcagctactaatcaagctaagatacacgctgacgctgaaagaaaggagcagagttgtgtgaactgcggcagggaagcaatgagcgaatgcactggctgccacaaagtgaactattgcagcactttttgtcagagaaaaaggtggtcattgaccatgctcacaagtctggtctccatttcttggcttcgagctatcttaccgtgtcaaccaccaaaggtgcttggcctctag

SEQ ID NO: 9302 - DNA, 1512 bp, synthetic construct
  misc_feature 1..1512: note = source = /note="Description of Artificial Sequence: Synthetic coding sequence"
  source 1..1512: mol_type = other DNA
atgagcggcgccctgctgtggcccctgctgcccctgctgctgctgctcctgagcgcaagagacggcgtgagggcggcccagccccaagcgccagggtacctgattgccgccccaagcgtgttcagggcaggtgtcgaggaggtcatcagtgtgaccatctttaatagcccacgtgaagtgacggtgcaggctcaactggtagcccagggcgaaccagtcgtgcagtcccaaggtgcgatcctggacaagggaaccattaaattaaaagttccaacagggctgagggggcaagcactacttaaggtctggggccgcgggtggcaggccgaggagggtccattgttccacaatcagacctcagtgaccgtggatggcagaggagccagtgtttttattcagactgataagcccgtctatagaccacagcatcgggtactgatcagcattttcaccgtcagcccaaatctgcgtccagttaatgaaaagcttgaagcctacatactagacccaaggggatctcgtatgattgaatggcgacaccttaagccattttgttgcgggataaccaatatgtcgtttccgctgtctgatcagccggtcctgggagaatggtttatttttgtggagatgcaaggtcacgcttacaataagagttttgaggtgcaaaaatacgtattgcccaaatttgaactactcatagacccaccccgttacatccaggatctggatgcttgtgaaacaggtactgttcgggcccggtatacgtttggcaagccagtcgccggtgcgctgatgattaatatgactgttaatggagtgggctactattcacatgaggtgggcaggccagtcctgaggaccacgaaaatcctgggttctcgcgatttcgacatatgtgttagggatatgatacccgccgacgtgccagaacatttccgcggccgcgtatccatttgggcaatggtcacatctgttgacgggagccagcaggtggctttcgatgactctacccccgtgcaacgtcaactagtggatataaggtattcgaaggacaccagaaaacagtttaaaccaggtttggcttatgttggaaaggtggagttgtcctaccctgacggcagccctgccgagggcgttactgtgcagatcaaggctgaactcactcccaaagataacatctacactagcgaggtggtgtcccaaagaggacttgttggttttgagatccccagcattccaaccagtgcccagcacgtgtggctggaggtttttcaggaactggaggattacgatgtatcggacagcttcggggtgtcaagggaggatggtcctttttggtgggcaggcctgaccgctcagaggcgacggaggtcttctgtgttcccttggccgtggggaataactaaggatagcgggttcgcttttacagttaggcgagggaatggaactggcggcgatgaccggccttccgaacctgagcccccggcggggcggtggcctctgcaccgctag

SEQ ID NO: 9303 - DNA, 144 bp, synthetic construct
  misc_feature 1..144: note = source = /note="Description of Artificial Sequence: Synthetic coding sequence"
  source 1..144: mol_type = other DNA
atgaagctgtgcgtgaccgtgctgagcctgctggtgctggtggccgcgttttgctccctggctctgtctgcccccaaagcttctaaatccgctctaactccagtgagccctggctcccgatccacttgcatgacatggaattag

SEQ ID NO: 9304 - DNA, 861 bp, synthetic construct
  misc_feature 1..861: note = source = /note="Description of Artificial Sequence: Synthetic coding sequence"
  source 1..861: mol_type = other DNA
atggaggtgtacatccggcacctggagaaggtgctgcggcggtacgtccaacgactgcagtggctgctctccggaccagttctctgttccagaacttggtacaggcaatcgatggacagaggagtcatgatgacagccgcctcaggatcccggcggctcttcgggaccgttcttgagtctaaggtctgtatactccttgataccagcggaagcatgggcccttacttgcaacaggtgaagaccgaacttgtgctgctgatatgggagcagctgagaaaatgctgcgacagctttaatttgttgtcgtttgcagagagctttcagtcttggcaggatacactggtagaaacgaccgacgccgcctgccatgaggcaatgcaatgggtcactcatctgcaggcccagggctccacatctatcctgcaggctttacttaaagcattttcttttcacgaccttgaaggactatatctattaacggatggtaagcctgatacttcctgctctctcgtcttgaatgaagtacagaaattaagggaaaagcgggacgttaaggttcatactatttctctcaactgcagcgatcgagcggccgtagagtttctgaggaagttggccagctttaccggcggcagataccactgcccagttggtgaagatacgctgtcgaaaattcactcccttctgaccaagggatttatcaatgagaaagatcccacgctgccaccatttgagggggacgatctcagaatcctggctcaagaaattactaaagcgcgaagctttttgtggcaggcccagtcatttaggtctcagctgcagaaaaagaacgacgccgaaccgaaagtgaccctgagctag

SEQ ID NO: 9305 - DNA, 3555 bp, synthetic construct
  misc_feature 1..3555: note = source = /note="Description of Artificial Sequence: Synthetic coding sequence"
  source 1..3555: mol_type = other DNA
atgaagaagtaccggaagatcagcatcggctgcttcgccatggccacacagacgagccatgtattccacggccaagagaatatgttccttgaaaaccactgtattcgccgtaacactggcagggactctaagaagccactgaaacagaagaatatgaatggcctcggccagaattcagataatggcttactggtgacccacgtgaaccagacccaggacctgctgcgattgcaagggtccgaaactcagagcagcgattgggaagattcagaggactggctctccgcacatagcctgaagtgccaaaagcttactctcgctgacctaatcagccagggtaccgaggtgctggaagagggaacaaatgtggtgcagaagatctgcttttcaacccagatcatccggcattttgagagcaaattatcagataccatcgaggtctatcaggagcggatacaatggctcaccgaaaatagcaaaaaagcctttggcctgatcaagggggcgcgggtgagtatcttaattgacgttagtgccattagctccggcccacagaaagaggaattccagaaggacttgatgtccctcatagacgagcagttgagtcacaaagagaagctatttgtcctaagtttcgggaccaatgcgggttcactttggcccgatccaatggaggtgtccgcctccaccctgcaggagctgaaactttgggtcaaaacattacagcctgatggcggcagcaacctgcttcaagcgcttaaaaagatattcactctgaagggactggattctttagttgccatcatgcgctcgtgtccagaccagccttcagagatcctcagtgactatatccaacagagcactatgggaagggaccttatcatccatttcattacctatcgatgcgacgatcagatgccgcctgctgtgctgaagaacctcgctgaggccgtaagaggatactaccattgctactctcctaaaatggagcattatacatccagagatatggacgagctgctggcagagattcagaaggcccaatcgctcttatcacacgtgcaggccctgcagcactcttcaccatgtgaagctctgacatgtaccatggaagagattagcacagagattactaacggacctttaatctcactgttgccaaagccacccaaacatgacgcgcctctgacgattgaattcccaaatctcgacaagaccagcgcggagtggctcaaagtaaacggtttgaaggccaaaaaactctctctgtatcaagtgctcgccccgaatgcattctctcccgtggaggagttcgtccccatcctccagaagacagtgtcttccaccattcacgagaaggccatgatccaatttgagtggcacgacggcaccgtcaagaatattcacgtggacccacctttcctgtataagtaccaacaacagctctctagagcgatgcgcatgtacgaacgacgaattgagtggctaagcctggctagtcgcagaatttggggcaccgtgtgcgagaagcgagttgtggtgctgctggacatctcagcaacaaacagtatgtacattattcatatccagcacagccttcgccttctcctggaagaacagctatcaaataaagactgctttaatctgattgccttcggctccacgatcgagagctggcgccccgaaatggtgcccgtgagccacaataacttgcaaagcgcctggcgctgggccttaaacttacggtgccgaggaagccggaacgttctcagcgcactccgcaaagctgtcgaagttgattttaaagataaagacaagcatcaatcccagggtatttaccttttcacggggggaatacctgaccaggacatgcccacactttcagcctatatggcagaagcttgtgggggttgtgatctacaactgaatgtgtgcctattttacgtcggcgaacccaaaatggatactactcctccagcccgatatgcctcacataccgataccgcagccgcttacaaggaagtgacccgggccgcgggcgggcgcttccactggttcggcgacaccgggatatatgaaagcgatgacattaacagtatcatgtctgagatggagaaagccctgaactactcccagaagtgtgcctttctcatggctagtctgaaaaaccatagtgggaaggttttaggtagctcagcattacctaaggagaaacctaaaacgctgcaacttaggagccaacccaaaaaactctgcccacctcggcctacagtgccactgggagctagaatgtccataaaggatgacccagaccgagaaaagtccccacctctgaagagcctgaaatggagacccttatcttcgcgcgtgggcatcagccccgctgcagcccagcctaccaaggaaggcatgatggagctgcgcaggaaaacaaaatctagggaggcggagacaagtctgctactcttttacacagagaaagggaatgatgtgggatccgtttacaaaaagtacccacaaggcaggggactccggagaacctcctcctccatcgacctgcccagaaaagataccgtatgctccagccaggagtgggtggcgaaatacgggcttaaaaagttgaaactggagatctcccgatgcatgggaccgaactgcactcaccaaaagtccggccaacggtctgcatctgcaaaacattgttcaatcttccccagcgtggagatacacggcgtcgtgagacacattcaatggacacccagagagatggaagtctacataagacatttagagaaagtcctacgacggtacgtgcagaggttgcagtggttactcagtggcagccgccgcctcttcgggacagtgttggagagtaaagtgtgtatcttactggacaccagtgggagtatggggccctacctacagcaggtgaagactgagttagtgctgctgatttgggagcagttgcggaagtgttgtgattcatttaaccttctgtcgtttgctgagtcttttcagagttggcaggatactcttgttgaaacgactgatgccgcctgccacgaggccatgcagtgggttacacatttacaggcccaggggagcacatcaattctccaggcactgcttaaggctttctcattccatgaccttgagggcctctacctgctcacagatggcaaaccagacacatcctgttcactggtgttaaatgaagttcagaagctgcgcgaaaagagagatgtgaaggttcacactataagcctcaattgctcagatagggccgctgtggagttcttaaggaaattagcctcttttactgggggaagataccattgccctgtcggtgaggatacactgagtaagattcactctctactgactaaaggattcatcaacgagaaagacccaactctaccccccttcgagggggacgatctgagaatcctcgctcaggaaatcacaaaggccagaagttttctgtggcaggctcaatcgttcaggtctcagctccagaaaaaaaatgacgcagaacccaaggtgacactttcttag

SEQ ID NO: 9306 - DNA, 906 bp, synthetic construct
  misc_feature 1..906: note = source = /note="Description of Artificial Sequence: Synthetic coding sequence"
  source 1..906: mol_type = other DNA
atgctgcccctgaccatgaccgtgctgatcctgctgctgctgcccaccggccaggctgccccgaaagatggtgttaccagacccgacagcgaggtacagcaccagctactacccaacccgttccaacccggacaggagcaactcggactactccagtcatatctgaaggggctcggaaggaccgaggtgcagcttgagcacctgagccgtgagcaggttctgttgtacctcttcgcactccacgattatgaccagtctgggcagctggatgggcttgaactgttgtcgatgctgacagccgccctggcgccaggagccgccaactcaccgacaaccaatccagttattctgatagtggataaggtcctagaaacacaggacctgaatggcgacggcttgatgaccccagcggaactaatcaactttcccggagtggccctgcggcatgtggagcctggggaacccctggctccatcaccacaagaaccacaggctgttggacggcagagtctgctcgcgaagagccccctcaggcaggaaactcaggaagcaccaggtccccgggaggaagctaagggccaggtggaggctcgtagggagtcgcttgacccagtgcaggagcctggcggtcaagctgaagcagatggggacgtgccagggcctaggggagaggccgagggccaggccgaggccaagggagacgcgccggggccacgcggcgaggctggtgggcaagctgaggccgagggtgacgctcccggccctcgtggtgaagctgggggccaagctgaagcgcgagaaaacggggaagaggctaaggaactccctggcgagactctggagagcaagaacacccaaaacgactttgaagtgcatatcgtccaagtggagaacgatgagatctag

SEQ ID NO: 9307 - DNA, 4722 bp, synthetic construct
  misc_feature 1..4722: note = source = /note="Description of Artificial Sequence: Synthetic coding sequence"
  source 1..4722: mol_type = other DNA
atgcgggtgctggcctgcctgctggccgccctggtgggcatccaggcggtcgaacgactgcgcctggccgatgggcctcacggctgcgcgggtagattggaagtttggcacggcgggcggtggggtaccgtatgtgacgacgggtgggacctcagagacgccgcagtggcctgcaggcaactgggctgcggcggtgcgctggccgccccaggcggagcattctttggcgaaggggccggcccggtttggctgtctgaactcgcctgtagggggaatgaaggccaattgggcttgtgtcaccatagagggtggaaggcccacatctgtagccacgaagaagacgctggtgtagtgtgtgcgggacagagggtagcaaattctcgggacgactctacatctcctctggacggagcaccctggcctggcctgctgctcgaactcagcccctccacggaggagccgctcgtcacgcatgcccctcgcccagccggtaacccccagaacgcaagcaggaaaaagtctccaagaccaaagcaggctaaatctacgcgagcccccctgttgaccactggagccccaagacaggaaagactaagactggtatcaggaccacacagatgcgctggccgtctggaagtctggcatggcggacgatggggaaccgtctgcgatgatggctgggacctgagggacgccgctgtcgcatgcagggagctcggttgcggtggagccctggcggccccggggggagcacggtttggccccggcgccggacccgtgtggatggacgatgtggggtgcggcggtggggaacaggcgctgagggattgtcccaggtctccatggggccgctccaattgcgaccattcagaagacgcaggcttggtgtgcacggggccagcacccaggcttcgcctagcagacgggccccatggctgtgccggaagactcgaagtatggcacggtggacgttggggcagtgtgtgtgatgacgcctgggatctccgggacgctgctgtggcctgtcgcgagctggggtgcggaggggctctggccgcgcccggaggcgcgttcttcggggaggggtctggacccattattctggacgatctccgctgtcgcggaaatgagaccgccctacgtttctgtccggctaggccgtggggacagcacgactgtcaccatagagaggatgctggtgccgtctgtgatgggatgcccttgggatacgtccctcccaccgctcctacggattctaataactccacccccagagaggccgcttcgaggcccccttccaccatgacatcacaggcccccgggactgctggagtgagccctccaccagcaagtcccacagtgctttgggagcccgggcccgaggcaggaagcccacagctgcgactggttgctggccccagcaaatgcagcggcagactcgaagtgtggcacgatcagagatggggaaccgtgtgcgacgactcgtgggacatgagggactcagctgtggtctgccgggagttggggtgtgggggcccacaacaacctgaccccgccgcgggacggttcggttggggcgcaggccccatctggctcgacgacgttggatgtgtgggaacagaagcttccctctccgactgtcctgcagcgccctggggtaaacataattgtgcccataatgaagacgtgggggtgacctgcactgggccccccggcttggattccatcagtgacccatttagctggtcctggatccctggactggggcgagatcgcgatgcgtggttgcctggtgagttggccaccaaacccagtgcatcagtgactgcttcggtcctggagaagaccacaaccaaggcacctggtaagatgcctaagagcacaaagaagtgggtgacgaaaaatgcaaagcgacccacaacccagccccctgtgatgcctacaacaaagcacagccgagcccagagcccccctgacctcacaagccagactactgccgctctgacaaccgaagcttcgaggcggccgactagtgagttcacaagaagacccaccacagaagcccctcagagatggacctcccacacaaccgccacactgactcctcaggctcctagggagcgcacaacaaagacaatggcaatgctcacaacccagggtccccaagagatgacttccgagtcaaccattaagtcaattccacaggctagtcttgagcccagcgctgagattcccgaaggtagccccgagtctcccaaggatcccgccccctcccccagcgtgtctaccaccggtgagtccggcttgtttagggtgcgactcgctgatggcccgaacaggtgtgctggccggttggaggtttggcacgcgggacgctggggaactgtttgcgatgacaattgggacctccgtgatgctacagtggcatgttgggaactgggatgtggaaaggtgcggccccgggtcggcaagacacactacggcccaggcaccggccccatctggcttgatgacatgggctgcaaaggctctgaagccagtctctcagattgcccaagtggggcgtggggaaagcacaactgcgatcatgaggaggacgtcggtctgacttgcaccggatataccgactacgacgactatcctccctggacctgggatcctacttctagggaagacctagcaaagggaaccacaacggccggggtacccgggcacacactgccttggagaactacacgccggccaggctcgtcatcaccagctattagacgcctgcctgatacggggagtaaagatggttataaacttccatggacgtgggatacgccttccgggcgggggctggcagagggaacacccaccgcagggaagctgggtcccactctgggggctggcaccaccagaagcccaggctcaccaccgacattgagagtgcacggcgatacaggtagtccccgcaaaccctggcccgaacgacgacccccgcgccccgcggctacccggactgctccccccacccccagcccagggccctctgccagcccgggaccgccagggcccgcactgacgtcagacagtagtcgcgagcttacaccacactctgccctgacgagtgaagcaacatccgatgctcccgacacctccccccccacaccagaccccgctagccgtacaaaccccgatctgatcctcactagtcccgacttcgcattgtccacgcccgactcttcagtcgtgccagccctgacacctgagccgtccccgactccattgccaaccctccccaaggaactaactagtgacccttctacccctagcgaagtaaccagtctcagcccgaccagcgaacaggtccctgagagcgatacaacgcccgacctggacactacaccctactcatctacagtgagcgagtacagtcggagtccagaccctagccctagtccacatcctaccacgactcctgatccgacgatggcccctgatccaattaccaccctgaaccccaccgtgacacctcattttcctaccactccccatccaacaacaaccccccatcctactactatcactcactccactatgattccggaccctaccaccaccccccagccctttactacaattacgcatagcaccatgatccccgaccctacgacaaccccacagccattcaccaccatgcaacccactacaaccccacacagcaccaccccccatcccacaacgaccccacacccaacaaccatcacccactcaaccatgatccccgatcccaccacaactccccagcccttcacaacaatgcagccaaccactatgcctcacccaaccactacaccgcaccccactacaaccccccatccaaccaccaccccccacccgaccaccaccccgcatcccacaatgacaccagatccgaccaccacaccctatcctacgacaactcccgaccctaccaccacgccccatccaaccaccccggaccctagttcgactcccgtaatcactactgtctcactcccaacgagccttggcacggaactttcatctcctacactcgccccaactgtaaagccatcactccatcctcagttaacgtttaccgccccagccccccacacgtctacatcacaaatcccaacccttgaaccaagccccgcccttgagtcatccccctccagaagttccacagcaaccagcatggatcccctcagcactgaggactttaaacctccacgctcccagagtcctaatctgactcctccccctacccataccccacacagcgcgtcagatctgaccgttagtcccgatccacttctgtctcccacagcccatcctctcgaccatccgcccctcgatcccctcaccctcggaccaacacctggacagagcccgggccctcatggtccatgcgtggcccctactcccccagttagagtgatggcctgcgagccaccagccttggtggagctcgtggctgcggtccgtgacgtcggaggccaactgcaaaggctaacacaggtggtagaacaggaacggcaagagcgacaggccctgctgctgggcctcactcaactagtggaggctgcaagaggattgggacagctgggcgaggcggttaaaaggttggccgaaatggcatggactactagcatgccggccccaactactaccacccctgaggaggaggaacggccactgagaggtgatgtgtag

SEQ ID NO: 9308 - DNA, 1911 bp, synthetic construct
  misc_feature 1..1911: note = source = /note="Description of Artificial Sequence: Synthetic coding sequence"
  source 1..1911: mol_type = other DNA
atgaccacctggagcctgcggcggcggcccgcccggaccctgggcttgctcttactggtggtcctgggttttcttgtactgcggaggctggattggagtacgttggttccccttcgcttgcgacaccgccaactggggctgcaggccaaaggatggaattttatgcttgaggattcaacattttggatctttggcgggagcattcattactttagagttcctcgggagtactggagggatcgtctcttaaagatgaaggcttgcggccttaacactctgaccacctacgtgccctggaatcttcacgagccagagaggggaaaattcgacttctccggaaatctcgatcttgaagcgttcgtactgatggccgctgaaatcggactctgggtaattctcaggcccggcccctacatctgctcagaaatggatctcggcgggcttccctcatggctgcttcaagatcccggaatgaggctgaggacaacatataaagggttcacggaagctgttgatctctacttcgaccatctgatgtcacgcgtggtgcccttacagtataagcgagggggccctattatagctgttcaagtagagaatgagtatggctcttataacaaggaccccgcctatatgccgtacgttaagaaagcactcgaggatcgtgggatagtcgagctgttactcacttccgataataaggatgggcttagtaaagggatcgtgcagggcgtgctggccacgattaacttgcaatccacccacgagctccaactcctcaccactttcctgttcaatgtgcagggaactcagcctaagatggtcatggagtactggacaggctggttcgacagctggggtggacctcataatatcctggacagtagtgaggtcttgaaaacggttagtgccatcgtggatgcgggaagtagtatcaacctttacatgtttcatggaggaactaacttcgggttcatgaacggagcaatgcattttcacgattacaaatcggatgtcacatcatacgattatgacgctgttttaactgaggccggggattatactgctaaatacatgaagctgagggactttttcggatctatctccgggattcccttgccccctccccctgaccttctgcccaagatgccttatgagcctctgacacccgttctctatctcagtctctgggatgccttgaaatatctgggggaacccatcaaaagtgagaagcccattaacatggaaaatttgcctgtgaacggcggcaacggacagtcattcggttatattctgtacgaaacttccatcacatcttctgggatcctttcaggccacgtacacgaccggggccaggtgttcgtcaacaccgttagcattgggttcctcgattacaagaccactaagatagctgtgcctctaatccagggttacacagttctgcgcatcctggtggaaaatcgggggcgagtgaattacggcgaaaacattgatgatcagagaaagggcctgattggcaatctgtatctgaacgactctcccttaaaaaacttccggatatattcactagacatgaagaagagctttttccagagatttggactcgataagtggagtagccttcctgaaaccccaacactaccagcattttttctcggatctctgtctatatcttcaacaccatgtgacacttttcttaagctggaaggctgggaaaagggtgtggtgttcatcaatgggcagaacctggggaggtactggaacatcgggccacagaagactctgtatttgcccggtccgtggttatcgtcaggtattaaccaggtcattgtcttcgaggagaccatggctggccccgcccttcaatttactgaaactcctcatctgggcaggaatcaatatattaaatag

SEQ ID NO: 9309 - DNA, 2037 bp, synthetic construct
  misc_feature 1..2037: note = source = /note="Description of Artificial Sequence: Synthetic coding sequence"
  source 1..2037: mol_type = other DNA
atgcggaccgtggtgctgaccatgaaggccagcgtgatcgagatgttcttggtgctgcttgtgacaggtgttcattctaacaaggagacggccaaaaaaatcaagagaccgaagtttaccgtgcctcagatcaactgcgatgtcaaagctggaaagatcattgatcctgaatttattgtgaaatgtccggcaggctgccaggaccccaaataccacgtgtatggtacagacgtgtacgcgtcttattcctctgtgtgcggagccgctgttcattctggcgtgctagacaactctggtgggaagattctggttcggaaggttgccggacagtccggatacaaagggagctattctaatggtgttcagtccttgtccctgccccgttggcgagagtctttcatcgtccttgaatcgaaaccaaaaaagggcgtcacctacccttctgcccttacctactctagcagtaagtctcccgccgcccaagctggagaaaccacaaaggcataccagcgccccccgattcccgggaccaccgcgcagcctgtcaccctcatgcagcttctcgcagtgaccgtggccgtggccacccccaccaccctgccacggccgtccccatctgccgcctccactacatccatcccgcgacctcaatcagtgggtcatcgatcacaggaaatggatctgtggtcaacagctacctacacctcatctcagaaccgccctagggcagatcctgggatccaaaggcaagacccttcaggcgccgcatttcagaaacccgtgggtgccgatgtgtcactggggctggtgcctaaagaggagctcagtacacagtccctggaacctgtcagcctcggcgatcccaattgtaagattgacctctcattcctgatcgatggcagcaccagcattgggaaaaggcgattccgcattcagaagcagctgctcgctgacgtggcacaggcgttggacataggccccgcagggccactgatgggggtggtgcagtacggagacaacccggcgactcactttaaccttaagacccacaccaactcccgggatttgaagacagctatcgagaagatcacccagagggggggactttctaatgtgggccgtgccatttcgtttgtcactaagaatttcttttccaaggctaatgggaataggagcggcgctcccaatgtcgtcgtagtgatggtggatggttggcctacagacaaagtagaagaagcatctcggctggcccgagagtctggaattaacatttttttcatcacaatcgagggtgcagctgaaaatgagaagcagtatgtcgtggagcccaatttcgctaataaagccgtgtgcagaacgaacggtttctactctctgcacgtgcagtcttggttcggactgcacaagacactgcagccactggtaaaaagggtatgtgataccgatcggctagcttgttcaaagacttgtctcaattccgccgacatcggtttcgtgatcgacggatcttcgtctgtgggaacaggcaactttagaacagtgctgcagttcgtgaccaacctgaccaaggagtttgagattagcgacacagacacacgaatcggagcggttcaatatacgtacgaacagcggttggagttcggtttcgacaagtactcaagcaagcccgatattctaaatgccattaaacgcgtgggatattggagcggcggcactagtaccggcgctgctataaatttcgccttggagcagctgttcaaaaagtctaagcctaataaacggaaactgatgatcttgatcactgatggcaggagctacgatgatgtgagaattccagccatggccgcacacctcaaaggggtcatcacgtatgctataggtgtggcctgggccgcacaagaggagctagaagtaatcgcaacccatcctgctcgagatcatagcttcttcgttgatgagtttgataatctgcaccagtacgtgcctcgcattatacagaacatctgcaccgagtttaattcacagcccaggaattag

SEQ ID NO: 9310 - DNA, 324 bp, synthetic construct
  misc_feature 1..324: note = source = /note="Description of Artificial Sequence: Synthetic coding sequence"
  source 1..324: mol_type = other DNA
tgaaccgtggccgcccccagcgtgttcatcttcccccccagcgacgaacagctgaaaagtgggaccgcaagtgtggtgtgtttactcaacaatttttacccccgcgaagctaaggtccagtggaaggtagataacgcattgcaaagcggaaattcccaagaaagcgtgacagaacaggatagtaaagattctacctatagccttagtagcactctgacactttctaaggccgactatgaaaagcataaagtatatgcctgtgaggtaacacatcagggcctctcctctcctgtcaccaaatcatttaatcgcggagaatgctag

SEQ ID NO: 9311 - DNA, 366 bp, synthetic construct
  misc_feature 1..366: note = source = /note="Description of Artificial Sequence: Synthetic coding sequence"
  source 1..366: mol_type = other DNA
atggtgctgcagacccaggtgttcatcagcctgctgctgtggatctctggagcttacggggatatcgttatgactcagagtccagattccttagccgtatcgctgggagaacgggcgactatcaattgcaaatcttcccagagtgttctgtattcctccaacaacaaaaattatttagcctggtaccagcaaaaacccggccagcccccaaaactgctgatatactgggccagcactagggaaagcggagtgcctgatcggtttagtggctcaggctcagggacagacttcacccttactatatcatctctacaggcagaagacgtcgctgtttactattgtcagcaatactactccactccctag

SEQ ID NO: 9312 - DNA, 984 bp, synthetic construct
  misc_feature 1..984: note = source = /note="Description of Artificial Sequence: Synthetic coding sequence"
  source 1..984: mol_type = other DNA
gccagcaccaagggccccagcgtgttccccctggccccctgcagccgcagcacttccgaatctacagccgctttgggttgcttggtgaaggattattttccagaacccgttaccgtttcttggaactccggcgccctgacaagtggcgtgcacacatttcctgcagtgctccagtcatctgggctttatagcctgtcatccgtggtaaccgtgccctcttcaagcctgggaacgaagacttacacgtgtaacgtcgatcacaaaccatctaatacaaaggtggacaagagggtagagagcaagtatggccctccttgtcctagctgccccgctccggagttcttgggaggccccagtgtattcctgttccctccaaaacccaaggataccctgatgatttctcggaccccagaagtaacttgtgtcgtggtggacgtttcgcaggaggatccagaagtgcagtttaactggtacgtcgatggagtcgaggtccacaacgctaagacaaagcctagagaagaacagttcaacagtacatacagagttgtatccgtgctgacggtcctgcaccaagattggctcaacggaaaagaatataaatgtaaggtgagtaacaaagggctaccatcgtctatagaaaagaccatatctaaagctaagggacagccacgggaaccccaagtgtacactctcccgccctcccaggaggagatgaccaagaaccaggttagtctcacctgtctcgtgaaaggcttctatccgtccgacattgccgtagagtgggaaagcaatggacagcccgaaaataactacaagaccactccacctgtattggattcagacgggagtttcttcctgtacagccggctgaccgtggacaagtctcggtggcaggagggaaacgtcttctcttgctccgtgatgcacgaagccctgcataaccactatacacaaaaatccctgagtctttctctgggaaagtag

SEQ ID NO: 9313 - DNA, 981 bp, synthetic construct
  misc_feature 1..981: note = source = /note="Description of Artificial Sequence: Synthetic coding sequence"
  source 1..981: mol_type = other DNA
gccagcaccaagggccccagcgtgttccccctggccccctgcagcagaagcacatcagaaagcaccgccgcattgggctgcctcgtgaaggactatttccctgagcctgttaccgtgtcctggaactctggcgcactcacatcaggagtgcacacttttcccgcagtgctgcaatcaagcgggttgtactccctgagtagtgtcgtcacagtgcccagcagtaattttggaacgcagacctacacgtgcaatgtcgaccacaagccatccaacaccaaagtcgacaaaaccgtggaacggaaatgttgcgtggagtgtccaccgtgtcctgctccgcccgttgcagggccatccgtctttctgttcccccctaagccaaaggataccctgatgattagtagaacccccgaggtcacctgtgtcgtagttgatgttagccacgaagacccagaagttcagttcaactggtacgtcgatggagttgaggtccataatgccaaaaccaagccgagggaggagcagtttaattctactttccgtgtcgtgagcgtcctcacggtggtccatcaagactggctgaacggcaaggagtataagtgcaaggtctcaaataagggcctgcccgcacccatcgaaaaaactatcagtaagaccaagggccagccccgagaaccccaggtctacactctacccccgtcccgggaggagatgactaaaaatcaggtaagtctcacctgtctcgttaagggattctacccctctgatatcagtgtcgagtgggaatctaacggccagccggagaacaactacaaaacaacaccacccatgctcgactctgacgggtcattttttctgtactcaaagctcacggttgataaatccaggtggcagcagggtaacgtcttctcctgctcagtcatgcatgaagccctacataatcactatacccagaaatccctgagcctgtctccaggaaaatag

SEQ ID NO: 9314 - DNA, 993 bp, synthetic construct
  misc_feature 1..993: note = source = /note="Description of Artificial Sequence: Synthetic coding sequence"
  source 1..993: mol_type = other DNA
gccagcaccaagggccccagcgtgttccccctggcccccagcagcaagagcactagcggcggcaccgccgcgttggggtgcttggtcaaggactatttcccagaaccggttaccgtgagttggaacagcggagcacttacttctggggtccacaccttccctgccgtcctccagtcaagcgggctatattcactgagctccgtggtaacggtgccctctagctcattgggaacgcagacctatatctgcaatgtgaatcacaaaccttctaacaccaaagtcgacaaaaaggtggagccaaaaagctgcgacaagacacacacttgccctccctgccccgcgccagagctcctgggcgggccttcagtctttctattccctccgaaaccgaaagacaccctcatgatcagccgaaccccagaggtaacgtgcgtggtagtagacgtctctcatgaagatccagaggtcaaattcaactggtatgtcgacggggtggaagtgcataacgccaagacaaaaccacgagaggagcagtacaattccacctaccgagttgtgtcagtgctgacagtgctccatcaggactggctgaacggcaaggagtacaagtgtaaagtcagcaacaaagctctgcctgctccaatcgagaagaccatatctaaagccaagggccaaccgcgcgaaccccaggtgtacacactccccccatcccgggacgaactgactaagaatcaggtgagcctcacttgcctggttaaggggttctacccttccgacatagcggtcgagtgggaatccaatggtcaacctgagaacaattacaaaacgacccccccagtgcttgattcggacggctcattctttttgtacagcaaactaacggtggataagtccagatggcagcagggcaatgtgtttagctgcagtgtgatgcatgaagccttgcataaccactatacgcagaagtcattgtcactgtcaccagggaaatag

SEQ ID NO: 9315 - DNA, 651 bp, synthetic construct
  misc_feature 1..651: note = source = /note="Description of Artificial Sequence: Synthetic coding sequence"
  source 1..651: mol_type = other DNA
atgggcgccgtgatgggcaccttcagcagcctgcagaccaagcagcggcgcccttccaaagacaaaatcgaggacgaacttgaaatgactatggtctgtcatagacctgagggactcgaacagttagaggcccagaccaacttcaccaagcgggagctgcaagtgctgtaccggggttttaaaaatgagtgtcccagcggcgtagtaaatgaggatacctttaagcagatttatgcccagttttttccacacggagacgcctccacctacgctcattatctttttaacgccttcgataccacacagaccgggtcggtcaagttcgaggattttgtgactgcattatctatactcttgcggggcactgttcacgagaagctccggtggacctttaatctgtacgacatcaacaaggacggctatattaacaaggaggaaatgatggatatcgtgaaggcaatatacgatatgatggggaaatacacttatcctgttctgaaagaagacacccccagacagcatgtggacgtttttttccagaagatggataagaataaggatggaattgtgacgctggatgagttcttggagtcttgtcaagaagacgataatatcatgcgtagtctgcagctgtttcaaaatgtcatgtag

SEQ ID NO: 9316 - DNA, 762 bp, synthetic construct
  misc_feature 1..762: note = source = /note="Description of Artificial Sequence: Synthetic coding sequence"
  source 1..762: mol_type = other DNA
atggcccggagcctgctgctgcccctgcagatcctgctgctgagcttagccctggaaaccgcaggcgaggaggcacagggcgataaaatcatcgatggtgccccgtgcgcacgaggctctcacccttggcaggtggctctcttgagcggtaaccagctacactgtgggggagtgctggtgaacgaacggtgggtcttgaccgctgcccactgcaaaatgaacgagtacaccgttcaccttggctcggatacactcggtgatagacgggcccagagaatcaaagcgagcaaatccttcaggcacccaggctactcaacgcagactcatgtgaacgacctgatgctggttaaacttaactctcaggcccgcctcagcagtatggttaagaaggttagactaccctcacgatgtgagccaccagggaccacatgcaccgtgtccggctggggaacaactacatcccctgacgtgacctttccatccgacctcatgtgcgtggatgtgaaactcatatctcctcaggattgcaccaaagtgtacaaagatcttctagagaactcgatgctttgcgcgggaattcccgattccaagaagaacgcatgtaacggagattctggagggcccctggtctgtcgcggaacacttcagggtttggtgagttggggtacatttccttgcggacagcccaacgatccaggagtttatacccaggtatgcaagttcactaagtggatcaatgacacaatgaaaaagcatcgatag

SEQ ID NO: 9317 - DNA, 468 bp, synthetic construct
  misc_feature 1..468: note = source = /note="Description of Artificial Sequence: Synthetic coding sequence"
  source 1..468: mol_type = other DNA
atgttccagcggctgctgctgctgctgctgctgagcatgggcggcacatgggcctctaaggagcccctgcgcccgcggtgtagaccgatcaatgctacgctcgcggttgaaaaagagggctgtccagtgtgcatcacagtcaataccactatctgtgccggctattgccccacaatgacccgggttctgcaaggggtactccctgccctcccccaggtcgtgtgtaattacagagacgtgcgctttgagagcattaggctgccagggtgtcctcgaggcgttaatcccgtcgtttcctacgccgttgcactatcctgtcagtgtgccctatgccgcaggtctactacggattgtggcggtcctaaggaccaccctctgacatgtgatgacccacgtttccaggactccagcagttccaaggctccacccccctctctgccctcacccagccgattgcccgggccatag

SEQ ID NO: 9318 - DNA, 1554 bp, synthetic construct
  misc_feature 1..1554: note = source = /note="Description of Artificial Sequence: Synthetic coding sequence"
  source 1..1554: mol_type = other DNA
atggccgtgagccggaaggactggagcgccctgagcagcctggccaggcagaggactcttgaggacgaagaggagcaggaacgcgaaagaaggagaaggcacaggaacctatcctcaacgactgacgacgaagccccacggctcagccaaaacggagaccggcaggcaagcgcatccgagcgactgccaagtgtcgaagaagctgaggtcccaaaacccctacctcccgcttccaaggacgaagatgaggatatccaatccatccttcgaacacgacaggaacggaggcagaggaggcaggtggtggaagctgcacaggccccaatccaggagagactcgaggcagaggagggccgcaactcactctcacctgtccaggccacacagaagcccctggtatcaaagaaggagctggagataccgcctcgccgacgattgtcaagagaacagagagggccttgggccctggaagaagaaagcctggtcggtcgcgagcctgaggagaggaagaagggagtacccgagaagagtcctgtgctagagaagtcgtccatgcccaagaagacggccccagaaaaaagcctggtgagcgacaagacctccatcagcgagaaagtgctggccagtgagaaaacctctctgtctgaaaaaatcgctgtctctgagaagaggaattcaagtgagaagaaaagcgtgctcgagaaaacttcagtgtcagaaaagtccctagcacccgggatggcactcggatccggccgacggcttgtgtccgaaaaggcgtccatattcgagaaagccctggcctctgagaagtctcccacggccgacgcaaagcctgcgccgaaaagggccaccgccagtgagcagcctcttgcccaggaacccccagccagcggtgggtctcccgcgacaaccaaggagcagagagggcgcgccctgccaggaaagaacctaccttctctggcgaagcagggcgccagcgatcctcccaccgtggcatccagactgcctcccgtgacactgcaggtgaaaatccccagtaaggaagaggaggcggatatgtccagccctactcagcggacttatagtagcagcctgaaacgatcttcgccacggacaatctcctttcgtatgaagcccaaaaaagagaatagcgagactacactaacacgcagtgcaagcatgaagttgcccgacaacaccgtgaagctgggtgagaagctcgaacgctaccatactgctatacgccgcagtgagagcgtgaaatcgcgaggccttccttgcaccgaactgttcgttgcccctgttggagtggcttccaaaagacatctgttcgaaaaagagctggccggccagagtcgcgccgaaccagcctcttctcggaaagagaatctacgcttgtcaggggtggttacttcccggctgaacctgtggatatcacgaactcaggaaagcggagaccaggacccgcaggaggctcaaaaggcatcaagcgctaccgaacgtacacaatggggtcagaaaagtgattcatcgctcgatgcagaagtttag

SEQ ID NO: 9319 - DNA, 270 bp, synthetic construct
  misc_feature 1..270: note = source = /note="Description of Artificial Sequence: Synthetic coding sequence"
  source 1..270: mol_type = other DNA
atgcaggcctgcatggtgcccggcctggccctgtgcctgctgctgggaccactcgcaggggcgaaacccgtgcaagaggaaggcgacccatatgcagagttgcccgccatgccatactggccattctcaacttctgacttctggaattatgtccagcatttccaggccctgggcgcctacccccagatcgaggacatggcccggacttttttcgcacactttccattggggagtaccctgggctttcatgtgccgtaccaggaagactag

SEQ ID NO: 9320 - DNA, 1302 bp, synthetic construct
  misc_feature 1..1302: note = source = /note="Description of Artificial Sequence: Synthetic coding sequence"
  source 1..1302: mol_type = other DNA
atgggcaacgcctgctgggagctgtactgcctggagcacggcatccagcccgatggccagatgccatctgataagaccatcggaggcggcgacgattcatttaccactttcttctgtgaaactggcgctggcaagcacgtgccaagggcggtcttcgtcgatctggaaccaacagtcattgacgagattagaaatggcccataccgtcagttgttccatcctgagcagctcatcactggcaaggaagatgcggctaataactacgctaggggacactacacgattggaaaagaaatcattgatccggtacttgatcggattaggaagttgagcgatcagtgcaccggccttcaggggttcctcgtgttccactctttcgggggcggcactgggagtggatttacgtctctgttgatggagaggctctccgtagactacgggaaaaagagtaagctcgagttttctatttaccccgctcctcaagtatccactgcagtggtagagccctacaatagcattctaacaacacacaccacactggaacactcagattgtgcttttatggtcgacaatgaagccatctacgatatctgtcggcgcaatctggatatcgaacgccctacttataccaatttgaataggctgattagtcagatcgtttcttccataacagcctccctcagatttgacggcgcccttaatgtggacctaactgagttccagacgaatctagtcccttatccccgcattcactttcctctcgcgacttacgccccagtgatcagtgctgaaaaggcataccacgagcagctcagcgtggctgagatcacaaacgcatgcttcgaaccggctaaccaaatggttaagtgtgaccctcggcacgggaaatacatggcatgctgtttgctgtatagaggcgatgtggtgccaaaagatgtgaacgccgcaatagctgcgataaaaaccaagagatccatccagttcgtggactggtgccccaccgggttcaaggtaggcatcaactaccagccccccacagttgtccccggcggagaccttgcgaaggtgcagcgggctgtgtgtatgctgtccaacactaccgccatcgcagaggcctgggcacgcctggaccacaagttcgacttgatgtatgccaaaagggcttttgtgcactggtatgtgggcgaggggatggaagagggagagttctctgaagctcgggaagacatggccgcacttgaaaaagactatgaggaggtaggtattgacagttacgaagatgaggacgaaggggaagagtag

SEQ ID NO: 9321 - DNA, 1965 bp, synthetic construct
  misc_feature 1..1965: note = source = /note="Description of Artificial Sequence: Synthetic coding sequence"
  source 1..1965: mol_type = other DNA
atggcccccaagaagctgagctgcctgcggagcctgctgctgcccttatccctaactctcttgctgccgcaggccgatacaaggtctttcgtcgtggaccgcggacacgaccgtttcctgttggacggggctccattccgatatgtgagtggttccctacactacttcagagtgccccgggtcctatgggccgacagactgctgaaaatgagatggtccggactcaacgcaatccagttttacgtgccctggaactatcacgaacctcagccaggggtttacaactttaatggtagcagggatctgattgctttcctgaacgaagcagctctcgccaacctgttggtgatactgcgtccagggccttacatttgcgccgagtgggaaatggggggcctcccttcttggctgctcaggaagccagagatccatttgcgcacgtccgatccagattttctcgccgcagtggattcctggttcaaagtgttacttcccaagatttatccatggctgtaccataatggcggaaacataatttctattcaggtcgagaacgaatatggctcctatcgtgcttgcgatttctcttatatgaggcatctcgctggcctgtttagggcattgctaggtgaaaagatactgttgtttactacagacggccctgagggcctcaaatgcggttcactgcgcgggctgtatacaaccgtggacttcggacctgccgacaatatgaccaaaatatttaccctcctccggaagtacgagcctcacggacccctggtgaacagcgaatactacactggttggctggactactggggacagaaccatagtacccgctcagtctccgctgtgaccaagggcctagaaaatatgctgaagctaggggcatcagtgaacatgtacatgtttcatggcgggaccaactttggctactggaacggagctgacaaaaagggcaggttcctgcccattactacatcatatgattatgacgcacctatctctgaagcgggcgaccctacacccaaattgtttgccctacgagatgtcatcagcaagttccaggaggttcccctcgggccacttccgcctccttctcccaagatgatgctcggaccggtcactctgcacctggtggggcacttgttggcattccttgaccttctttgtccgcgtggccccattcactccattctcccgatgacatttgaggctgtcaaacaggaccatggtttcatgctgtatagaacttacatgacccacactatctttgaaccaactcctttctgggtcccgaacaacggcgtgcacgacagggcttatgttatggtcgacggagtgttccagggggtggtagaaaggaacatgagagataagttattcctcaccggaaaattggggagcaagcttgacattttagtcgaaaatatggggcggctgtcctttggcagcaattctagtgactttaaaggcctgctgaagcctcctatccttggccagacgatcctgactcagtggatgatgttcccacttaagattgacaatctggtaaaatggtggttccctctacagttgcctaagtggccttatccacaagccccgagtggtcctaccttctacagcaaaaccttcccaatcctcggatccgttggcgatactttcctgtacttgccagggtggaccaagggacaggtgtggatcaacggatttaaccttggaagatattggacgaagcagggcccccagcaaacgctgtacgtgccacgttttctattattccctcggggagccctcaacaagatcacactgcttgaactggaagatgtgcccttacagccccaagtacagttcctcgataaaccaatcctaaattctacatcaacccttcataggacacacataaacagcctgtcagcggacacactatctgcctccgaacccatggagctatccggacactag

SEQ ID NO: 9322 - DNA, 1173 bp, synthetic construct
  misc_feature 1..1173: note = source = /note="Description of Artificial Sequence: Synthetic coding sequence"
  source 1..1173: mol_type = other DNA
atgaagttccagggccccctggcctgcctgctgctggccctgtgcttaggatccggcgaggcaggaccactacaatccggtgaagagtctacaggaacaaatatcggggaggcgctcgggcatggtctgggcgacgctctctccgagggggtgggaaaagccatagggaaagaggccggcggtgcagcaggaagtaaagtgagcgaggccctggggcagggcacacgggaggctgtcggcaccggagtgagacaagtcccaggctttggcgtcgcggacgcgcttggcaatagggtgggagaagccgctcacgctctgggtaatactggtcacgaaatcggaaggcaggccgaagacgtcatacgacatggggctgacgccgtgcgcggtagctggcagggagtgcctggccacaacggtgcctgggagacatccggcggccacggaatctttggctcgcagggaggattgggaggccagggtcaggggaaccctggaggactagggaccccctgggtgcacgggtaccccgggaatagcgctggatcatttgggatgaaccctcagggcgctccctggggccaaggtggtaatggcggaccacccaattttggcaccaacacacagggcgccgtcgctcagccagggtacggcagcgtgcgggcaagcaatcagaacgagggctgcacgaatccaccaccctccggctctgggggtggaagcagcaacagcggcggtgggtctggatcacagtcgggctcgtccgggtctggtagtaatggcgataataacaatggatcctcaagcggtggcagtagtagcggatcatcaagcggcgggtctagcggaggatcgtcgggagggtcctcaggaaactcaggcggctcaaggggagactcgggcagcgagtcctcttgggggtcatcgaccgggtctagtagcggcaatcatggcggcagcgggggaggaaacggccacaagcccggttgcgagaaaccgggcaacgaagctcgcggatctggcgaaagtggaattcagggcttcagggggcagggagttagcagcaatatgcgcaacagcgaaactagcccgggcatgttcaatttcgacactttctggaaaaattttaaaagcaaactcgggtttatcaattgggatgcaatcaacaaatag

SEQ ID NO: 9323 - DNA, 846 bp, synthetic construct
  misc_feature 1..846: note = source = /note="Description of Artificial Sequence: Synthetic coding sequence"
  source 1..846: mol_type = other DNA
atgggcagccggggccagggcctgctgctggcctactgcctgctgctcgcctttgcaagtggactcgtgctcagccgggtgcctcacgtgcagggtgagcagcaagaatgggaaggcactgaggagctgcccagtcctcctgatcatgccgaacgtgcagaggaacagcatgaaaagtaccgcccatcacaggatcaaggtttgcccgctagcagatgcctcaggtgttgcgatcctggtacaagtatgtacccggccactgccgtcccacagataaacataacaatactgaaaggtgagaagggggacaggggggaccgtgggctgcaggggaaatatggcaagactgggtccgctggtgctaggggacacaccggccccaaagggcagaaggggtcaatgggtgcccccggtgagcgttgcaagagtcattatgccgcgttctcggttgggcgtaaaaaacctatgcattctaatcattattaccagacagtcatcttcgatacagaatttgtgaacctctatgatcatttcaatatgttcaccggaaaattctactgctatgtccccggcttgtattttttcagtctgaatgtgcatacctggaatcagaaagaaacatacctccacatcatgaaaaacgaagaggaagtggtaattcttttcgcccaggtgggagatcgtagcatcatgcagagtcagtccctgatgctcgaacttagagagcaggatcaggtgtgggttcgtttatataagggagagcgagaaaacgcaatcttttcagaagaattggatacctacatcacattcagcgggtaccttgttaagcacgctactgagccctag

SEQ ID NO: 9324 - DNA, 876 bp, synthetic construct
  misc_feature 1..876: note = source = /note="Description of Artificial Sequence: Synthetic coding sequence"
  source 1..876: mol_type = other DNA
gtgctgagcgccagcggccccggccggaagatgggcagccggggccaaggcctgctgctcgcctactgcctgcttcttgccttcgcatccggcctagtgctatctcgggtcccgcacgtgcagggggagcagcaggaatgggaaggaacagaggagctccctagccccccagaccatgccgaacgcgccgaagaacagcacgaaaagtataggcccagccaagatcaggggttgcccgcatcccggtgccttcgctgttgtgatcctgggacgagtatgtatcctgccaccgctgtcccccagataaacataaccatcttgaagggagagaagggcgataggggcgatagaggcctacaggggaaatacggaaaaactgggagcgctggcgctcggggacacactggcccaaaaggacaaaaagggagtatgggcgccccgggcgagcgttgtaaaagccactacgccgctttctctgtgggaagaaagaagcctatgcacagtaatcactattaccagacagtgatattcgatacagagttcgtaaacctctacgaccatttcaacatgttcacgggaaagttctattgttatgtgcccggcctctacttcttctcactgaacgtccacacatggaatcagaaggaaacttatctccacatcatgaagaacgaggaggaggtcgtcatcctgtttgctcaggttggcgatcgatcaatcatgcagagccagtctctcatgcttgagcttcgtgagcaggaccaggtctgggttcgactgtacaagggagaacgtgaaaacgcaatcttttcagaagaacttgatacctatatcacgttcagcggatatctagtgaaacacgctaccgagccctag

SEQ ID NO: 9325 - DNA, 1002 bp, synthetic construct
  misc_feature 1..1002: note = source = /note="Description of Artificial Sequence: Synthetic coding sequence"
  source 1..1002: mol_type = other DNA
atggtgagcaagagccggtggaagctgctggccatgctggccctggtgctggtcgtaatggtttggtattctatcagtcgggaggacagatacatcgaactgttctacttccccatccccgaaaagaaagagccctgtctccagggggaagccgagagcaaagcatcaaagctcttcggcaattattctcgagaccaaccaatcttcctccgcctcgaggactacttctgggttaaaactccttctgcgtacgagcttccttacgggactaagggctcagaagatctgctgcttcgcgtgctggcaattacttcatcttctataccaaagaacatccagtctctgagatgcaggcggtgcgttgtcgtggggaacgggcacaggctccgcaattcctccttaggcgacgcgatcaacaagtacgacgtggtgattcgcctcaataacgccccagttgcaggctacgaaggagatgtgggatctaaaacaaccatgagactgttctacccagaatctgcccactttgatccaaaagtggagaataaccctgacaccttgttggtgctggtggcatttaaggcaatggacttccactggatagaaacaatcctctctgataagaaaagagtgcgaaagggcttttggaagcagccaccactcatctgggatgttaacccaaaacaaatccgcatcctgaatcctttcttcatggagattgcggcagataaactgttaagtcttccaatgcagcaacctagaaagatcaaacagaagcctaccacagggctgttggccatcacactggcgcttcatctgtgtgacctggtgcatattgccggtttcgggtacccagatgcctacaacaagaagcagactatccactactatgaacagatcaccctcaagtccatggcgggttcgggacacaacgttagccaagaggccctcgccattaagaggatgctggagatgggcgcgattaagaaccttacaagtttctag

SEQ ID NO: 9326 - DNA, 312 bp, synthetic construct
  misc_feature 1..312: note = source = /note="Description of Artificial Sequence: Synthetic coding sequence"
  source 1..312: mol_type = other DNA
atgagcggccggggcaagggcggcaagggcctgggcaagggcggcgcaaaacgccaccgcaaggtcctcagggataacatccaggggattaccaagccagctatcaggcgcctggcacgcagaggaggtgtgaagaggatctccggactgatctacgaagagactcggggagtccttaaggttttcctggaaaacgtgatcagggacgcagtgacatataccgagcacgcgaaacgtaaaacagtgaccgcaatggatgtggtgtacgcgctgaaacggcaggggagaactttgtacggtttcggcggatag

SEQ ID NO: 9327 - DNA, 312 bp, synthetic construct
  misc_feature 1..312: note = source = /note="Description of Artificial Sequence: Synthetic coding sequence"
  source 1..312: mol_type = other DNA
atgagcggccggggcaagggcggcaagggcctgggcaagggcggcgccaagcgtcacagaaaggtgctgcgggacaacatccagggcataacaaaaccagccatccgacgtctggcacggcgcggaggcgtcaagcggatcagcggcttaatttatgaggagaccaggggcgtgcttaaagtgtttctcgagaatgtgattagagacgcagttacctacacagagcacgccaagcgaaagaccgtcacagccatggatgtggtgtacgccttgaagagacagggtcgaactttatatggcttcgggggatag

SEQ ID NO: 9328 - DNA, 312 bp, synthetic construct
  misc_feature 1..312: note = source = /note="Description of Artificial Sequence: Synthetic coding sequence"
  source 1..312: mol_type = other DNA
atgagcggccggggcaagggcggcaagggcctgggcaagggcggcgcaaagcgccatcgcaaggtgctacgcgataatatccaagggattactaagcccgccatcaggcgcctcgctcggcgagggggcgtgaaacgcatctcagggctcatatatgaagagacgcgcggggttctaaaagttttcttagaaaacgttattagagacgccgtgacatatacagagcatgcaaaaaggaagacagttacagccatggatgtcgtatacgctctaaaacggcaggggcgtacactgtatggttttggcggatag

SEQ ID NO: 9329 - DNA, 312 bp, synthetic construct
  misc_feature 1..312: note = source = /note="Description of Artificial Sequence: Synthetic coding sequence"
  source 1..312: mol_type = other DNA
atgagcggccggggcaagggcggcaagggcctgggcaagggcggcgccaaacgccaccggaaggtgctaagagataacatccaggggattactaagcccgctatcagaaggctggccagacgaggcggggttaaacggatctctggcctgatctatgaagaaactcggggcgtgctgaaggtgtttctggaaaacgtcattcgcgacgcggttacttacacagagcatgccaagcgaaagacagtgacagccatggacgtggtttacgcattaaaacgtcaaggcagaacgttatatggttttgggggatag

SEQ ID NO: 9330 - DNA, 2268 bp, synthetic construct
  misc_feature 1..2268: note = source = /note="Description of Artificial Sequence: Synthetic coding sequence"
  source 1..2268: mol_type = other DNA
atgccccccttcctgctgctggaggccgtgtgcgtgttcctgttctctagagtgccaccttcactgcccctccaggaagttcacgtgagtaaagagactattggcaagataagtgctgcctctaagatgatgtggtgcagcgccgctgtggacattatgttcctgcttgatggctcaaattccgtcggtaaaggttcatttgaaaggagcaaacactttgcaataacagtgtgtgacggactagacatctcgcccgaaagagttagggtcggggccttccagttttcctccactcctcacctggaatttcctctggacagcttcagcacacaacaggaggtcaaggcccgtattaagcggatggtgtttaagggcggacgaactgaaaccgagctcgccctgaagtacctgttacacaggggcctgcccggtggaaggaatgcttctgtgccccagattctgatcatcgtgaccgacggaaagtcccagggagacgtcgctttaccctccaagcagctgaaagaacgcggcgtcaccgtgttcgcagttggggtgcgctttcccaggtgggaggagctgcacgccttggcgagcgaaccccggggacagcacgttctgctggctgaacaggtggaggacgcaaccaacggccttttcagtaccctgagcagttccgccatatgctcctccgccacacctgactgcagagtagaggcacatccatgtgaacatcgcacccttgagatggtgcgcgagtttgccggaaatgccccgtgctggcgagggtcccgtaggaccctcgcagtcttagccgctcactgcccattttactcttggaagcgtgtgtttttgactcaccctgcaacatgttacagaaccacgtgcccaggcccttgtgatagccagccctgccagaacggaggcacctgtgtgccggagggcctggacggctaccaatgcttatgccccctggctttcggaggggaagcgaattgcgcccttaaactgtccctcgagtgcagagtggacctactcttcctcctagattcttcggccggcacaacattagatgggtttctgagagccaaagtatttgtgaaacggttcgtgcgcgctgtcctgtcagaagactccagagccagagtgggggtagccacgtatagccgcgaactcctggtggcagtgcccgtgggcgagtaccaggatgtgccagatcttgtgtggtctctggacggcatcccattccggggtgggccgactctgactggctccgcgttgcgccaggcagccgagaggggattcggctccgccactagaactgggcaagataggccccgcagggtagtcgttctgctaactgagagtcatagtgaggatgaagtggcagggccggcacgccatgccagggccagggagctcttgcttctgggtgtcgggtctgaggccgtgcgggccgaactcgaggagatcaccggttcgcctaagcatgtcatggtgtatagtgacccccaagacctttttaatcagatacccgagctgcaaggtaaactatgcagcagacagcgaccgggatgtagaacgcaggcccttgatctagtgttcatgctcgacacatctgcttccgtgggaccggagaacttcgcccagatgcagtcttttgttcgcagctgcgccctgcaattcgaagtcaaccctgacgtcacacaagtaggactagttgtctacggctcacaggttcagaccgcattcggcctcgatactaaaccaactcgggccgcgatgttgagggccatcagccaggcaccgtacctgggaggggtgggctccgcagggaccgccctgctacacatctacgacaaagtgatgaccgtacagcggggggctcgcccaggcgtgcctaaggccgtcgtcgtgctgacaggagggcgaggggccgaagacgcagcagtccccgcgcagaagctccggaataatggtatctcggtgctggttgtgggagtgggccctgtgctgtccgagggcttgagacgcttagcaggccctagggattccctgattcacgtggctgcgtatgccgatcttcgataccatcaggatgtactcatcgaatggctctgcggtgaggctaagcagccagttaatctttgtaagccctctccttgtatgaatgaagggagttgtgtattgcagaacggcagctaccgatgtaaatgccgtgacggctgggaaggcccccactgcgaaaatcgctttctccggcggccgtag

SEQ ID NO: 9331 - DNA, 816 bp, synthetic construct
  misc_feature 1..816: note = source = /note="Description of Artificial Sequence: Synthetic coding sequence"
  source 1..816: mol_type = other DNA
atgatcaccggcgtgttcagcatgcggctgtggacccccgtgggcgtcctcacttccctggcatattgccttcaccagaggcgtgtagcccttgctgaactacaggaagccgacggccagtgccctgtcgatcgttcattgctgaaactgaaaatggtacaggtagtgtttcgtcacggagctagatctcccctcaagcctctacccttggaagaacaggtggaatggaaccctcagctgttggaagttccaccccagacccagtttgactatactgtaacgaacctggccgggggaccgaagccttactcaccctatgacagccaatatcacgagactaccctaaagggcggcatgtttgccggtcagctgaccaaagtcgggatgcagcagatgttcgcccttggtgaacgtctgaggaagaactatgtagaggatattcccttcttgagtccaactttcaacccccaggaagtttttattcgcagcaccaacattttcaggaacctcgaatccactagatgtctgctggctggtctgttccagtgtcagaaagaaggcccaatcataatccacacagacgaggcagacagcgaggtgttgtacccaaattaccagagctgttggtccctcaggcagcgaacacgggggagaagacaaacagcctccttacagcccgggatctccgaggatttaaagaaggttaaagacagaatgggcatcgactcctctgacaaggtagatttcttcattctgttggacaatgttgccgccgaacaagagaagatgggctcatgtaggttccacggttcatag

SEQ ID NO: 9332 - DNA, 1395 bp, synthetic construct
  misc_feature 1..1395: note = source = /note="Description of Artificial Sequence: Synthetic coding sequence"
  source 1..1395: mol_type = other DNA
atggagcacagcgtgtgccccagcagcgccgtgcacctgatccccgtatctacccccaagaatggtatgtcctcaaaatcacggaaacggatcatgcctgatcctgtcaccgaacccccagtcactgaccccgtttatgaagccttgttatattgtaacatcccatccgtggccgaacgttccatggagggacatgcccctcatcatttcaagttggtctctgtgcacgtgttcattcgacacggcgaccgctatccactgtatgtcataccgaagactaaacgaccagaaattgattgcacactcgtagctaacagaaaaccataccaccctaaactcgaggcctttatttcacacatgtccaagggatccggcgcttccttcgagagtcccttaaatagcttgccgctgtacccaaatcaccctctctgcgagatgggggagctgacacagacaggcgtagttcagcacctgcaaaacgggcagctgctccgggatatctacttgaagaagcataaattactgccgaacgattggagtgcagatcagctgtatctcgagaccacagggaagtcacggacattacaatctgggttagctctactgtatgggttcctcccggattttgattggaaaaagatctactttcgccaccaaccgagcgcacttttctgttctggtagttgttactgccccgtgcggaaccagtatctcgagaaggaacaaaggcggcagtacctgctcagactgaagaatagtcagcttgaaaagacttacggagagatggccaagatcgtcgacgtccctacaaagcaactgagggccgcaaatccaatcgatagcatgctttgccacttctgccataacgtctcctttccatgcacgaggaacggctgcgtggacatggaacacttcaaggtgattaagactcatcagattgaggatgagagagagcgaagagaaaagaagttgtactttggttacagcctactgggggcccatccgatcctgaatcagactatagggcgcatgcaaagggctacagaggggcggaaggaggagctgttcgcactctactctgcgcatgacgtgactttgtcccctgtcctgtctgctctggggctgtccgaagcacggtttccacgctttgcagcccgtctgatttttgaactctggcaggacagggagaaaccatcagaacattcggttagaattctctataacggcgttgacgtgacttttcatacatcattctgccaggatcaccataagcgcagtcctaaaccgatgtgtcccttggagaatctggtgcgcttcgttaagcgcgatatgtttgtggccctgggcggcagcggtaccaattactatgacgcatgtcaccgggaaggcttctag

SEQ ID NO: 9333 - DNA, 1443 bp, synthetic construct
  misc_feature 1..1443: note = source = /note="Description of Artificial Sequence: Synthetic coding sequence"
  source 1..1443: mol_type = other DNA
atgctgttccggaaccggttcctgctgctgctggccctggccgccctcctggcatttgtatccttatccctccaattttttcacctcattccggtgtcaacacccaagaatggcatgagtagcaagtctcgtaaaagaattatgcccgaccctgtgaccgaaccccctgtcacagaccctgtatacgaagccctgttgtactgtaacattcctagcgtggctgagagaagcatggagggccatgcgccccaccacttcaagctggtctccgtgcatgtcttcatcagacatggagacaggtatcctctgtatgttatccctaaaactaagagaccagagatcgactgcaccctggtggccaatagaaagccttatcaccccaagcttgaagcctttatttcccacatgtcaaagggctccggggcctcctttgaaagtcccctgaacagtttgcctctttaccctaaccaccccctttgtgaaatgggcgagctaacacagaccggggtggtacagcacctccagaatggccagctgctgagagacatctaccttaagaagcataagctgctgccaaatgattggtctgccgaccagttgtatttggagactacaggaaagtcccgcacacttcagagtgggcttgccctactgtacggattcttgcctgacttcgattggaagaaaatctactttaggcaccagccatccgccttgttttgttcaggcagttgctactgtccagttaggaatcaatacttagagaaggaacaacggcggcagtacctccttaggctaaagaattcgcaactggaaaaaacttacggggagatggcaaagattgtagatgtaccaactaagcagttgcgggccgcaaacccaatagattccatgctctgccacttctgtcacaacgtgtcctttccctgcactcggaatgggtgcgtggacatggagcacttcaaagtcattaagacccatcaaatcgaagacgagcgagaaagacgagagaagaaattgtattttggctactcccttttaggcgctcaccctatcctgaatcagacaattgggagaatgcagagagctacggagggcagaaaggaagagctgttcgcattgtactccgctcacgatgtcactttgtcacctgtactgtccgctttgggcctgagcgaggcccgattcccgcgtttcgccgcaaggctgattttcgaactatggcaggacagagagaagcccagtgaacattccgttcgcatattgtataatggcgtagatgttactttccatacgtcattctgccaggaccatcacaagaggagtccaaaacccatgtgccccctggaaaacctggtgaggttcgtgaaacgggacatgttcgtcgccctaggggggagcggtactaactactacgacgcttgccacagggagggcttttag

SEQ ID NO: 9334 - DNA, 1311 bp, synthetic construct
  misc_feature 1..1311: note = source = /note="Description of Artificial Sequence: Synthetic coding sequence"
  source 1..1311: mol_type = other DNA
atgcagggcacccccggcggcggcacccggcccggccccagccccgtcgacagacgcactctcttggtgttctcattcatcttggccgccgcactgggccagatgaacttcacgggggaccaggttcttcgtgtgttggccaaggatgagaagcagctgtctctcctgggcgacttggagggactgaagccgcagaaggtagatttttggcgggggcccgctcgtcccagcctacccgtcgatatgagagtgcccttttccgagctgaaggacattaaagcgtacttggaaagccacggactggcgtattccattatgataaaggacatccaggtcctgctggatgaagagcgtcaggcgatggccaaaagccggcggctggaaaggtcaacaaacagtttctcttactcttcatatcatactctggaagaaatttattcatggatagataacttcgtaatggaacactccgacattgtcagcaaaattcaaatcgggaattctttcgagaatcaaagtatcctagtgctgaaattttctacggggggttctcgtcaccccgccatctggattgacacaggcatacacagtagggaatggataactcatgctaccggcatctggacagccaacaagatagttagtgattacggtaaggatagagtgttgacagacatcctgaacgctatggacatttttattgaattggtgactaatcctgatggatttgcatttacccactccatgaatcggctgtggcgaaagaataagagtattaggccggggatattttgtatcggtgtggatttaaacagaaactggaagtcgggattcggaggaaacggaagcaacagtaacccctgctctgagacatatcatggcccaagccctcagagtgagcctgaagtggccgccatcgtaaatttcattacagctcacgggaatttcaaggccctcattagcatacactcttatagccagatgctgatgtatccctatggtcggctcctagagccagtgtccaaccagagggaactgtacgatctggctaaagatgctgtggaagcactatacaaggttcatggaatcgagtatattttcggaagtatatctaccacactgtatgtcgcttcaggtattaccgtggactgggcttacgattctggtatcaagtacgccttttctttcgagctccgggacactgggcagtatggctttttgctgcctgccacccagattattcccaccgcccaggaaacctggatggcacttcggaccattatggagcacaccttaaatcatccatactag

SEQ ID NO: 9335 - DNA, 1161 bp, synthetic construct
  misc_feature 1..1161: note = source = /note="Description of Artificial Sequence: Synthetic coding sequence"
  source 1..1161: mol_type = other DNA
atggcccagtggcactgcagccagcggacccaggccggcggccacggcgttggtgagcgtctcgcgcaatgtcaggaccagtcgtccagacacgcagcagaattgcgtgactttaaaaacaaaatgctgcctctgctggaggtggcagagaaagaaagagaggcactccggacggaggcagacaccattagtggacgggtggaccggttggagagagaagttgattacctggagacacagaacccggctctcccttgtgtggagttcgatgaaaaggttacgggtgggcccggaactaagggcaaggggcgcagaaacgaaaaatatgacatggtcaccgattgtggctacaccatttcacaggttcggagcatgaaaattctcaaacgctttggcgggccagcaggtttgtggactaaggaccctctgggtcagacagaaaagatctacgtgctggatggcactcagaatgacacagcctttgttttcccccggctgagagacttcacactggcaatggcagcccgcaaagctagcagggtacgggtaccattcccatgggttggaaccggacagctggtatatggagggttcctgtactttgcaaggaggccacccggcagacccggcggtggtggcgaaatggaaaacacacttcagctcataaaatttcacctggccaatcgaacggtcgtcgattctagtgtcttccctgctgagggactaatccctccctacggactgactgccgatacatacatcgatctggcggccgatgaagagggcctgtgggccgtgtatgccacccgcgaagacgacaggcacctgtgcttagctaaactagacccccagaccctggatactgagcagcagtgggacacaccttgcccccgggagaatgctgaagcagcattcgtaatttgtgggactctctacgtcgtgtacaatacccgcccagcatctagggcccggatccagtgctcctttgatgcctccggaactctcacaccagaacgggccgctcttccctattttcctaggaggtacggcgctcatgcaagcttacgctacaacccacgcgaacgccagctgtacgcctgggatgacggttaccaaattgtgtacaagctggagatgcgcaagaaggaggaggaggtgtag

SEQ ID NO: 9336 - DNA, 990 bp, synthetic construct
  misc_feature 1..990: note = source = /note="Description of Artificial Sequence: Synthetic coding sequence"
  source 1..990: mol_type = other DNA
atgcggcccccccccgccctggccctggccggcctgtgcctgctggccctgccggctgcggcagcctcttattttggcctcacaggacgagaagtactgactccgttccccgggctaggtaccgctgctgcacctgctcagggcggggcacacctcaagcagtgcgaccttttaaagctttcacgtaggcagaagcagttgtgcagacgcgaacctggcctggcagagaccttgagagatgcagcgcacttagggttactggaatgtcaatttcagtttcgacatgagcgatggaactgctccctggaagggcgaatgggcctcctgaaaagagggttcaaagagaccgcatttctctacgccgtgagcagcgcagctctaactcacacactagctagggcatgttctgctggacgaatggaacggtgcacatgcgacgacagcccaggactcgaatcacgtcaggcctggcagtggggcgtgtgcggggacaacctcaagtactctacaaagttcctgagtaatttcttggggtctaagagaggtaacaaggacttaagggcacgtgcggacgctcataatacacacgtgggcattaaggccgtgaagtcaggactgagaacaacttgcaaatgtcacggcgtgagtggctcgtgcgctgtgcgaacatgctggaagcagctatcccccttccgagagacgggccaagtcctgaaactgaggtatgattcggcagtcaaggtgagcagtgcgactaatgaagcacttggtcggcttgaactctgggctcctgcccggcaggggagcctcacgaagggattagctcccagatcaggggacctcgtatatatggaggacagtccatcgttttgcagaccttcaaagtacagcccaggcaccgcaggctggagcgcagtcgcgaggtcacagctgatcaccacatctacctctagaattcaggcgatcctccctagccagctgcctgaatag

SEQ ID NO: 9337 - DNA, 579 bp, synthetic construct
  misc_feature 1..579: note = source = /note="Description of Artificial Sequence: Synthetic coding sequence"
  source 1..579: mol_type = other DNA
atgcggctggccggccccgagagcagcgtgaccgccgccccccgggctaggaagtataagtgcggtttgccacagccatgtccagaagaacacctggcttttagagtcgtgagcggagctgcaaacgtgatcgggccgaaaatctgtctggaggataagatgctgatgtcctctgtaaaggataacgtgggaagggggctaaatattgctctcgtcaacggggtaagtggcgaactgatcgaggcccgagcgtttgatatgtgggctggggacgttaatgacctccttaagtttattcggcccctacacgaaggtacacttgtcttcgtggcttcatatgatgatccagccaccaagatgaatgaggaaacaaggaaactgttttctgaactcggaagccgtaacgcaaaggagttggcatttcgtgattcgtgggtgtttgttggggccaaaggagtgcagaataaatccccatttgagcagcatgtcaagaacagtaagcattctaataaatacgaaggatggcccgaggcactcgaaatggaaggatgtatcccccgacgttccactgcatcatag

SEQ ID NO: 9338 - DNA, 1053 bp, synthetic construct
  misc_feature 1..1053: note = source = /note="Description of Artificial Sequence: Synthetic coding sequence"
  source 1..1053: mol_type = other DNA
atgaagtgcagcctgcgggtgtggttcctgagcgtggccttcctgctggttttcataatgtcgctgctttttacctattctcaccattccatggccaccttgccatatctggattcaggtgcactggacggtacacatcgggtcaaactggtccctgggtacgctggcctgcagcgcttatctaaggagcgccttagcggcaagtcctgcgcatgtagaagatgcatgggagacgcaggggcttctgattggtttgactcccactttgatggaaatatttcacctgtgtggactagggaaaacatggacctaccccccgatgtccaacgatggtggatgatgttgcagccacagttcaagtcacacaacacaaatgaggtcctcgagaaactcttccaaatagttcctggagaaaacccctacaggtttcgagatcctcaccagtgtaggcggtgcgccgtggtaggcaactccggaaacttgcggggatcaggatacggccaagacgttgatggacataacttcatcatgcgaatgaaccaggctcccaccgtcgggttcgaacaggacgtgggaagtcgaacaacgcaccatttcatgtatccagaatcggctaaaaacctgcccgccaacgtcagcttcgtgctggtgccctttaaggtcctagatctcttgtggatcgcttctgccctttccactggtcagatccgattcacttacgccccggttaagagctttttaagagttgacaaagaaaaagtccagatatataatcccgccttttttaaatacatccatgacaggtggaccgaacaccatggccgatacccaagtaccggtatgctggtactttttttcgccctgcacgtatgtgacgaagtgaacgtttacgggtttggtgcagactccaggggcaattggcatcattactgggaaaataaccggtatgctggtgagtttaggaaaaccggcgtgcacgatgccgatttcgaggcccacatcatagatatgctggcaaaagcgtcaaaaatagaagtgtacagaggtaactag

SEQ ID NO: 9339 - DNA, 189 bp, synthetic construct
  misc_feature 1..189: note = source = /note="Description of Artificial Sequence: Synthetic coding sequence"
  source 1..189: mol_type = other DNA
atgaagatccagctgttcttcttcatcctgcacttctgggtgaccatcttacctgcccgaagtaatttcgagcctaagtaccgcttcgaaaggtgtgaaaaggttcgcggtatatgcaagactttttgcgatgacgttgaatatgattatggctactgtatcaagtggagaagtcaatgttgtgtatag

SEQ ID NO: 9340 - DNA, 738 bp, synthetic construct
  misc_feature 1..738: note = source = /note="Description of Artificial Sequence: Synthetic coding sequence"
  source 1..738: mol_type = other DNA
atgaccctgttccccgtgctgctgttcctggtggccggcctgctgcctagcttccccgccaacgaagacaaggacccagctttcacagctctattgacgacacagacacaagtgcaacgtgaaatcgtcaataagcacaatgaactgcgcagagcagtctcgcccccagctagaaacatgctgaaaatggaatggaataaggaggccgctgccaatgctcagaaatgggctaatcagtgtaactatagacactctaaccctaaggacaggatgacctcgctgaagtgtggggaaaacctttacatgagcagtgcttcctcatcttggtcccaggccatccagtcctggttcgacgagtacaacgacttcgattttggcgttggcccaaaaacccctaacgccgtggtaggccactacactcaggtggtttggtattcatcatacctggtggggtgtggaaatgcctactgtcctaatcagaaagtattaaaatactactacgtctgccagtactgccctgcaggcaattgggctaaccggctgtacgtaccttacgagcaaggggccccttgcgcatcttgcccagataactgtgacgatggcctctgtaccaacggctgtaagtacgaggacctgtactccaactgtaaaagcctgaagctgacactgacatgcaagcatcagctcgtacgtgactcatgtaaggcatcgtgcaactgctctaattccatatattag

SEQ ID NO: 9341 - DNA, 1341 bp, synthetic construct
  misc_feature 1..1341: note = source = /note="Description of Artificial Sequence: Synthetic coding sequence"
  source 1..1341: mol_type = other DNA
atgctgcaccccgagaccagccccggccggggccacctgctggccgtgctgctggcactcttgggcaccgcatgggccgaggtttggccacctcaactgcaggagcaagcccctatggccggagccctgaatagaaaggagtccttcctgctgttgagtcttcacaatagactcagatcctgggtgcagccacccgccgcagacatgcggcggcttgactggtctgactctctagcgcagttagctcaggcgagagcagctttgtgcggtacccccaccccatcactggcatccggactgtggaggaccttgcaggttggctggaatatgcagttactgcctgccggactcgtgtcattcgtagaggttgtgagtttgtggtttgctgaaggacagcggtacagccacgccgcaggagaatgcgctaggaatgccacttgcacacactatacccagctggtttgggccacctcttcccagctgggctgcgggagacacctgtgctcggcaggccaagcagcaattgaagcgtttgtgtgcgcgtacagtcctaggggtaactgggaagtgaatggaaaaactatcgtcccctataagaaaggtgcctggtgttccttgtgtaccgctagtgtgtctggctgtttcaaagcttgggatcatgcaggcggtctgtgcgaagtgcctagaaacccctgccgtatgtcatgccagaaccacggaagacttaatattagcacatgtcactgtcactgccctcccggttatacgggtcgatactgtcaggtaagatgttcattgcagtgcgtgcacgggcgttttagggaggaggagtgttcatgtgtgtgtgacatcggctacgggggcgctcagtgtgctactaaagtgcactttcccttccacacgtgtgatttacgtattgacggagattgcttcatggtgagtagcgaggccgacacatattaccgcgctaggatgaaatgccagagaaaaggtggcgttctggcccagatcaagagccaaaaggtacaggatattctggcgttttatctagggcggctggagacaactaacgaggtcatagactctgattttgaaacacgcaacttctggataggcctgacttacaagaccgccaaagactcttttcgctgggcaaccggcgaacaccaggcattcacgtccttcgcttttgggcagccggacaatcacgggtttggcaattgcgtggaacttcaggcctcagcagcctttaactggaacgatcagagatgcaagactaggaacaggtacatttgccaattcgctcaggaacatataagtcgatggggacctggctcttag

SEQ ID NO: 9342 - DNA, 585 bp, synthetic construct
  misc_feature 1..585: note = source = /note="Description of Artificial Sequence: Synthetic coding sequence"
  source 1..585: mol_type = other DNA
atgaccatgcggcacaactggacccccgacctgagccccctgtgggtgctgctgctctgtgcccacgtggtgacattattggtgcgcgccaccccggtatctcagaccaccactgcggccaccgcgagcgtccggagcaccaaagatccatgcccctcacagcctcctgtgtttccagctgcaaagcagtgcccagccctcgaggtgacatggcccgaagttgaagtgcccctgaatgggacactatcacttagttgcgtcgcttgttctcggtttccaaatttctccatcctttattggcttgggaacggttccttcattgaacacttaccagggcggctctgggagggatctacgagtcgcgagcggggcagcactggaacccaactctgcaaggcactggtgcttgagcagcttactccagctctccatagcacaaacttttcttgtgtactggtggatccagaacaagtggttcagcggcacgtcgtgctggcacagctttgggccggactacgcgcaactctgccaccgactcaggaagctttaccatcgagccactcctctccccagcagcaaggttag

SEQ ID NO: 9343 - DNA, 585 bp, synthetic construct
  misc_feature 1..585: note = source = /note="Description of Artificial Sequence: Synthetic coding sequence"
  source 1..585: mol_type = other DNA
atgaccatgcggcacaactggacccccgacctgagccccctgtgggtgctgctgctctgcgcacatgtggtgaccctgctagtgcgtgccacccccgtgtcacagaccactacagctgctactgccagcgtccgctcaaccaaagacccgtgcccttcacagccacccgtcttcccagctgccaagcaatgtcccgccctggaggtgacgtggcccgaggtggaggttccccttaatggtactctcagcttgagctgcgtcgcttgcagtcgtttcccaaatttcagtatcttgtactggttgggtaacggatcctttatcgagcacctgcctggacggctttgggagggatctacatcgcgagagagaggctcaaccggtactcagctgtgtaaggcgttagtgcttgaacagctgacaccagcacttcattcaacaaattttagttgtgtgctggtggacccggagcaagtggtgcagaggcacgtggtactcgcacagctgtgggccggcctgcgggctacgctgcccccaacccaggaggcacttcctagcagccactcttctccacaacaacaaggctag

SEQ ID NO: 9344 - DNA, 348 bp, synthetic construct
  misc_feature 1..348: note = source = /note="Description of Artificial Sequence: Synthetic coding sequence"
  source 1..348: mol_type = other DNA
atgaccatgcggcacaactggacccccgacctgagccccctgtgggttctgctgctgtgtgcccacgtcgtgactctcttggtccgcgccactccagtgtcacagacaaccactgccgccactgccagtgtgcgtagtacgaaggacccatgcccgagccagcctccagtattccctgccgccaaacagtgtcctgctctggaagtgacatggccagaggtggaagtgccgctgtcttgggctgagggaaacttggcccctcatccaaggtctccagcattgcagcctcagcagagtacagccgcagggctgcgactgtccactggccctgcagcagctcagccttag

SEQ ID NO: 9345 - DNA, 528 bp, synthetic construct
  misc_feature 1..528: note = source = /note="Description of Artificial Sequence: Synthetic coding sequence"
  source 1..528: mol_type = other DNA
atgctgccccccatggccctgcccagcgtgagctggatgctgctgagttgtctgatgctcctcagtcaggtgcaaggcgaagagccacagagggagttgccctccgccagaatccggtgtccaaaaggatctaaggcgtacggtagccactgttatgcactcttcctatcccctaaaagctggaccgacgctgacctggcttgtcagaaaagaccgagtgggaatcttgttagcgtgctgtctggggcggagggcagcttcgtctcttctctggtaaaatctattgggaactcttattcctatgtgtggatcggacttcatgaccccacccagggaaccgagcccaatggggagggctgggagtggagttccagtgatgtgatgaactatttcgcttgggaaagaaaccccagtacgatctcatcccccggccactgcgcaagtttaagtcggtcaacagcctttctgagatggaaggactacaattgtaacgttcggttgccttatgtctgtaagttcacagattag

SEQ ID NO: 9346 - DNA, 993 bp, synthetic construct
  misc_feature 1..993: note = source = /note="Description of Artificial Sequence: Synthetic coding sequence"
  source 1..993: mol_type = other DNA
atgggcaagctgtgcctgggccccaccctgtgccccgccgccgccgctgaagagagcagggatgcagagcccagaagggaactcctctgtagtggtaggccctggacatggagggccgccgctcgagtcaccacaatgattccatgggtgctcctagcatgcgccttgccgtgcgccgcagacccgctgcttggcgcctttgctcggcgtgacttccggaagggctccccacaactggtgtgtagcttgccaggccctcaaggtccacccgggcccccaggagcccccggaccctccggcatgatggggaggatgggttttcctggtaaggatggccaggatgggcatgacggcgatagaggtgatagcggcgaggagggccctcctggccgcacaggcaatcgtggcaagccgggtcctaaaggaaaggccggagccatcggacgagctggcccacgggggccgaaaggggtcaatgggacccccggaaaacacgggactcctgggaagaagggcccaaaaggaaaaaaaggcgaacctggccttcccggaccttgcagttgtggaagtggacacaccaaatccgctttcagcgtggctgtgaccaagagctatcctcgagaacgtctacccatcaagttcgataagatcttaatgaacgaaggggggcactacaacgcttcctcgggcaagttcgtctgcggcgtgccagggatttactattttacgtacgatatcacactggccaacaaacacctcgccatcgggttagtccacaacggccagtatcgtattaggactttcgatgccaacactgggaatcatgacgtagcgagcggctctactatcttggcattgaaacagggcgacgaagtgtggctgcagattttctattccgaacagaacggattattttacgatccatactggacagactctctgtttactggatttctgatctatgcagatcaggatgaccctaatgaggtttag

SEQ ID NO: 9347 - DNA, 390 bp, synthetic construct
  misc_feature 1..390: note = source = /note="Description of Artificial Sequence: Synthetic coding sequence"
  source 1..390: mol_type = other DNA
atgcggctgctgctgctggtgcccctgctgctggcccccgcccccggatcgtccgcgcctaaagtgaggaggcagtccgacacctggggcccgtggtcacaatggtctccgtgctcaaggacgtgtggcggaggggtctctttccgcgaacgcccttgctatagccagcgccgagacggcggcagctcatgcgtaggaccagctcgctctcatcggtcctgtagaaccgaatcctgcccagacggcgcaagagattttcgcgcagaacagtgcgccgaattcgacggggccgaattccagggtcgccggtacaggtggctcccctactactccgctccaaacaagtgtgagctcaattgtattcctaaaggcttgggtctacaaggatag

SEQ ID NO: 9348 - DNA, 1227 bp, synthetic construct
  misc_feature 1..1227: note = source = /note="Description of Artificial Sequence: Synthetic coding sequence"
  source 1..1227: mol_type = other DNA
atgttcagcaacgccaacagccggagcaagatgtggctgctgctgacgatggcatctttgatctccgttctcggtacaacccatggcctttttggtaaattacatcctggctcaccagaagtgacaatgaatatctcacagatgataacatactgggggtatcccaatgaggagtacgaggtcgtgaccgaggacggctatattcttgaggtgaatcgaattccttatggcaagaagaacagtgggaatactggacagagacccgtggtctttttacaacacgggttactcgccagcgctacaaactggatctccaacctgcccaataattccctcgcctttattctcgccgacgcagggtatgatgtctggcttggcaactctaggggcaacacttgggctagacggaacttgtattacagccccgactctgtggaattttgggccttctcttttgatgaaatggcaaagtacgatttacccgccaccatcgatttcatcgtgaaaaagactggccagaagcagcttcactatgtggggcattcccaaggaaccactatcgggtttattgccttcagtacaaacccaagcttagccaaaagaatcaaaacgttctatgctctcgctcctgtggcaaccgtcaagtataccaaatccctcattaataagctgcgatttgttcctcaaagcttgtttaaattcatcttcggggacaagattttttacccacataacttcttcgatcagtttctcgccacagaagtatgtagtagggaaatgctcaatctgctctgttctaatgccctgttcatcatctgcggttttgattcaaagaacttcaatacaagccggctagacgtgtacttgtctcacaatccagccgggaccagcgtgcagaatatgttccactggactcaggctgttaagagcggcaagtttcaggcttacgactgggggtcccctgtacagaacagaatgcactacgatcagagtcagccgccatactacaacgtcaccgctatgaatgtccctatcgccgtctggaatggtggtaaagacctgcttgcggacccacaagacgtgggtcttcttctgcctaaattacctaatttaatctaccataaggaaattcctttctacaaccatctcgacttcatttgggccatggacgctccccaggaggtgtacaacgacattgtctctatgatctccgaggacaaaaagtag

SEQ ID NO: 9349 - DNA, 393 bp, synthetic construct
  misc_feature 1..393: note = source = /note="Description of Artificial Sequence: Synthetic coding sequence"
  source 1..393: mol_type = other DNA
atggccagcgacctgatccggaccatcctggccgtggccctgatcagcaaactgggtactgccgtggatgcggagcttatgccatcaggtgccattctgcaaaacaaaagagagaatctccctcgggtttgtcacgcactcgcatttttagggatggcgcggtgccaagatctcttcctcgtgcggttgcaggggtggaagcttgggacaagatttcaagatggtccacgatcaaccccccaagaggagggaggttctccacagaggaaaagggggatgcccgtgcagattcatttcctgctgaaatcttttctgtctagcccgataacatttgcctttattagtcttgcccggaccgtgtctctggctactgccatctgcaagattgtttag

SEQ ID NO: 9350 - DNA, 393 bp, synthetic construct
  misc_feature 1..393: note = source = /note="Description of Artificial Sequence: Synthetic coding sequence"
  source 1..393: mol_type = other DNA
atggccagcgacctgatccggaccatcctggccgtggccctgatctcaaagctagggactgctgtggatgccgaactgatgccaagtggagccattctgcaaaacaaacgggagaacctgcctcgcgtgtgccatgcacttgcattcttgggcatggcacgatgccaggacctgtttctggtgagactacaggggtggaagttagggacacgctttcaggatggtccgagatccacaccccaagaggagggaggctcccctcagcgtaagaggggaatgccagtccagattcacttccttcttaaatctttcctgtcttccccgatcacgttcgcattcattagtctggcacggaccgtctcactggccactgcaatttgcaaaatcgtttag

SEQ ID NO: 9351 - DNA, 1731 bp, synthetic construct
  misc_feature 1..1731: note = source = /note="Description of Artificial Sequence: Synthetic coding sequence"
  source 1..1731: mol_type = other DNA
atgatcgtgttcggctgggccgtgttcctggccagccggagcctgggccaaggtctcttattgacccttgaggagcatatcgcccacttcctgggcaccgggggtgcagcaaccactatgggcaactcttgcatttgtcgggacgattccggtacagacgatagtgtagatacgcaacaacagcaggctgagaactccgccgtcccgacagcggacactcgcagtcagccccgggacccagtaaggccacctcggcgcgggcgcggcccccatgaaccacgaagaaagaagcagaacgttgatgggttggtcctggacactttagcagttattcggaccctagttgataacgaccaggaacctccatattctatgatcacccttcacgaaatggctgaaacagatgaggggtggctagacgttgtccaatcactgattagggtcatcccactcgaagatccacttggccctgccgtgattacattactgctggacgaatgcccactgccaaccaaggacgctctgcagaaactgacagagattttaaacctaaacggagaagtggcctgtcaggacagcagccaccccgccaagcacagaaatacatccgcggtgctggggtgtctcgctgagaagttagccggtccagccagtataggactgctctcacccggaatacttgagtacttactgcagtgcctaaagctgcagagccacccaacagtcatgctcttcgctctcatcgccttagagaagtttgcacaaacatctgagaacaaactgacaatatccgaaagtagcatctcagaccgtctcgtgacacttgagtcctgggcgaatgaccccgactacctaaaacgacaagtgggcttctgcgcccaatggtcgctggacaacctgttcttaaaggagggtaggcagttgacttatgaaaaagtgaatctttcaagtattcgcgctatgctgaatagcaatgacgtgagcgagtacctcaagattagcccccacggcttggaggcgcgctgtgacgcaagttccttcgaaagtgtaaggtgtacattctgtgttgatgccggagtctggtactacgaggtgactgtcgtcacgagtggcgtgatgcaaatcggatgggccacacgggacagtaaatttttgaaccacgaaggctatgggataggcgatgacgagtatagttgtgcatatgacggatgtagacagcttatctggtacaacgcacgctcaaagccgcacattcatccctgttggaaagaaggggatacagtcgggttccttctggacctgaatgaaaagcagatgatcttttttctgaacggaaaccagcttcccccggaaaagcaggtgttctctagtacagtgtcaggattctttgctgcggcatcatttatgtcgtaccagcagtgcgaattcaacttcggggctaaaccattcaagtatccaccatcaatgaagttcagcacttttaacgattatgctttcctgactgccgaggagaagatcatcttgcctcggcaccggagacttgccctgttaaaacaggtatctatcagagagaattgttgcagcctgtgttgtgatgaggtcgctgacacacagctaaagccatgtgggcatagtgatctctgtatggattgcgccctccagctggagacttgtcctctttgtcgcaaggagattgtgtcccgtattagacagatttcccacatttcttag

SEQ ID NO: 9352 - DNA, 360 bp, synthetic construct
  misc_feature 1..360: note = source = /note="Description of Artificial Sequence: Synthetic coding sequence"
  source 1..360: mol_type = other DNA
atggcccggcccggcatggagcggtggcgggaccggctggccctggttactggtgctagcggaggaataggagccgccgtggctcgggccctcgttcagcagggtctgaaagtggtaggctgcgcccggacagtgggcaatatcgaggaactggcagcagagtgcaagtctgcaggctatcccggcactctgatcccatacagatgcgacctgtcaaatgaggaggatatccttagtatgttttcagcaatccggagtcagcactctggcgtggacatttgtattaataatgcaggcttagccaggccggacacgcttctttccggctctacaagcggatggaaagatatgttcaactag

SEQ ID NO: 9353 - DNA, 144 bp, synthetic construct
  misc_feature 1..144: note = source = /note="Description of Artificial Sequence: Synthetic coding sequence"
  source 1..144: mol_type = other DNA
atgcaggtgagcaccgccgccctggccgtgctgctgtgcaccatggctctttgcaaccaggtgctgagtgcaccccaggccgggaggagtgtcctgacacccgtgagatccggcagtcgtaatacatcagttacctggagttag

SEQ ID NO: 9354 - DNA, 159 bp, synthetic construct
  misc_feature 1..159: note = source = /note="Description of Artificial Sequence: Synthetic coding sequence"
  source 1..159: mol_type = other DNA
atgcaggtgagcaccgccgccctggccgtgctgctgtgcaccatggcgttgtgtaaccaagtcctgagcgctcccctttcacgcccccgcgaagccggccggagtgtgttgaccccagtccgaagcggtagtaggaacactagcgtgacttggagctag

SEQ ID NO: 9355 - DNA, 1272 bp, synthetic construct
  misc_feature 1..1272: note = source = /note="Description of Artificial Sequence: Synthetic coding sequence"
  source 1..1272: mol_type = other DNA
atggagctggagctgatgcccttcaacgtgctgctgcggaccaccttagatcttctgcaggagaaggatcccgcccatatttttgcagaacccgtgaatttgagtgaagtgccagactacctggaattcatctctaagccaatggactttagtaccatgaggaggaaactagagtcacacctctacagaacacttgaggagttcgaagaggactttaatctgatcgtcacaaattgcatgaagtacaacgccaaagacactatatttcatagagccgccgtgagacttagggacctagggggagctatactgcggcacgccagacgacaggccgagaacataggctatgatccagaaagggggacacatcttccggagtctcctaaactggaagacttctataggtttagttgggaggatgtggacaatattctgatccccgagaaccgcgcacacctcagcccggaagtacagctcaaagaattgctagagaagctggacctggtgagtgccatgcggtcctcaggtgccaggactcgcagagtgagactactgaggcgggaaatcaatgccttgcgccagaaactagcacagcccccgccgccccagcccccaagcctgaacaagaccgtcagtaacggcgaactgcccgctgggcctcagggggacgcggctgtgctggaacaggctttacaggaagaacccgaagatgatggagacagagacgacagtaagctgcccccacctccgacattagaaccaacagggcccgcaccttctctctcggaacaagagagtccccctgaaccccctactctgaaacctatcaatgattccaagcccccatccagattcttaaagccacggaaagtcgaggaagatgaactcctcgaaaagtctcccctccagctggggaacgaacccctccagcggctgttgtcagacaacggtatcaataggctgtcactgatggcccctgacacccccgcaggcactcccctgtccggagttggacgccgaacgtctgttctgttcaaaaaggctaagaatggcgtgaagttacagcgcagccccgaccgtgttctggagaatggagaagaccatggcgttgctggcagccctgctagcccggcctccatcgaggaggagagacattcacggaagagacccaggagccgaagctgtagcgagtccgagggcgagcggtcaccacagcaggaagaagagacaggcatgacaaacggctttggaaagcatcgcaagagggtctag

SEQ ID NO: 9356 - DNA, 3030 bp, synthetic construct
  misc_feature 1..3030: note = source = /note="Description of Artificial Sequence: Synthetic coding sequence"
  source 1..3030: mol_type = other DNA
atgggcagcggccgggtgcccggcctgtgcctgctggtgctgctggtgcatgcacgagcggcacagtactcaaaagctgcccaagacgtagacgaatgcgtggagggcactgataattgtcacatcgacgcgatatgccagaatacacctaggagctacaaatgcatttgtaagtcaggatatacgggtgatggcaaacactgtaaggacgtggatgaatgcgaacgggaagataacgccggttgcgtgcatgattgtgtgaacatacccgggaattacagatgcacctgctatgacggcttccacctagctcatgatggccataactgcctggacgtggatgaatgcgccgagggcaatggcgggtgtcaacaatcatgtgtgaacatgatgggaagctatgaatgccattgcagagaagggttttttctttccgacaaccaacacacttgcattcaaagacctgaagagggcatgaattgtatgaataagaaccatggatgcgctcatatctgcagagagacccctaaagggggcattgcttgcgaatgccggcctggcttcgagctgactaagaaccagcgagattgcaaattgacctgcaattacgggaacggcgggtgtcagcacacctgcgacgacactgagcagggaccgcggtgcggctgccatataaagttcgtgctgcacacagatggaaagacttgcatcggcgagcggcggctagagcagcacataccaacacaggccgtgtctaacgaaacttgtgccgtgaacaacggtggatgtgactccaagtgtcacgacgcagcgaccggcgttcattgtacttgccccgttggttttatgctccagccagacaggaagacatgtaaggacatcgatgagtgtcgattgaacaacggtggctgcgaccacatttgcaggaacacggtgggctcatttgagtgctcgtgcaagaaaggctataaactgctaattaacgaacgtaactgccaagatatcgatgaatgttctttcgaccggacctgcgatcatatttgcgtgaacacacctgggtcttttcagtgtctgtgccaccgaggatatctgctttacggaattacacactgtggcgacgtagacgaatgcagcatcaaccgggggggctgcagattcggctgcatcaatacaccaggaagttaccagtgcacctgcccagctggacagggcaggctgcactggaacggaaaggactgcacagagccactgaagtgccaaggctctcccggtgcctccaaagcaatgctctcgtgtaataggtcggggaaaaaggatacatgcgccctgacatgccccagtagagcccgatttctgcctgaatccgaaaacggctttacagtcagctgcggcaccccctcgcctagagctgctcctgcccgagcgggtcacaacggaaactctacaaatagtaatcactgccacgaggcagccgtattatctataaagcagagagctagcttcaaaatcaaggacgcaaagtgcagattgcatttgcgcaacaagggcaagactgaagaggccggccgcatcacaggaccaggaggcgctccttgctccgagtgccaggttacctttatacatctgaagtgtgactcgtcgcgcaaagggaaaggtcgccgcgcccggacaccgccgggcaaagaagtgacacgcttgacacttgagctggaagccgaagtgcgggccgaagagacaactgcatcatgtggcctcccttgcctgcgccagaggatggaaaggaggctgaaaggttccctgaaaatgctgagaaagagtataaatcaggaccgattcctcctgcggctggccggcctggactatgagctggcacacaagccaggattggtcgctggggaacgggccgagcccatggaatcctgcaggccgggccagcatcgtgctggtacaaagtgtgtaagctgtccccagggcacctattaccacggacagaccgagcagtgcgtgccctgtccggccgggacattccaagagcgagagggccagttgagctgcgacctatgtcctggtagcgatgctcacggccccctgggagccacaaatgtgactacctgtgctggacaatgtccccccggacagcacagtgttgatggatttaagccctgccagccatgcccgcggggaacttaccaacctgaggccggcagaactttatgctttccgtgtggaggcggcctgaccacaaagcacgaaggtgcgatttcttttcaggattgcgacaccaaagttcagtgctcgccaggccattactacaatacttctattcacaggtgcattcgctgcgccatggggtcgtatcagcccgattttcgccaaaatttttgtagccgatgtccagggaatacatccactgatttcgacggaagcacgagtgtggctcagtgcaagaaccgtcagtgtggaggtgaactcggtgagtttacaggatacattgaatcaccaaactaccctggaaattatccagcaggggtggaatgcatctggaatattaaccctccccccaagcggaaaatcctcattgtggtgccagaaatctttctcccgagcgaggatgagtgcggggacgtgctggtcatgaggaaaaactcttcaccatcaagcatcactacctacgaaacctgccagacttacgagcggccgatagctttcacagcgagatctcgaaagttgtggattaattttaaaactagtgaggcaaacagcgccaggggcttccagattccatacgtgacttacgacgaggattatgagcagctggttgaggatattgttcgggatggccgattgtacgcatcagagaatcatcaagagatactcaaagataagaagctcatcaaggctttttttgaggtattagcacacccccagaattattttaaatacaccgaaaaacacaaggaaatgctccccaagtctttcattaaattattgcggtctaaggtgagtagtttccttcgcccctacaagtag

SEQ ID NO: 9357 - DNA, 984 bp, synthetic construct
  misc_feature 1..984: note = source = /note="Description of Artificial Sequence: Synthetic coding sequence"
  source 1..984: mol_type = other DNA
atgaccgccctggagctggcccggcggggcgcccgggtggtgctggcttgccggtctcaagagcggggggaagcggctgccttcgaccttcgacaggaatctggtaataatgaggtgatctttatggcgctggacttagcttccctggcctccgtgcgtgctttcgccactgctttcctgagttccgagcctagactcgacattctcatccataacgccggtatcagcagttgtggtcgcacaagggaagcattcaatctgctcctcagggtgaaccacatcggaccctttcttctaactcacctcttgctcccgtgtctaaaagcttgcgcgccaagtcgtgtcgtcgtagtggcttccgctgctcactgtcgcggcagactagactttaagcggttggatcgccccgttgtcgggtggagacaagaactgagagcgtatgccgacacaaagctggctaacgtgctctttgccagagagttggctaaccaattggaagcaaccggcgtcacctgttacgccgcccaccctgggcctgtaaattctgaactgtttctccgacatgtgccggggtggctcagaccattattacggcccctagcctggttggtacttcgagcaccgcgaggaggagcccaaactccactgtactgcgccctgcaggaaggaatcgagcctctgagtggaaggtactttgccaactgccacgttgaggaggtgcctcccgctgcacgcgacgaccgggcagcgcaccggctgtgggaagctagcaaaagactagccggtctgggaccaggagaggacgccgaaccagacgaggacccacagtccgaggactccgaggccccttcgtctctcagtacgccccatcccgaggagcccacggtatcccagccttacccgtcccctcagtcctcacctgatctttctaagatgacacacagaatacaggccaaagtggagcccgaaatccaattatcctag

SEQ ID NO: 9358 - DNA, 1320 bp, synthetic construct
  misc_feature 1..1320: note = source = /note="Description of Artificial Sequence: Synthetic coding sequence"
  source 1..1320: mol_type = other DNA
atgcccgccatcgccgtgctggccgccgccgccgccgcctggtgctttttgcaggtggagtctcggcacctggacgccctggccggcggcgcaggcccaaatcatggcaatttcttggataacgaccagtggctgtccacagttagccagtatgaccgagacaaatattggaatcgtttccgggacgatgattatttccggaattggaatcctaacaagccctttgaccaggctttagacccctccaaagacccttgcttaaaagtgaaatgttccccacataaagtatgcgtcacccaggactatcagacagctctatgtgtttccaggaaacacctccttccaaggcagaagaaaggcaatgttgcccaaaagcattgggtgggcccctccaatcttgtaaaatgtaaaccgtgccccgtggcgcagagtgccatggtctgtgggtcagacggccacagttacactagtaaatgcaagctggaattccatgcgtgttcgaccggtaagtccctagccaccctgtgcgacggcccgtgtccatgtttgccagagcctgaacccccaaaacacaaagccgagcggagcgcgtgcacagacaaagagctgagaaacttggcaagtcggctcaaagactggttcggagctcttcacgaagacgcaaacagggtgatcaagccaactagttccaacacagcacagggtcgcttcgatacttctatcctgccaatctgcaaggatagcctggggtggatgtttaacaagctggatatgaactacgacttactgttggaccctagcgaaataaacgccatctaccttgacaagtatgaaccctgtattaagcctctctttaactcctgcgactcctttaaagatggaaaactgagcaacaacgagtggtgctattgttttcagaagccaggaggactgccctgccagaacgagatgaataggatccagaagcttagcaagggcaagtcgttactgggagcatttataccccgatgcaacgaagaaggctattacaaggcaacacagtgccatggttccaccggacagtgctggtgcgttgataagtatggtaacgaattggccgggtccagaaaacaaggagctgtctcgtgcgaagaggagcaagagacaagcggcgactttgggtcaggaggatctgtggtgctgctagacgatctcgaatacgaaagagagcttggtcccaaagataaagagggcaagctccgggtgcatacgcgcgccgttacagaggatgatgaagacgaagatgacgacaaggaggacgaagtgggctacatatggtag

SEQ ID NO: 9359 - DNA, 3687 bp, synthetic construct
  misc_feature 1..3687: note = source = /note="Description of Artificial Sequence: Synthetic coding sequence"
  source 1..3687: mol_type = other DNA
atgaagggcgcccggctgttcgtgctgctgagcagcctgtggagcgggggcatcgggctgaacaattcaaagcattcgtggactatcccggaggatggtaattcccagaaaactatgccaagcgcatccgttccgccaaataaaattcagagtcttcaaattctgccgaccacaagggtgatgagtgctgagatcgccacaactccagaagcccgaacgtccgaagatagtctgttgaagtcaaccctccctcctagcgagaccagcgccccagctgagggggtgcgcaaccaaaccttaacttctacagagaaggcagaaggcgtggtgaagctgcagaacctgacgctacccaccaatgcctcaattaaattcaacccaggagcagaaagcgtggtcttaagcaattccactctcaagttcttacagagcttcgcaagaaaatccaatgagcaagcgacaagcttaaacacggttgggggaacaggaggaatagggggggtcggcggaaccgggggagtgggaaatcgagctcctagagagacctaccttagccgaggcgactcaagttcctcacagagaacggattaccagaagtctaatttcgaaaccacacggggaaagaattggtgcgcatacgtccataccagactgtcacctaccgtgatccttgataaccaggtcacatatgtgccaggcggaaagggtccttgtggatggaccggcgggtcctgtccccagcgctcccagaagatttcaaacccagtctatcggatgcaacacaaaattgttactagcctcgactggagatgctgcccaggctacagcgggcctaaatgccagctcagagctcaggaacagcagtccctgatccataccaaccaggccgagagccataccgccgtgggtaggggggtggctgagcagcagcagcaacagggatgcggagaccctgaagttatgcagaagatgactgatcaggtgaattaccaggcaatgaaattgaccttgcttcagaagaaaatcgataacatctccctgactgtcaatgatgtgcgaaatacttattccagtttggagggcaaagtgagcgaggataaaagccgcgagtttcaaagcctgttgaaaggccttaagagcaagagtattaacgttctcatccgggatatcgtgcgggagcaatttaagatcttccaaaacgacatgcaagagactgtcgctcaactgttcaaaaccgtatcttcactctcagaggacctggaatctacaaggcagattatccagaaggtcaacgagagcgtcgtgtccatcgccgctcaacaaaaatttgtcctggttcaggaaaatcggcccacgctgacagacattgttgaattgagaaaccacattgttaatgtgcggcaagagatgacattaacctgtgaaaaacccatcaaagagctggaagtgaagcagacccatctggaaggtgcactcgagcaggaacactccaggagcattctctattacgaatcactgaacaaaactctgtcaaagctcaaagaagtgcacgaacagttactgtccacagagcaggtttcagatcagaaaaatgccccagccgcagaaagtgtgtctaataatgtgaccgaatacatgtcaactttgcatgagaacattaaaaaacaatccctgatgatgctgcagatgttcgaagatttgcacatacaggaatctaaaataaataacctgacagtgagcctggaaatggagaaggaatcactccggggtgaatgtgaagatatgttatccaagtgtagaaatgactttaagttccagctgaaagataccgaggagaatcttcatgttctgaaccagactctcgccgaagtgctgttccctatggataacaaaatggacaaaatgtccgagcagttgaacgatctcacctacgacatggagatactacagcctctgcttgagcagggcgcatctcttcggcagaccatgacatacgaacagcctaaggaagccatcgtcatacggaagaagattgaaaatttgacctcagccgtgaattcactaaacttcattatcaaggaactaacaaaaaggcacaacctcttgcggaacgaggtgcagggcagggatgatgctctggaacgaaggattaacgagtacgcccttgaaatggaagatggactcaacaaaactatgactatcatcaataacgccatcgattttattcaggataattacgctttgaaggaaacgcttagtacaatcaaggataattctgaaatacaccataagtgcacatcggacatggagaccatcctgacctttatcccccaatttcacagacttaatgacagcatccaaaccctggtgaatgataatcagcgttataacttcgtgctgcaggttgccaagacattggccgggattccgcgagacgagaaactgaatcagtctaactttcagaaaatgtaccagatgttcaatgaaaccacgtcccaggtccgcaagtaccaacagaacatgtctcatttggaggagaagctgctgctgaccaccaagatttctaagaattttgaaaccagactgcaggacattgagtctaaggtgacacaaacactgatcccatattacatctctgtgaagaagggatccgtagtgacaaatgaacgtgaccaggcccttcagctccaggtgctgaattctaggtttaaagctctggaggccaaatccatccacttatccatcaattttttttcgctcaacaaaactctgcacgaggttctaacaatgtgccacaacgcgagcaccagcgttagcgagctaaacgccactataccaaagtggattaaacactccttgcccgacatccagttgctgcagaagggcctgactgagttcgtcgagccgattatccagattaagactcaagccgccctgtctaacctaacgtgctgcatcgaccgcagcctgcctgggtccctcgccaatgtggtcaaatcccagaaacaggtcaagtcgctgccaaagaaaatcaacgcactgaaaaagccgactgttaacttgactacagtgcttatagggcggactcagcgtaataccgataacattatttaccccgaggagtatagcagttgcagtaggcatccctgccaaaacggagggacttgcataaatggacgtacaagctttacttgcgcctgtcggcacccatttacgggtgataactgtactataaagttggtcgaggagaacgccctggcgcccgacttttcaaagggctcttatcgctacgcacctatggtggcattcttcgcttctcacacatacggcatgacgataccgggacccattctgttcaataacctggatgtcaattacggtgcgagttatacacctaggaccgggaaattcaggatcccttatctcggagtgtatgtgtttaaatatacaattgagtcattttccgcgcatatatctggattcttggtggttgatggcatcgacaagctcgcatttgaatcggagaacatcaactctgagattcattgcgatagagtgcttactggcgacgccctgcttgagttaaattatgggcaggaggtctggctgaggctggcaaaaggtaccatcccagctaaattcccccctgtcaccaccttttctggctatctgctttatagaacttag

SEQ ID NO: 9360 - DNA, 1596 bp, synthetic construct
  misc_feature 1..1596: note = source = /note="Description of Artificial Sequence: Synthetic coding sequence"
  source 1..1596: mol_type = other DNA
atgaagggcgcccggctgttcgtgctgctgagcagcctgtggagcgggggtattggcctgaataactctaagcactcatggactatccctgaggatggtaacagtcagaaaacaatgccctctgcttccgtccctcccaataagattcagtctctgcagatactgcccaccacgagagtgatgagtgccgaaatagcaaccacacctgagaaggcagagggtgtcgtcaagctgcagaatttgactctgcctaccaatgctagcatcaaattcaatccaggcgcagagtccgttgtgctctctaactccaccctgaagttcttgcaatcgttcgccagaaaaagcaatgaacaggccacaagcctgaacacagtcgggggcactggtggtatcgggggggtaggcggcactggaggtgtgggcaaccgcgcccctagagagacctacctcagtcgaggagacagctctagcagtcagaggacagattaccagaagtctaattttgaaaccacacggggaaaaaactggtgtgcttatgtgcacaccagactgtcacccactgtgattctggataaccaggtgacttatgtaccaggaggcaaggggccgtgtgggtggaccggcggcagttgtcctcagaggagccagaaaatcagtaatcctgtataccgcatgcaacataagatagttacctctctggactggaggtgctgtccgggctacagtgggccaaagtgccagcttcgtgcacaggaacaacaaagcctaatccacaccaatcaggctgaatcccacacagcggtcggcaggggggtcgctgaacagcaacagcagcagggttgtggggatcccgaggtaatgcagaagatgaccgaccaagtaaattatcaagccatgaagttgactctgttacaaaagaagatagacaacatcagcttaaccgtaaacgacgtaaggaacacctacagttcgcttgaaggaaaagtttctgaggataagtctcgcgagtttcagtccctcctaaaggaggagtacagcagttgtagtagacatccttgtcagaacggcggcacatgcatcaacggcaggacctcttttacttgcgcatgcagacaccctttcaccggagacaactgcaccataaagctagtggaggagaatgcccttgctccagacttcagcaagggttcctaccgatacgctccgatggtggcattctttgcttctcacacatacgggatgaccatacctgggcctattctgtttaataatctcgacgtgaattatggtgctagctatacaccgcgtacagggaagttccgaatcccttatctgggtgtctacgtctttaaatatacaatagagagcttcagcgcccacatctcagggttcctcgtggtcgacggtatcgacaaactggcattcgaaagcgagaatataaactccgaaatccactgcgaccgcgtgttgaccggagacgccctcctggaactgaattacggtcaagaggtctggctcagactggctaagggaacaatcccagctaaatttccacccgtcactacattttccggatacttgctctaccggacgtag

SEQ ID NO: 9361 - DNA, 942 bp, synthetic construct
  misc_feature 1..942: note = source = /note="Description of Artificial Sequence: Synthetic coding sequence"
  source 1..942: mol_type = other DNA
atgagcgacctgctgctgctgggcctgatcggcggcctgaccctgctgttgcttttgactcttctggcgtttgccggatactcagggctgttagcaggtgtggaggtctctgcaggctcacccccgatcaggaacgtaaccgtggcctacaaattccacatgggtctttacggcgagacgggaaggctattcaccgagagctgttcaatcagtccaaagctcagatccatagctgtgtattacgataacccccacatggtaccaccagataaatgtaggtgcgcggtcggatctatcctcagcgagggtgaggaaagtcccagccctgagctgatcgatttgtaccaaaaattcgggtttaaggtgttcagttttcctgcccctagccacgtcgttactgccacttttccctacaccacaattttatccatctggctcgcaacacgtcgagtacatccggcgcttgacacatacattaaggagaggaaactatgcgcctatccacgactggaaatttaccaggaggatcagattcattttatgtgtcccctcgctcgccagggcgacttttacgtcccggaaatgaaggagaccgagtggaaatggcgtgggcttgtggaagcaattgatactcaggtagatgggaccggcgccgacactatgtccgatacaagctcggtgagcctggaagtgtcacccggcagccgtgagacctccgccgccactttgagcccgggcgccagttctagaggctgggacgatggcgacaccaggtccgaacattcgtatagtgaaagcggagccagtggaagctccttcgaggaactggatttagagggcgagggccctctaggcgagtctaggctggacccaggcaccgagcccctgggtactaccaagtggctctgggagcccacggccccagagaaaggaaaagagtag

SEQ ID NO: 9362 - DNA, 834 bp, synthetic construct
  misc_feature 1..834: note = source = /note="Description of Artificial Sequence: Synthetic coding sequence"
  source 1..834: mol_type = other DNA
atgtgcaccgtggtggacccccggatcgtgcggcggtacctgctgcgtcgacaactcggtcaaggggcctacggcatagtctggaaagccgtagaccgtcgtaccggcgaggtcgtcgcaattaaaaagatctttgatgcatttcgggacaaaaccgacgcccaaaggacctttagggagataactcttctgcaggaatttggagatcacccaaacatcattagcctgctcgatgtcattcgcgctgagaacgaccgcgatatttatctggttttcgaatttatgggctgcccaccctctccgcctccacctaccgcagtaagaactctttcagccgacacagatctgaatgccgtgataagaaagggaggcctgctgcaggatgtacatgtccgtagcatattctatcagttactgcgggccacgcggtttctgcacagcgggcatgttgtgcacagagaccagaagccatccaatgtgctgctggatgccaactgcacagttaaattgtgcgacttcggtctggcacggtcactgggagatctacccgaaggaccagaagatcaagcagtgaccgagtatgtggcaactaggtggtacagagctcctgaggtcctgcttagctctcacagatatactctgggcgttgacatgtggagcctcgggtgcattttgggggagatgctccggggaaggccactgttcccggggacttccactctgcaccagctcgagttgattttagaaacaattccacccccctcggaagaggaccttctggctcttggatcagggtgccgggccagcgtgctgcaccaattaggctcccggtag

SEQ ID NO: 9363 - DNA, 765 bp, synthetic construct
  misc_feature 1..765: note = source = /note="Description of Artificial Sequence: Synthetic coding sequence"
  source 1..765: mol_type = other DNA
atgtgcaccgtggtggacccccggatcgtgcggcggtacctgctgaggcgccagttgggtcaaggcgcctatgggatagtgtggaaggcagttgaccgcaggaccggagaggtcgttgcaatcaagaagatcttcgatgctttccgggataaaaccgacgcgcaacgcacatttagggaaataacactgcttcaagagtttggggatcaccccaatatcatctccctgctcgatgtgatccgggccgaaaatgatcgcgatatctatctcgtgtttgagttcatggataccgatcttaatgctgtcatcagaaaaggaggcctgttacaggatgttcatgtgagatccattttttaccagctgctacgggcaacgcgctttctgcactcaggccacgtggtgcacagagatcaaaagccttctaatgtactgctggacgctaactgcaccgttaaactttgcgattttggcctcgccaggagcctgggagacctgccagagggacctgaagaccaggcagtgacagagtatgttgcaacgcgctggtacagagcccccgaggtacttcttagcagtcatcgctacactctgggtgtagacatgtggagccttggatgcattctcggggagatgctgagggggaggcccctctttcctggaacgtctactctgcaccagctggaattgattctggaaacgattccccctccttctgaggagggggcccagaccgcttgcaggtccggaacgggtgccagtacttag

SEQ ID NO: 9364 - DNA, 474 bp, synthetic construct
  misc_feature 1..474: note = source = /note="Description of Artificial Sequence: Synthetic coding sequence"
  source 1..474: mol_type = other DNA
atggccctgctgctgtgcctggtgtgcctgaccgccgccctggcccacggctgtctgcattgccatagcaatttctctaagaagttctctttctaccggcaccacgtcaacttcaagtcttggtgggtgggggacattcccgtgtcaggagctctactgaccgactggtccgatgacacgatgaaagaattacaccttgcgatacctgccaaaattactcgcgaaaaactggatcaggttgccacagctgtttaccagatgatggatcagctctaccaagggaagatgtatttccctggatacttcccaaacgaacttaggaatattttcagggagcaagtgcatctcatacagaatgctatcatcgaacgacatctggcacctggaagctggggcggcggccagttaagccgagagggacccagcctggctcccgagggctcaatgccctctcctagaggcgatctcccatag

SEQ ID NO: 9365 - DNA, 699 bp, synthetic construct
  misc_feature 1..699: note = source = /note="Description of Artificial Sequence: Synthetic coding sequence"
  source 1..699: mol_type = other DNA
atggccctgctgctgtgcctggtgtgcctgaccgccgccctggcccatgggtgcctgcactgccactccaactttagcaagaagtttagcttttataggcaccatgtcaacttcaagagttggtgggtgggcgacatcccggtttctggcgcgctgctgacagattggagcgacgatacaatgaaggagctgcacttagccattcctgcaaagatcacgcgggagaagctcgaccaggtcgcgactgccgtctatcagatgatggatcaactttaccaagggaagatgtacttcccagggtactttcctaacgagcttaggaatatttttcgcgaacaagtccacctcatccagaatgctatcattgagtcaaggattgactgccagcataggtgcgggattttccagtatgaaacaatcagttgcaataattgtaccgactcccatgtggcctgtttcggatataactgtgaatcctccgcccagtggaagtccgccgtccaaggcttgttgaattacataaataactggcacaagcaagacacttccatgcgcccgagatccagcgccttctcatggccaggtacccaccgggctacaccagcgtttctcgtcagtccagcactgagatgcctggaacctccccacttggccaatctaaccttggaggacgccgccgaatgtcttaagcagcactag

SEQ ID NO: 9366 - DNA, 396 bp, synthetic construct
  misc_feature 1..396: note = source = /note="Description of Artificial Sequence: Synthetic coding sequence"
  source 1..396: mol_type = other DNA
atgggcggcgacggccggtacgtgctgaacggccactgggtggtgtccccccctggcacgtacgaggctgcaggcactcatgtggtatacacccgagatactggtcctcaagaaacactgcaggccgcgggacccaccagtcacgacctgctgttgcaggtcttgctgcaagagcctaacccaggcattgagtttgagttttggctgccacgcgaacggtactccccttttcaggcccgggttcaggctttaggctggcctctcaggcagcctcagcccagaggagtggaaccccaacctccagccgcacccgctgtgacccctgctcagacccccaccttggctcccgggcccagcgccggaccccccccacccggccccggcgatcccttgtag

SEQ ID NO: 9367 - DNA, 447 bp, synthetic construct
  misc_feature 1..447: note = source = /note="Description of Artificial Sequence: Synthetic coding sequence"
  source 1..447: mol_type = other DNA
atggcccggatccccaccgccgccctgggctgcatcagcctgctgtgcttacagttacctggcagtcttagccgatcccttggaggggacccacgtcctgtgaagcctcgcgaaccccccgctcgcagtccttcctcatccctgcagccccgtcaccccgctcctcgcccagttgtgtggaaattacatcgagcactgcaggcccagcgcggagccggattagccccagtgatggggcagcctttaagagatgggggacggcagcactcagggcccagaagacactccgggcctaggcgtacccaggctcaattgttgcgggtgggatgcgttttgggaacgtgtcaggtacaaaacctgtcgcaccgtttgtggcagttgatgggccctgcgggaagacaagactcagcccctgtggatccatcctcgccgcacagttacggttag

SEQ ID NO: 9368 - DNA, 447 bp, synthetic construct
  misc_feature 1..447: note = source = /note="Description of Artificial Sequence: Synthetic coding sequence"
  source 1..447: mol_type = other DNA
atggcccggatccccaccgccgccctgggctgcatcagcctgctgtgtctgcagctgcccgggtcactgtcgcgtagcctcgggggggacccccgaccagtgaagcctagggaaccgccagccagatctccttcaagttccctacagccaagacatcctgctcccagaccggtcgtgtggaagctgcatcgcgcccttcaggcccagagaggggcgggccttgctccggtaatgggacaacccctgcgcgacggaggacggcagcactccggccccaggagacacagcgggccccgccggacccaggctcagctgctaagggtgggctgtgtgctcggcacgtgccaggtccagaacctctcacatcggctgtggcaactaatgggtcccgcaggaaggcaagactcagcccctgtggacccaagctcaccccattcttatggatag

SEQ ID NO: 9369 - DNA, 537 bp, synthetic construct
  misc_feature 1..537: note = source = /note="Description of Artificial Sequence: Synthetic coding sequence"
  source 1..537: mol_type = other DNA
atggaccgggccgcccggtgcagcggcgccagcagcctgcccctgctgttggccctagctctgggactggtgattctccactgtgtggtcgcagatggtaactccacccggtcaccggaaacgaacggacttctgtgtggagatccagaggaaaactgtgccgccactactactcaaagcaagagaaaaggacatttttctaggtgtccaaaacagtacaagcactattgtattaagggccgttgccgctttgtggtggcagaacagacccccagctgtgtatgcgacgaaggatatataggcgcaagatgtgagagggtagacctattttaccttcgtggcgatagaggccagattttagtgatctgtctgattgcagtcatggtggtttttatcatcctggtgatcggggtttgtacatgttgccatcctctgcgaaagcgtcgcaaacgaaagaaaaaagaggaggaaatggagacactcggaaaggacataacccccatcaacgaggacattgaagaaacaaacatcgcatag

SEQ ID NO: 9370 - DNA, 1251 bp, synthetic construct
  misc_feature 1..1251: note = source = /note="Description of Artificial Sequence: Synthetic coding sequence"
  source 1..1251: mol_type = other DNA
atgagcatcagcctgagcagcctgatcctgctgcccatctggatcaatatggcgcagattcagcagggcggtcccgacgagaaggagaagaccacggcccttaaagatttgctttccagaatcgacctggacgagttaatgaaaaaggacgaacctcctctggacttcccagatacactagagggatttgagtacgcttttaacgagaagggccagctccgccatataaaaactggcgagcctttcgtgttcaactaccgcgaggatctgcaccggtggaatcagaaaaggtacgaggcactcggcgaaatcattactaaatacgtgtacgagctccttgaaaaagactgcaacctgaaaaaggtgtcaatccctgttgatgccactgaatctgagccgaagagctttattttcatgtctgaggatgcccttaccaacccccagaagctcatggtgctcattcacgggagcggggttgttcgcgctggccagtgggctcgcaggctcattattaacgaagacctcgatagcgggacccagatcccattcattaagcgggccgtcgcagaaggatatggtgtgattgtcctgaatcccaacgagaactatatcgaggtagaaaaacccaagatccacgtccagtcttctagcgattccagcgacgaaccagccgaaaaacgcgaacggaaagataaagtgtctaaggagactaaaaagagacgggatttctatgaaaaataccgcaacccccagcgggagaaggaaatgatgcaactttatatcagggaaaacggcagccctgaagagcacgccatctacgtttgggatcattttatcgcacaggcagccgccgaaaatgttttttttgttgcccatagctatggtgggcttgcttttgtcgaactcatgattcagagagaggcagacgtcaagaacaaggttaccgcagtagccctaactgactctgtgcacaatgtgtggcaccaggaagccgggaaaacaattagagagtggatgagagagaattgctgcaactgggtgagctcatcagagccccttgatacttcagttgaatcaatgctgcccgactgccctagggtgtccgccggtacagataggcacgagctcacatcatggaaatcctttcctagcatcttcaagttctttaccgaagcttccgaagcaaagacatccagcctgaaaccagctgtcacaagacgcagtcataggatcaagcacgaggaattatag

SEQ ID NO: 9371 - DNA, 840 bp, synthetic construct
  misc_feature 1..840: note = source = /note="Description of Artificial Sequence: Synthetic coding sequence"
  source 1..840: mol_type = other DNA
atgaagatcatcatcctgctgggcttcctgggcgccaccctgagcgcaccgctgatccctcaacgcctgatgtccgccagcaattctaatgaactccttttgaacttaaacaacggccagctgttgcccctgcaattgcagggccctctgaacagctggatccccccattctccgggatcctgcagcagcaacaacaggcccagatacccggcctgtcccagttctccctcagtgccctcgatcagttcgccggcttactgcctaaccagatacccctgacgggcgaggctagcttcgcccaaggagcgcaagccgggcaagtagatcccttgcagctccagacacccccccagacacagccaggcccttctcatgtgatgccctacgtgtttagcttcaagatgccccaggaacagggccagatgtttcagtattaccctgtgtacatggtgctcccgtgggaacagccccagcagacagtgccaaggagcccccaacagacccggcagcaacagtacgaagagcagatcccattctacgcacagttcggatatatcccacagttagcagagccagccatctctggcggccagcagcagttggccttcgacccacagcttggcaccgcacccgaaatcgccgtgatgagtacaggtgaagaaatcccttatctacagaaagaagccatcaattttagacatgactccgctggcgtgtttatgccaagtacaagcccgaagccgtcaacgacaaacgtgtttacatcagcagtggaccagacaataactccagaactccccgaagagaaggataagaccgatagtcttcgcgagccatag

SEQ ID NO: 9372 - DNA, 444 bp, synthetic construct
  misc_feature 1..444: note = source = /note="Description of Artificial Sequence: Synthetic coding sequence"
  source 1..444: mol_type = other DNA
atgggccccgaggccctgagcagcctgctgctgctgctgctggtggcctctggcgatgccgacatgaagggccacttcgaccccgccaaatgcaggtatgccctgggcatgcaggatagaacaatccctgactccgacatttccgcttcgtcatcctggagcgattctactgctgcgaggcatagccggctggagagctccgatggggatggcgcttggtgccccgccgggtctgtgtttccaaaagaggaagagtacctccaggtggatctgcaaagacttcaccttgttgcgcttgtaggaacgcaggggcgacatgcgggggggctagggaaggagttctctcgctcctaccgtctacggtatagtcgcgatggcagaaggtggatgggatggaaagataggtggggccaagaagtaatcagtggaaacgaggatccatag

SEQ ID NO: 9373 - DNA, 618 bp, synthetic construct
  misc_feature 1..618: note = source = /note="Description of Artificial Sequence: Synthetic coding sequence"
  source 1..618: mol_type = other DNA
atgggcggccccgtgcgggagcccgccctgagcgtggccctgtggctgtcctggggtgcggcattaggtgcggtggcctgcgccatggctcttttgacacaacaaacagagttgcagtctttgaggagagaggtaagtcggttacagggcactggaggaccttcacagaacggggaaggatatccatggcagtcccttcctgaacagcactctgtgctgcacttggtccccattaacgcgacctccaaagatgactccgacgtgaccgaagtgatgtggcagccagctcttaggagggggagaggcctgcaggcccagggatacggtgtgcgtatacaagatgctggggtatatttgctctatagtcaggtcttgttccaggatgtgacatttactatggggcaggtggtgtccagggaagggcaggggcgccaggagacactctttcgatgcattagatcaatgccaagccatccagaccgagcatacaacagctgttactccgccggagtctttcacctgcaccagggggatatcctgagcgtgatcattccgcgggcacgtgccaaacttaatctctccccacatggcacattcctgggatttgtaaagttatag

SEQ ID NO: 9374 - DNA, 744 bp, synthetic construct
  misc_feature 1..744: note = source = /note="Description of Artificial Sequence: Synthetic coding sequence"
  source 1..744: mol_type = other DNA
atgcccgccagcagccccttcctgctggcccccaagggcccccccggcaatatgggtggccctgtccgggaaccagctttgagtgtggccctctggctgtcttggggcgccgcccttggagcggttgcatgtgccatggctctgctgacgcagcagactgaactgcagtccctaagaagagaggtttcaaggttgcaaggcaccggtggccccagtcagaacggtgagggctatccatggcagtcgttaccagaacagtcgagtgatgcccttgaagcatgggagaacggggagcggagcagaaaacgccgagccgtcctgactcagaagcagaaaaaacagcacagtgtcctgcacctggtgcctatcaacgccacatcaaaggacgactctgatgttaccgaagtaatgtggcagcctgccttgagaagaggtcggggcctgcaggcacaaggctacggcgttagaatccaggatgccggtgtgtatctcctgtacagtcaggtcctttttcaggatgtcaccttcacgatgggccaagtcgtctcaagagaaggtcaggggaggcaggagactctgttccgctgcatccgaagcatgcctagccacccagatcgggcctacaattcgtgctacagcgccggcgttttccatctacaccagggcgacatcctatccgtgataatacccagggcaagagctaagctgaatctgtcccctcacggcacttttctcgggctgtag

SEQ ID NO: 9375 - DNA, 39 bp, synthetic construct
  misc_feature 1..39: note = source = /note="Description of Artificial Sequence: Synthetic coding sequence"
  source 1..39: mol_type = other DNA
atgggcaagagcgagagcctgcagagcctgcagcggtag

SEQ ID NO: 9376 - DNA, 4266 bp, synthetic construct
  misc_feature 1..4266: note = source = /note="Description of Artificial Sequence: Synthetic coding sequence"
  source 1..4266: mol_type = other DNA
atgatgctgccccagaacagctggcacatcgacttcggccggtgctgttgtcatcagaatttgttcagtgccgtggtcacttgtatattgctgcttaacagctgctttctcatctctagctttaatgggaccgacctcgagctgaggctggtgaatggcgacgggccttgttcagggacggtggaagtcaaatttcagggccagtggggaaccgtgtgcgacgacgggtggaacacaacagcttctactgtcgtctgcaagcaactgggatgtcccttcagcttcgctatgtttcgctttgggcaagccgtaacccgtcacgggaaaatctggctcgacgatgtgtcttgttacggaaatgaaagtgctttgtgggaatgtcagcacagggagtggggtagtcacaattgctatcatggtgaggacgtaggtgtgaactgctacggcgaggccaatctcggtctgcggcttgtggacggcaataattcgtgctccggccgagtggaagtgaaattccaggaacggtggggaactatctgcgacgacggctggaacctaaataccgccgccgtggtgtgtaggcagctgggctgtccctcgagctttatcagcagcggggttgtgaattcaccagccgtgctgaggcctatatggctcgacgacattctgtgccaaggcaatgagctggcactgtggaattgccgccatcgcgggtggggcaaccacgactgtagccacaacgaagatgtaactctgacttgctacgactcgagcgatttggagttgaggctggtggggggcaccaataggtgtatgggccgtgtggaactgaagatccagggtagatgggggaccgtctgtcaccacaaatggaacaatgcagctgccgacgtagtgtgtaagcagctgggatgtggaaccgcactgcacttcgcagggctgccgcacctgcagtctggttctgatgtggtttggctggacggagtgagctgcagcggcaatgaaagctttctgtgggattgcagacactcaggcactgtgaatttcgattgtctgcatcagaacgacgtgagcgtgatttgttcagacggggcggacctggagctaaggttggccgatggaagcaacaactgcagtgggcgtgtcgaggttcgtatccatgagcagtggtggactatttgtgaccagaactggaagaatgaacaggctctggtcgtgtgcaagcagctggggtgcccattttcagttttcgggtctcgccgcgctaagccaagtaacgaggccagagatatttggattaattcaatctcctgcacaggtaacgaatcagccctgtgggattgtacttacgatggcaaggcaaagagaacgtgttttcgacggtcagatgccggagtaatttgttcagacaaggccgacctagatttacggttggtcggagcccattcgccatgctacgggaggctggaggtgaagtaccagggtgagtggggaactgtctgtcacgatcgctggtccactagaaatgcggctgtggtgtgtaagcagcttggctgcggaaaacccctgcatgttttcggcatgacctacttcaaagaggcttctgggccaatatggctggacgacgtcagttgcatcgggaacgagagtaatatatgggattgtgagcacagcggatggggaaaacacaactgtgtgcaccgcgaagacgtaatcgttacctgcagcggagatgctacctggggtctgcggctggtgggggggagtaaccggtgtagtggtaggcttgaagtgtacttccaaggacgatggggtaccgtttgcgatgacggctggaacagtaaggccgctgcagtcgtctgtagtcagctcgattgcccgtccagtatcatcggaatggggctcgggaacgcaagtacagggtatggaaagatatggttagacgatgtctcttgtgacggcgacgagtccgatctgtggtcctgccgaaacagcggctggggcaataatgattgctcacactcagaagacgtgggcgtgatttgttcggacgcttccgatatggaacttcgcctggtgggtggctcttctaggtgcgcagggaaggtggaagtcaacgttcagggcgctgtggggattttgtgtgcaaacggatggggaatgaatattgccgaggtcgtatgtaggcagctggagtgtggttcggcaattcgcgtttctcgcgaaccccactttacagaaaggaccctccatatactaatgtccaacagcggctgcacggggggagaagccagtttgtgggattgtattcggtgggaatggaagcagacagcctgccatctcaacatggaggcatctttgatctgtagcgctcatagacagccccgactggtgggggccgatatgccgtgtagcgggagggtggaagtgaagcacgccgacacctggcgttcggtgtgtgatagcgacttttccttgcacgccgcaaatgtgttgtgccgggagcttaactgtggcgatgcaatttccctgagcgtgggtgaccacttcggaaaggggaacggactgacctgggcagagaagttccagtgcgaggggtctgagacacatctggccctctgtccaatcgtgcagcatcccgaagacacgtgtatccacagccgggaggtgggagttgtttgtagccggtacactgatgtccggctcgtaaatggaaaatctcagtgcgatggccaggtggagatcaacgttctcggccactgggggagcctgtgcgacacacactgggatccggaggacgcccgggtcctatgtagacaattatcttgtgggacagcgctgagtactacaggcggcaagtatataggagagagatccgttcgggtgtgggggcacaggttccattgtctcgggaacgagagcttgcttgacaattgtcagatgaccgtgctcggggcacctccctgcatccatggaaacactgtcagcgtgatatgtacaggttctctgacccagcccctgttcccatgcctggctaacgtgtctgacccgtacctttctgcagtgcccgaaggctcagccctcatatgcttggaagataaaaggctgagactggtcgacggagactcgcgatgtgccgggcgtgtggagatctaccacgatgggttctggggcaccatttgtgatgacggatgggatctgtccgatgcccacgtggtgtgtcaaaaattgggatgtggcgttgcgttcaatgccactgtgtccgctcattttggcgagggttctggcccaatatggctggacgacctgaactgtacgggtatggagagccacctgtggcagtgccccagccgaggttggggtcaacacgattgcaggcacaaagaggacgccggagttatctgttccgaatttacagccctgaggttatacagtgagactgagacagagagctgcgctgggcgcttagaggttttctataatgggacatggggctccgtgggaaggagaaatattaccactgccattgctgggatcgtgtgccggcagctggggtgtggcgagaacggtgtggtgtccctcgctcctctgtcaaaaaccggctcagggttcatgtgggtggacgatatacagtgccccaaaactcatattagtatctggcagtgcctgtccgccccgtgggagcggcgtatctcttccccggccgaggaaacttggatcacgtgtgaggatagaatcagggtccgcgggggagacacagaatgtagtgggagagttgaaatttggcatgctggatcatgggggactgtttgcgatgacagctgggacctcgctgaagcggaagtggtgtgccagcagctgggatgcgggagcgccctggccgccctgcgggatgcctccttcggacaaggaaccgggaccatttggttagacgatatgaggtgcaaagggaacgagagcttcctgtgggactgccatgcgaaaccttggggccaaagcgattgtggtcacaaggaggatgctggcgtacggtgttctggccagtcactgaaatccctgaacgcaagtagcggccaccttgccctgattctctcttcaatttttggcttactactgctggtgctcttcatactgttcctcacctggtgtcgggtgcagaagcagaagcacctgcccctgagggacgatacaccaaaccacggttgcgaggatgcaagcgatacgtccttgttgggcgtcctcccggctagcgaggctaccaaatag

SEQ ID NO: 9377 - DNA, 1410 bp, synthetic construct
  misc_feature 1..1410: note = source = /note="Description of Artificial Sequence: Synthetic coding sequence"
  source 1..1410: mol_type = other DNA
atgatcaccgagggcgcccaggccccccggctgctgctgccccccctcctgttgctattaaccctgcccgccaccggctcagatcctgtgctttgtttcacacaatacgaagagtcctctggaaagtgtaagggactgctgggaggaggagtgagtgtggaagactgttgtctgaatacagcattcgcctaccagaagcggagtggaggattgtgtcagccatgccgttctccccggtggtccttgtggtctacctgggctccctgctcagttacgtgttccgagggcagccagcttagatatcgtcggtgcgtggggtggaatggtcaatgtagtggcaaggtggcgcccggaaccctcgagtggcaactgcaggcctgcgaagaccagcaatgttgtccagaaatgggaggttggagcggttggggtccttgggaaccctgttcggtgacctgctccaaaggcacacgcacacgccggagagcttgtaaccaccctgcccccaagtgcgggggacactgcccgggccaggcgcaggaatctgaggcctgtgacacccaacaggtctgccctacccacggtgcttgggccacatgggggccctggaccccatgttctgctagttgccacgggggcccacatgagccaaaggagacccgaagtcgaaaatgttccgcccctgaaccctctcagaaaccccctggaaagccatgtcccgggctcgcttatgagcagagaagatgtactggcctccctccatgtccggttgcaggaggctggggaccatggggaccagtcagtccctgtcccgtaacatgtggcttaggccaaactatggagcagaggacttgcaaccaccctgtacctcagcacgggggccccttctgcgccggcgatgccactcggacacatatttgtaatactgctgtcccgtgcccagtggacggggaatgggatagttggggggagtggagcccgtgcatacgacggaacatgaagagtatttcctgccaggaaattccaggccagcagtccaggggccggacatgcagaggacggaagttcgatggccatagatgtgcggggcaacaacaggacattaggcactgctattcgattcagcattgtccactgaagggcagctggagcgaatggagcacctggggactttgtatgccaccgtgcggtcccaatcctaccagggcaaggcagaggctgtgtactcctttgctgcccaaatatccgcccaccgtgagcatggtggagggacaaggagaaaagaatgtgacattctgggggagacctcttcctcggtgcgaggaactccagggccagaagttagttgtcgaggagaagcggccttgtctgcacgtgccggcctgcaaggatcccgaggaggaagagctatag

SEQ ID NO: 9378 - DNA, 837 bp, synthetic construct
  misc_feature 1..837: note = source = /note="Description of Artificial Sequence: Synthetic coding sequence"
  source 1..837: mol_type = other DNA
atgcagtggctgcgggtgcgggagagccccggcgaggccaccggccaccgcgtaaccatgggaacagccgctctggggccggtgtgggcagccttgttgctcttcctgttaatgtgtgagatcccaatggtggagctgacattcgatcgtgcagtcgcctcgggttgtcaaaggtgttgcgactccgaagacccactagatccagcacacgtgagtagcgcaagctctagtgggagaccacatgccctccctgagattcgcccatacattaacattactatactgaaaggggacaagggtgacccaggtccaatggggcttccggggtacatgggcagagaggggccccaaggtgagcccggaccacaaggttccaaaggtgacaaaggagagatggggtcaccgggcgcaccctgccagaagcggttcttcgcattctctgtgggcaggaaaacagcgctccactctggcgaggacttccagacattgctatttgagcgagtgttcgtcaatctggatggatgttttgatatggcaactggccaattcgcagccccattgaggggcatatacttcttttccttgaatgttcactcctggaattataaagaaacatacgtgcacattatgcacaaccagaaggaagcagttattctgtacgcccagcccagcgaacgctctatcatgcagagccagtcagtgatgctagatctggcttacggggatcgggtgtgggtgcggctgtttaaacgacagcgcgaaaatgctatctattccaacgattttgatacctacatcacattcagcgggcacctcatcaaagccgaagatgattag

SEQ ID NO: 9379 - DNA, 1128 bp, synthetic construct
  misc_feature 1..1128: note = source = /note="Description of Artificial Sequence: Synthetic coding sequence"
  source 1..1128: mol_type = other DNA
atggagttcgagatcaccttccggcccgacagcggcgacggcgtgctgctttatagctacgacaccggttctaaggacttcctcagcattaatctggcaggcgggcacgtggaatttaggtttgattgcggctcagggaccggagttctgcgatctgaggatcctttgacacttggcaattggcatgagctgagggtctcgcggacagccaaaaatgggattctacaggtggacaaacagaagattgtcgagggcatggcagaaggtggctttacccagatcaaatgtaataccgatatcttcattgggggcgtgcccaactacgatgacgtcaaaaagaactctggcgtgctgaagccattcagtggctccattcaaaaaattattttgaatgacagaactattcacgtgaagcacgattttacaagcggggtcaatgtggagaacgctgcccatccctgtgttagggccccttgcgcccacggcggctcctgtcggccgcggaaggaaggatacgattgtgactgtcctctggggtttgaaggattgcattgccagaaagccattatcgaggctatcgagattccacaatttattgggcgctcctatctgacttacgacaatcctgatattctgaagagggtctcaggatcgagatcaaatgtctttatgagatttaagaccactgccaaagatggcctcttactgtggcggggcgactcccctatgaggccaaattctgattttatcagcctgggcctgagggacggcgcactggtgttcagttacaatcttggcagcggcgtggctagtatcatggtgaatggctctttcaatgatggccgctggcatagggtcaaggcagtgagggacgggcagtcaggaaaaatcacagtggatgactacggggcccgtaccggaaagagtcccgggatgatgcgtcaactgaatatcaacggagccctctacgtaggtgggatgaaagaaatcgcactgcatacgaatcggcagtatatgaggggtctggtagggtgtatatctcattttacgttatccacagactaccacataagcctggtggaggatgccgtggacggcaaaaatattaacacatgcggcgccaaatag

SEQ ID NO: 9380 - DNA, 459 bp, synthetic construct
  misc_feature 1..459: note = source = /note="Description of Artificial Sequence: Synthetic coding sequence"
  source 1..459: mol_type = other DNA
atgcggttcaagaccaccgccaaggacggcctgctgctgtggcggggtgactccccaatgcggccgaactccgattttatctccttgggcctcagggatggcgccctggtgttcagctacaacctgggtagtggagtggcatcaataatggtgaacggcagttttaacgacgggcggtggcaccgtgtaaaagctgtaagggacgggcagtcaggcaagatcacagtggacgattacggggctagaacgggcaaatcacccggaatgatgcgtcagcttaatataaacggcgccctgtacgtggggggcatgaaggagatagccctgcatactaaccggcaatatatgcgcggcctggtaggatgcataagtcatttcactctgtctaccgattaccatatttctctggtcgaggacgctgttgacggtaaaaatatcaatacatgcggagcgaagtag

SEQ ID NO: 9381 - DNA, 1050 bp, synthetic construct
  misc_feature 1..1050: note = source = /note="Description of Artificial Sequence: Synthetic coding sequence"
  source 1..1050: mol_type = other DNA
atgaccgccctgcccggccccctgtggctgctgggcctggccctgtgtgcactgggggggggaggccctggcctgcggccaccccccggctgccctcaaaggcggctgggagctcgggaaaggcgcgacgtccagcgggaaattctggccgttctcggcttgccaggcagacctaggccacgggctcccccagcggcgtcccggttgcctgcgagtgcgccattgttcatgctagatctgtaccatgccatggcaggggacgacgatgaggacggcgcacccgctgagaggagactcggcagagcagatctcgtgatgtcattcgtgaacatggtagaaagggaccgggccttgggccatcaggaaccccactggaaagaatttaggttcgacctgacacagatacctgccggagaagccgtgacagccgccgagttcagaatatataaagtgccttcaatacacttactgaaccgcaccttacacgtcagtatgttccaggtggtccaggagcagagtaatcgcgagtcagacctgtttttccttgaccttcagacattgcgggccggcgatgaaggctggctggtcttagatgtgacagccgccagcgactgttggcttctgaagagacataaagatctggggctgcgtctctacgtagagaccgaggatggtgagacatggactggctggggttggacaaaggattcaagacttcagatgtggaaattaagactgtctcggaccccgtgggtgctctctctgcacgcccctgggccagcacaggcaccagctgagcgcccgcttctgtgcctcttgcagggacattgtccagccagcccatctcccatcaggaccccgcgtgctgtcaggcctctccggcgacgtcagccgaaaaaaagtaatgagctgccccaagccaatagactacccggaatcttcgatgacgtccatggtagtcatggacgccaggtgtgcaggaggcacgagctttacgttagcttccaagatctgggttggctggtcatcgctgacagcagttgcttctag

SEQ ID NO: 9382 - DNA, 1617 bp, synthetic construct
  misc_feature 1..1617: note = source = /note="Description of Artificial Sequence: Synthetic coding sequence"
  source 1..1617: mol_type = other DNA
atgagcttcagcgccaccatcctgttcagcccccccagcggcagcgaggcgcgctgctgttgctgtgcttgcaaatcagagactaatggcggcaatacaggtagccaggggggcaatcccccaccatccacccccatcacggtaacaggccatggacttgcggtgcaatcatcagagcagctccttcacgtgatctaccagcgggtcgacaaggcggtcggcctggcagaggcagccctgggcctggctagggccaataatgagttactcaaacgccttcaggaggaagtcggagatctgcggcagggaaaagtttccattcctgacgaagacggggagagccgggctcattctagtccaccagaggagcccgggcccctgaaagaaagtccaggcgaggccttcaaggccctgagcgcagtggaagaggagtgcgactccgtggggagtggggtgcaggttgtgatcgaggaactgagacagctgggcgccgcctctgtcggccctggaccactcggtttccctgcaacgcagagggatatgcggctgcccggctgcacactcgcagctagtgaggccgctccactgctgaatccattggtggatgactatgtcgcctctgaaggagctgtgcagcgggttctggtgcccgcatatgctaaacagctttccccagccacacagctggccatccagcgagctaccccagagaccggtcctgaaaacgggaccaagctccccccccccaggcctgaagatatgctgaacgccgctgcggccttggatagcgccttagaggaatccgggcctggcagcaccggagaattgaggcattcactaggtctcaccgtgtccccttgtcggaccagaggatctggacaaaagaacagtcggaggaaaagagacctggtcctgagcaagctggtccacaatgtccataaccatatcaccaatgataagaggtttaacgggagcgaatcaattaagagttcttggaacatcagcgtggtcaagttcctactggaaaaactaaagcaggagcttgtgaccagccctcataattacactgataaagagttgaaaggagcatgtgttgcctacttcttaactaagagacgggagtatcgcaactccttgaaccctttcaaggggctgaaggagaaggaagagaaaaagctgagaagtcggcgctaccgactgttcgccaatagaagctctattatgaggcatttcggtcccgaggatcagcgcttatggaacgacgtaactgaggaactgatgtccgacgaagaggacagtctgaatgaacccggcgtgtgggtggcacgacccccacggttccgcgcacagagattaactgagctgtgctatcatcttgacgcgaactccaagcatggcacaaaggcaaacagagtgtatggaccgccctccgaccggctcccctccgccgaagctcaattactgccacctgaattgtacaaccctaactttcaggaagaggaggacgagggaggagacgagaacgcgcctggttcaccttcgtttgaccagccacataaaacttgttgccccgatctcaatagcttcatagaaatcaaagtcgaaaaggacgaatag

SEQ ID NO: 9383 - DNA, 630 bp, synthetic construct
  misc_feature 1..630: note = source = /note="Description of Artificial Sequence: Synthetic coding sequence"
  source 1..630: mol_type = other DNA
atgagcttcagcgccaccatcctgttcagcccccccagcggcagcgaggccaggtgctgttgctgcgcatgcaaatctgagacgaacggtggaaacacgggctcccaaggtggcaatccgccaccaagcacccccatcacagtcaccggtcatggcctagcagtccagtccagcgagcagttattgcacgtgatttatcagagggtagacaaagcggtgggactcgccgaagctgcactgggactcgcacgcgccaacaatgaactcctcaagaggctccaggaggaggtcggggatctgaggcaaggtaaggtgtctatacccgacgaagacggggagtctagggcacactcctccccgcctgaggaaccaggcccattaaaggaatccccgggcgaggcattcaaggccctgagtgccgttgaagaggaatgcgactccgtgggatctggggttcaagtagttatagaggaactgcggcagctcggggcggcgtccgtgggacccggccccctgggattccccgctacacagcgggacatgcgactcccagggtgcaccctggcagcaagcgaggccgccccgctcctgaaccccctcgtggatgactatgttgcttccgaagggtag

SEQ ID NO: 9384 - DNA, 1617 bp, synthetic construct
  misc_feature 1..1617: note = source = /note="Description of Artificial Sequence: Synthetic coding sequence"
  source 1..1617: mol_type = other DNA
atgagcttcagcgccaccatcctgttcagcccccccagcggcagcgaggctaggtgttgctgctgcgcgtgcaaatcggagacaaacggcggcaatactggcagccaggggggcaacccacctcccagcacgcccattacagttacaggacatggactggccgtacagagctcagaacagttgctgcatgtgatttaccaacgcgttgataaggccgttggcctcgctgaggcggccttgggcttagccagggctaataacgaactcctgaaacggctgcaggaggaagtaggagacctgcgacaggggaaggttagtattcctgatgaagatggtgagagtcgcgctcattcgtcacctccagaagaacctggacctctgaaagaatctcctggagaagcatttaaagccctctcggctgtcgaagaggagtgtgattcagtgggaagtggggttcaagtggtgattgaagagcttcgccagcttggcgccgcctctgttggccccggacccttaggttttcccgcaacccagcgggacatgcgcctacctggatgcactttggcagccagcgaggccgcgccccttctgaatcctctcgttgacgactacgtggcatctgaaggagctgtccagagagtgcttgtgcccgcatacgccaagcagctcagcccagcgacgcagctggccatccaaagagccacccccgagacaggcccagagaatggaacaaagctgcctccgccccgacccgaggatatgctgaatgctgccgctgccctggactctgccttggaagaaagcggcccgggcagcaccggcgagctgaggcattctctggggctgacagtgtccccatgccgcactaggggatccggccaaaagaattcccggcgcaagcgggatctcgttctatcaaagctcgtccacaacgtgcacaatcacataaccaacgacaaaaggtttaatggctccgagtctattaagagctcctggaatatcagcgtcgttaagttccttttagagaagctgaagcaggagcttgtaacgtcaccccacaattacaccgacaaggagttgaagggagcatgcgtggcgtacttcctgacaaagaggagggaataccggaactcactgaatccatttaaaggcctgaaggagaaggaagaaaagaagctgcgttccagacggtatcggctttttgccaataggagctccatcatgagacattttggaccggaggaccaacgcctgtggaatgatgtaactgaagaactcatgtccgacgaggaagatagccttaacgagccaggcgtatgggtggctcgcccacctcgcttcagggcccagagattaactgaattgtgctaccacctcgatgctaattctaaacatggcacaaaggccaacagggtgtatggtcccccaagtgaccgcctccccagcgccgaagcccagttacttccccctgagctttataacccaaattttcaggaggaagaggatgagggaggcgacgagaatgcccctggttcaccctcatttgatcagccacataagacatgttgtcctgatcttaacagtttcatcgaaattaaggtggagaaagatgagtag

SEQ ID NO: 9385 - DNA, 1524 bp, synthetic construct
  misc_feature 1..1524: note = source = /note="Description of Artificial Sequence: Synthetic coding sequence"
  source 1..1524: mol_type = other DNA
atgtgcaccaagaccatccccgtgctgtggggctgcttcctgctgtggaacttatatgtctcttcttcacagacaatatatccaggcattaaggccagaattacacagcgagctctggattatggggtgcaagctggcatgaagatgatagaacaaatgctgaaggagaaaaagctgcccgacctgagtggatccgagagcctagagtttctcaaggtagattacgtgaactacaacttttctaatatcaaaatctctgcgttttcctttccaaacaccagtctcgctttcgtccccggagtaggaattaaggccctaaccaaccacggcacagcaaatatcagtacagattggggttttgaatcccctttgtttcaggacactggtggcgctgatctgttcctcagcggcgtttatttcaccggcatcatcatcttaacacgaaacgacttcggacatcctacactcaaactgcaggactgctacgctcaacttagtcacgctcacgtttccttttccggcgagctgagtgtgttatacaactcattcgccgagcccatggagaagcctatcctgaagaatctcaacgaaatgctttgtcccattatagcttcggaggtgaaggccttgaatgcaaacctgtccacattggaggtactgacgaaaatcgacaactatacactgctggactatagcctgatttccagccccgaaattacggagaactacctcgatctcaacctaaaaggcgtgttctacccactcgagaacctgacagaccccccctttagtccagtcccctttgtgctgcctgaacgatccaacagcatgctgtacataggcatagccgagtattttttcaaatctgcctcttttgcacacttcaccgccggagtgttcaatgtcacactttcaacagaggagattagtaaccacttcgtgcagaatagccaggggctgggaaatgtgctctcacggatcgccgagatctatattttgtctcagccatttatggtgaggatcatggccacagagccaccaatcattaacctccagccgggaaacttcactctggacatcccagctagtattatgatgttgacacagcctaagaactccacggtagaaaccatagttagcatggatttcgttgcaagcacttccgtgggcctggttattctgggacagcgactggtttgcagtctctctctgaatagatttcgcctggctttgcccgagtcaaatagatctaatattgaggtgctgagatttgagaatatcctgtccagtatcttacacttcggagtcctgccactagccaacgccaagctgcagcaggggtttcccttatctaaccctcataagtttctgttcgtgaactccgacatcgaggtgctggagggatttctgttaatctccaccgatctgaaatacgaaacaagtagcaaacagcaaccttccttccatgtctgggagggcttaaatctgatttctcgacagtggcgtggcaagagtgctccgtag

SEQ ID NO: 9386 - DNA, 753 bp, synthetic construct
  misc_feature 1..753: note = source = /note="Description of Artificial Sequence: Synthetic coding sequence"
  source 1..753: mol_type = other DNA
atggccagcgagcggctgcccaaccggcccgcctgcctgctggtggctagtggggccgccgagggagtttctgcacagtccttcctgcactgttttacgatggctagcacagctttcaatctgcaggtagctacgccgggaggtaaggccatggaattcgttgacgtaactgagagcaatgcgagatgggtgcaggacttccgcctgaaggcctatgcctctccggcaaagctggaatcaattgacggcgcacgttatcatgcccttctcatccccagttgcccaggcgccctaaccgatctcgctagcagcggctccctggcccgcatactgcagcatttccattccgaatccaaacctatatgtgcagtcgggcacggtgttgccgccctgtgttgcgctactaatgaggaccgatcatgggtcttcgattcatattccctaacaggaccaagcgtgtgcgaattggtgcgtgcccctggattcgctaggctccctctcgtagtggaagacttcgtcaaggactcaggcgcgtgctttagcggggctgcggcatcatgcccaaaggccgaccggcactggcagcatttcccagtcgaggaaatttttctggcatgcgggtttaaagttgccgggttgggtgctgctcccgggtgggggagagggggcaaacaggaggaccgaccaccagaagaacagcgccgggctggagaggatttccctatctatcagtgcgtcttcatttatccctag

SEQ ID NO: 9387 - DNA, 1386 bp, synthetic construct
  misc_feature 1..1386: note = source = /note="Description of Artificial Sequence: Synthetic coding sequence"
  source 1..1386: mol_type = other DNA
atgagcctggacatccagagcctggacatccagtgcgaggagctgagcgacgcccggtgggccgaacttttgcctttgcttcagcaatgccaggtagtcagactcgacgactgcggtttgacggaggcaagatgtaaggacatctcgtctgcattgagagtgaacccggcattggcagagttgaatcttagatcgaatgagttgggagatgttggcgtccactgcgtgctgcagggactacagactccatcctgtaagattcaaaaattatcattacaaaattgctgcctgaccggggccgggtgtggagtcctgtccagtaccctgcggacactgccaaccctccaggagcttcatctttctgataatcttttgggcgacgccggtctgcagctgctgtgcgaagggctcctcgacccacagtgccgcttggaaaagctccagctggaatactgttctttgtccgctgcaagttgtgagccactggcttctgttcttagagctaaaccagacttcaaggaactgactgtttctaataatgacattaacgaggccggagtccgcgtgctttgccagggcctgaaggatagtccttgccaattggaggcgctgaagctggagtcctgtggggtcaccagtgataactgcagggatctttgtggaatagtggcatcgaaggcttctctgcgggagcttgccctggggtcaaataagctcggtgatgtgggtatggcagaactttgccctggacttctgcacccatcttccagactgagaactctgtggatctgggaatgtggtattacggctaaaggttgtggcgacctttgccgcgtccttagggccaaagagtcgctgaaggagcttagtttggccggcaatgaactgggagatgaaggcgctagactgctttgcgaaacgctactggaacctggctgtcagctggagtcattgtgggtcaagtcatgttcctttacagccgcatgctgtagtcatttctcctcagtgttggcacagaatcgttttctgctggaactgcagatctccaacaaccggctcgaagacgcgggagtccgggagttgtgtcagggcctggggcagcccggcagtgttctgcgcgttttgtggctagctgactgtgacgtatcagatagctcatgctcctcactagccgcaacgcttctcgccaatcacagcctcagggaactggatctcagtaataactgtttgggggacgctggtattcttcagcttgtcgagagcgtaagacagccagggtgtctgttagaacaactcgtgttatatgatatctactggagtgaggagatggaggatcgactacaggccctggaaaaagacaaaccctccttgagagttatttcctag

SEQ ID NO: 9388 - DNA, 1386 bp, synthetic construct
  misc_feature 1..1386: note = source = /note="Description of Artificial Sequence: Synthetic coding sequence"
  source 1..1386: mol_type = other DNA
atgagcctggacatccagagcctggacatccagtgcgaggagctgagcgacgccagatgggccgagctgttgcccttgctgcagcaatgccaggtcgtccgactggacgattgcggcttaaccgaagcacggtgtaaggatataagttccgccctacgggtgaaccccgccctcgctgagctgaatctgcgttctaacgagctcggggacgtgggagtgcattgcgttcttcagggccttcagacaccaagctgcaaaatccagaagctttccttacaaaactgctgcttaactggtgcaggctgtggagtgctgagtagtacattacgtactcttcccacactccaggaactgcacctgagcgataatttgctgggagacgccggcctgcagttgctgtgtgagggcctgctcgatccacagtgccgcttagagaagttgcagttagaatattgctctttgtctgctgcatcatgcgagcctctcgctagtgtcctgagggctaagccagacttcaaggaactgaccgttagcaataacgatatcaatgaggcaggagtgagggtcctttgtcagggacttaaggactctccttgccagctagaagcccttaagctggaatcatgcggcgtgacaagtgacaactgtcgcgatctatgcgggattgtggcctccaaagcctcactaagggagctggccctgggctctaataagttgggagacgttggcatggcggagctttgtcctgggctgctgcaccctagttcccggcttcgaacactctggatctgggaatgcggcattactgccaaaggatgcggagatttgtgtcgagttctgcgtgcaaaagagagcctgaaggagctgtcattagccgggaacgaactgggcgatgagggagcaagattgctctgtgagacccttctggaacccggttgccagttagaaagcctctgggttaaaagctgctcttttactgcagcatgctgctctcactttagcagtgtgctagcccagaaccgctttctcctggagctgcagatctcgaataacaggctcgaggacgccggcgtccgcgaattgtgtcaaggtcttggacagcctggctctgtgttgcgggtactgtggcttgctgactgcgatgtgtccgactcatcgtgttcctctctggccgccaccctcttggcgaaccactcactgagagaactcgatctgtctaacaattgtctgggtgatgcaggaattctgcagctggtcgaatctgtaagacagcccggctgtctcctggaacagctggtactgtacgatatctactggtctgaggaaatggaggaccgtctgcaggccttggaaaaggataaaccctccctgcgtgtgatctcgtag

SEQ ID NO: 9389 - DNA, 1386 bp, synthetic construct
  misc_feature 1..1386: note = source = /note="Description of Artificial Sequence: Synthetic coding sequence"
  source 1..1386: mol_type = other DNA
atgagcctggacatccagagcctggacatccagtgcgaggagctgagcgatgctaggtgggcggagctgttgcccttactgcaacagtgccaggtggtgaggctggatgattgtggcttaacagaagcacggtgcaaggacatctcatcagcactacgagtcaatccagctttggcagaactcaatctgcggagcaatgagttgggggacgtgggggttcactgtgtgctgcaagggctccagacacctagttgtaagatccagaagctgagtctgcagaactgctgcctgaccggggccggttgcggcgtgctgagctccaccctgcggactctgcctactcttcaggagctccatctgagtgacaatctgctaggggatgctgggttgcaactgctgtgcgaaggccttctcgatcctcagtgccgcctggaaaagctacagctggagtactgtagcctgagtgctgcgtcttgcgagcctctggcctctgtgctccgcgccaaaccagactttaaggaactgacagtgtccaataatgacatcaacgaggccggagtaagagtgttgtgtcagggtcttaaggactctccatgccagttggaggcgttgaaactggagtcctgcggcgtcacgagcgataactgccgggacttgtgcggtatagtcgccagcaaggcgtccctgcgggagttggcattaggctcgaataaattgggtgatgttgggatggccgagctgtgtccaggtctgcttcacccctcatcaagattaaggaccctttggatttgggaatgtggcatcacggcgaaaggatgcggcgacctctgtagagtcctacgggcaaaggagagcctcaaggaattgtccctggctgggaacgagctgggggacgagggcgctaggctgctctgtgagactctcttggagccgggctgccagctggagagtttatgggtgaagagttgctcctttactgccgcctgctgtagccatttctcttctgttttagcccagaacaggtttctgttggaattacaaatttctaataatcgattggaggacgcaggagtccgagagttatgccaaggcctgggtcagcctgggtctgtgctcagggtattgtggttagcggattgtgacgtgtcggattcatcttgttcctctctggcagccaccctgctcgctaaccactcactgagagagttagacttaagtaacaactgcttgggtgatgccggcatcctgcagctcgttgaaagcgtgaggcaaccggggtgcctcctggagcagctggtcctatatgatatctactggtccgaagaaatggaagacagactacaggcacttgaaaaggataagccgtcactgagggtgatttcatag

SEQ ID NO: 9390 - DNA, 1452 bp, synthetic construct
  misc_feature 1..1452: note = source = /note="Description of Artificial Sequence: Synthetic coding sequence"
  source 1..1452: mol_type = other DNA
atgatcaccgcccactgcagcctggacctgctgggcagcgtggccgttctatgcgtgtgcgatcttagccctgcgcagtgcgacataaactgctgctgcgatccggattgctcaagcgtggactttagtgtattctctgcgtgttctgtgccagttgtgaccggcgattcccagttctgttctcaaaaggcagtgatctactcacttaattttaccgccaacccaccgcagcgagtgttcgagttagtggatcagattaatccatctatattctgcatccatattacaaactacaaacccgcgttgtccttcatcaatccagaagttcccgacgagaacaatttcgatacccttatgaaaacttctgatggctttaccctgaatgctgagagctatgtctccttcactacgaagcttgatattcctactgctgccaagtatgagtacggcgtgccgcttcaaacgtctgattctttccttagattcccctcttctctgacctcctccttgtgtaccgacaataaccctgctgcattcttagtgaatcaggcagtgaagtgcacgcgtaagatcaatctcgaacagtgtgaagaaatagaagcattatcaatggctttttactcgagtcctgaaattctacgggtccccgattccaggaaaaaagttcccataactgtccagagcattgtaattcagagcctgaataaaaccctgacccgccgcgaggatactgatgtcttacagcctacactcgttaatgctggacacttcagtttgtgtgttaatgtggtgctggaagtgaagtactccctgacatacacggacgcaggagaagtcaccaaggcggacctcagtttcgtcctgggtactgtctctagtgtggtcgttcccctgcaacaaaagtttgaaatacacttcctccaagagaacacccagcccgtgccactgtctggaaaccctggctacgttgtcggattgcctcttgctgcaggcttccagccgcacaaaactggtgccttaccttgccagcttgtggctcagaaggtcaagtcgctcctctggggccagggttttccggactacgtggcacctttcggaaactcccaggcgcaagacatgctggattgggtgccaattcactttattacacagagcttcaaccgcaaacattttgtgctacaggactcgtgccaactccccggggcactggtcattgaagttaaatggacaaagtacggtagcctgcttaacccccaggcgaagattgttaacgtcacagcaaaccttatctcctcctcctttcccgaggcaaatagcggcaacgagcggaccattttaatatctactgctgttacattcgtggacgtgagtgcacctgctgaagctggcttcagagcccctccggcaatcaacgcacgacttccattcaatttcttcttccctttcgtgtag

SEQ ID NO: 9391 - DNA, 1596 bp, synthetic construct
  misc_feature 1..1596: note = source = /note="Description of Artificial Sequence: Synthetic coding sequence"
  source 1..1596: mol_type = other DNA
atgtgccagctgctggagagcaccgtgatccagccccagggcgactcccccgtagcagttctgtgcgtgtgcgacctatctccggcccagtgtgatatcaattgttgctgcgaccctgactgttcttctgtggatttcagcgtgttctctgcatgttcggtacccgtggtcaccggagattcccagttttgtagccagaaagccgtaatatatagcctcaattttacagccaatcccccacagcgagtgttcgaacttgtagatcaaatcaatccttcaatcttctgtattcacattacgaactacaagcccgcacttagcttcataaatcccgaagttcccgacgagaacaatttcgatactctgatgaaaacctcagatgggttcactctgaatgccgagtcttatgtttcttttactacaaagctcgatattccgacagcagctaaatatgaatacggggtgcccctccagactagcgattcgtttctgcggtttcctagcagcctgacaagctcgctctgtacggacaacaacccagccgcgtttctggtgaaccaggccgttaaatgtacacgcaagattaatctagagcagtgcgaagagattgaggctttgtctatggcattttatagctcccctgagatccttcgggtgcccgacagccgtaagaaagtccctataactgttcagtccatagtgatccaatcgttgaacaagacactgacaagacgcgaggacaccgacgtcctccaacccaccttggtgaacgctggccatttctctctctgcgtgaatgtggtgctggaggtgaaatactccttgacttacacagatgcgggcgaggtgacaaaagcagatctttcttttgtgctggggactgtgagttcagttgtcgtcccactgcagcagaagtttgaaatccatttcctgcaggagaatactcagcctgtcccactgagtggtaacccaggatacgtcgtgggactgcccctggctgccggatttcagcctcacaaaatgagtgggattatccagacaactaatcgctatggtcagcttacaattctgcattctacaactgaacaagattgcctcgctttagagggtgtgcgtacccctgtgctgtttggctacacgatgcagtctggctgcaaattaagactaactggggctctgccctgccaacttgtggcgcagaaagtgaagtctcttctatggggccaaggcttccccgattatgtggctccatttggcaacagtcaggcacaagatatgcttgattgggtgccgattcattttattacccagagctttaatagaaaggactcctgtcagctcccaggcgccctagtgatcgaagtgaagtggaccaagtatggatccctcctgaatccccaagcgaagatcgtgaatgtgaccgccaatctgatctcttcatccttcccggaagcgaactcaggaaacgaaagaactatcctcatctctaccgctgtaactttcgtcgatgtgtcagcccctgcggaggcgggtttccgtgcaccccctgccatcaacgcaagactgccgttcaactttttttttccattcgtgtag

SEQ ID NO: 9392 - DNA, 1722 bp, synthetic construct
  misc_feature 1..1722: note = source = /note="Description of Artificial Sequence: Synthetic coding sequence"
  source 1..1722: mol_type = other DNA
atgcggccccggggcctgccccccctgctggtggtgctgctgggctgttgggcttccgtgagcgctcaaacagacgccaccccggctgtgaccactgagggccttaatagtaccgaagccgcactagccaccttcggaacattcccatctacaaggcctccaggaactccgagggcccctggaccttcttctggcccaagacctacaccggtcacagatgtcgccgtgctgtgtgtgtgcgaccttagcccagcccaatgcgacataaattgttgctgtgaccctgactgcagttccgttgatttttccgttttttccgcctgtagtgtaccagtggtgaccggtgattcacagttttgctcccagaaggctgttatatattctctcaacttcaccgccaaccctcctcagcgggtgttcgaactcgtcgaccagataaatccatcaatcttttgcattcacatcaccaactacaagcccgcactgtccttcattaatccagaggtccccgacgagaacaattttgacacattgatgaaaacgtccgacggattcaccctgaatgcggagagctacgtgtcctttacaaccaagctcgacattcccaccgccgcaaagtacgagtatggcgtgcccctccagacttccgacagcttccttcgtttcccatcctctttaaccagctctctttgtaccgacaataatccagcgggccaggcctactggttcacgccggtgatcccagctctatgggaggcagaagcgcgtggctctctggaggtccccgattcccgtaagaaggtgccaataactgtacagtccattgtcatccagagtttgaacaagaccctgacccgcagagaagacacagacgttttgcaacccactctggtgaatgcgggccacttctcactgtgtgtgaacgttgtgctagaggtaaaatattccctgacctacaccgacgccggggaagtcactaaagctgacctctcattcgtcttagggacagtgagcagcgtcgtggtgcccctccagcagaagttcgagatccacttcttgcaggagaatacccagcctgtgcccttatccgggaatcctgggtatgtggtgggcctgcccctggcggcaggattccagccccacaagggatccggtattattcagaccacaaatagatacggccaattgactatcctccactcaaccacggaacaagattgtctggccttagaaggagtcagaactccagtccttttcggatacacgatgcagagcggctgcaaactgaggctcaccggagccctgccttgtcagctcgtggcgcagaaggtcaagtcacttttgtggggacaaggtttccctgactacgtggctcctttcggtaactcgcaggcccaggatatgctggattgggttccgatacatttcatcacacagtctttcaaccgaaaggactcctgccaattgcccggtgctttggtcattgaggtgaaatggaccaagtacggatcactgctgaacccgcaggctaagatcgtgaatgtaacggctaacttaatttcctcctctttccctgaagcgaattcaggcaacgagagaacgatccttatctccaccgctgtcacttttgtcgatgtgtcagccccagccgaggctgggttcagagccccaccggctattaatgcaagactgccatttaatttttttttccccttcgtgtag

SEQ ID NO: 9393 - DNA, 1230 bp, synthetic construct
  misc_feature 1..1230: note = source = /note="Description of Artificial Sequence: Synthetic coding sequence"
  source 1..1230: mol_type = other DNA
atgaagaccagcgacggcttcaccctgaacgccgagagctacgtgtccttcaccactaagttggacatccctacagccgcgaagtatgagtacggggtgcccctgcagacctccgattcattcttgagattcccgtcctctctgaccagttctctgtgcacggataacaacccggcggctttcctcgtgaaccaggctgtaaagtgcacacgcaagatcaaccttgagcagtgtgaggagatcgaagccctctccatggcgttttatagtagtcctgaaatactcagagttcccgattcaagaaaaaaggtccccattacggtgcagagcatcgtgattcaaagtctgaacaagacccttaccaggcgcgaagacactgacgttttgcagcccacgcttgttaacgccggccactttagtctgtgcgttaatgttgtccttgaggttaaatacagtctgacttataccgacgctggcgaggtgaccaaggccgatctctcgttcgtactgggtacagtgagctcagtggtcgtgcctctgcaacagaaatttgagatacactttcttcaagagaacactcaacccgttcctctctctggaaatccggggtacgtggtgggcctgcccttagccgccgggttccagcctcataaaggatctgggatcatccagactactaacagatacggccagctgaccatcctccactctacaactgaacaggattgtctggcccttgagggtgtacggacacccgttctcttcggttataccatgcagtctggctgtaagttgcggttgaccggagctcttccctgtcagctggttgctcagaaagtgaaatccttgctctggggtcagggatttcctgactatgtcgcacccttcggcaacagccaagcccaggatatgctggattgggtgcctatccatttcataacacagtcctttaatcggaaagactcttgccaactccctggagccctcgtgattgaggtcaagtggaccaagtatggctctcttctcaatccacaggctaagatcgttaacgtgacagccaatctgataagcagctcgtttcccgaggccaacagcggcaatgagagaactatactgatcagtaccgcagtcacatttgtcgacgtgtccgcccccgccgaggctggtttcagggcaccccctgcgattaacgcaagactgccctttaatttttttttcccctttgtatag

SEQ ID NO: 9394 - DNA, 1779 bp, synthetic construct
  misc_feature 1..1779: note = source = /note="Description of Artificial Sequence: Synthetic coding sequence"
  source 1..1779: mol_type = other DNA
atgcggccccggggcctgccccccctgctggtggtgctgctgggctgctgggcgtctgtgagtgctcagacagatgccactcccgccgtcacgactgaaggcctgaatagcacggaggcggcacttgccacattcggaacttttccctcgacccggccccccggaacccccagagctcctggcccctcatcgggcccacggcccacccctgtgacagatgtggccgtgctgtgcgtgtgcgacctgtctcccgcccagtgcgacattaattgctgctgcgatccagactgcagcagtgtcgacttctcagtgttctccgcttgctccgtcccagtggtcaccggagattcacagttttgcagccagaaagcagtgatatattctcttaatttcaccgcaaacccaccccaacgagtgttcgaattggttgaccagatcaatccatccatcttctgcatccacatcactaactataagccagcactctcgtttatcaatcccgaagtccccgatgaaaataacttcgatacattaatgaaaacatcagacgggttcaccttaaatgcagagtcctatgtgtcctttaccactaaacttgacatcccgacagcagccaagtatgagtacggcgtgcccctccagacctcagacagtttcctgcgctttccctcctctctgacaagttctctgtgtacagataataaccccgccgctttccttgtaaatcaggccgtgaagtgcacccgaaaaattaacctggagcaatgtgaggaaatcgaagccttgagtatggctttctactcttcacctgaaatcctcagagtgcctgacagcagaaaaaaggtccccataaccgttcagtctattgtgattcagtctctcaacaagacactaaccagaagagaggatacagacgtcttgcagccaacccttgtgaacgctggccatttcagcttgtgcgtcaatgtggtgctggaggtgaagtattctttgacctacaccgatgctggagaggtgacgaaagccgacttgagtttcgtactcgggactgtgtctagtgtggtggtgccattacagcagaaatttgaaatccatttcctgcaggaaaatacccagcctgtcccactctctggaaatcccggttacgtggtaggtctgcccctggctgctggcttccagcctcacaagggatctggaattatccaaaccacgaatagatacggtcagctgactatattgcatagcaccactgaacaggactgcctggccctcgaaggcgtgaggactcccgtactgtttggctataccatgcaatctggttgtaagcttaggctgaccggggccctcccctgccaactggtggcccagaaagtgaaaagcctcctgtggggtcagggatttccagactacgtggcccccttcggaaatagccaggcccaagacatgctagattgggtccctatacacttcatcacccagagttttaatcgcaaacactttgtgctgcaggattcctgtcagctaccaggtgcacttgttattgaggtgaagtggacgaagtacggcagtctgctgaatcctcaggccaagatagtgaacgttactgccaatctgattagtagctcttttcccgaggctaactccggtaacgaaaggaccatcctgatctccacagcggtgacgtttgtggacgtctctgcgccagccgaagcaggattccgcgctccgcctgccataaacgcccgcctcccatttaacttcttttttcccttcgtgtag

SEQ ID NO: 9395 - DNA, 552 bp, synthetic construct
  misc_feature 1..552: note = source = /note="Description of Artificial Sequence: Synthetic coding sequence"
  source 1..552: mol_type = other DNA
atgatcttcctgctgctgatgctgagcctggagctgcagctgcaccagattgctgccttgtttaccgttacagttcccaaggagttatacatcatcgagcatggaagcaatgttaccttagaatgcaattttgacaccggctcccatgtgaatctgggggccatcaccgcatcactgcagaaggtggaaaatgacacctccccccaccgtgaacgggccacactgttagaggagcagctgcccttaggaaaagcctcatttcacattccgcaggtgcaagttcgcgacgaaggccagtaccaatgcatcatcatttacggagtggcttgggactataaatatttgacactgaaggtgaaaggtcaaatggagccccgcacccatcctacatggctcttgcatattttcatccccttctgtatcatagcctttattttcatcgcaacagtcatcgcccttcgcaaacaattatgccagaaactgtattctagtaaagacacaacaaagaggcccgtcacgacgaccaagcgagaggtgaattccgcaatatag

SEQ ID NO: 9396 - DNA, 822 bp, synthetic construct
  misc_feature 1..822: note = source = /note="Description of Artificial Sequence: Synthetic coding sequence"
  source 1..822: mol_type = other DNA
atgatcttcctgctgctgatgctgagcctggagctgcagctgcaccagattgctgcattgttcaccgtaaccgtcccgaaagagttgtacatcatagagcacggttcaaatgtgacgctcgagtgcaatttcgataccggttctcatgtgaatctgggggccatcactgccagtcttcagaaggtcgaaaacgacacgagccctcatagagaacgggcaacactgcttgaagaacagttgccactgggaaaggcaagcttccacattccccaggtacaggttcgtgatgaggggcaataccagtgcatcataatatacggggtcgcttgggactataagtatctgacccttaaggttaaagcctcttaccgtaaaatcaacacacacatcttaaaagtgcctgagacagacgaagtagaactcacttgtcaggccacaggataccctctggctgaggtgagctggccaaatgtgtcagtcccagccaacacatctcattcacggactccagagggactgtatcaggtcacttccgtacttcgcctaaaacctccccccggccgaaacttcagctgtgtcttttggaatactcacgttagagagttgaccctcgcttctatagacctgcagagccagatggagccaaggactcaccctacctggctgctgcacatttttatacctttctgtatcatcgctttcatttttatagcaacagtgattgcactaagaaaacagttatgccagaaactctacagttctaaagatacaaccaaacgaccagtgactaccacaaaaagagaggtgaatagcgccatctag

SEQ ID NO: 9397 - DNA, 372 bp, synthetic construct
  misc_feature 1..372: note = source = /note="Description of Artificial Sequence: Synthetic coding sequence"
  source 1..372: mol_type = other DNA
ctgggcgaccggcggggccggagcagcggcgcccgggccgccgccgtgggctcaacaggagagagattggaaatggaagaagatattttgcagctccaggccgaagccaccgccgaggtgttgggggaagtggcccaggcacaaaaggtgctgcgggacagtgtgcagcggcttgaggtgcagctcagaagtgcttggctgggacctgcctatagggaatttgaggttcttaaggcccatgctgataagcagtcccacatcctctgggccctgacaggacacgtgcagagacaaaggcgcgagatggtagctcagcaacataggctgcgacagatccaagagagactccatactgcagctctgccagcttag

SEQ ID NO: 9398 - DNA, 345 bp, synthetic construct
  misc_feature 1..345: note = source = /note="Description of Artificial Sequence: Synthetic coding sequence"
  source 1..345: mol_type = other DNA
atggccagcttcaagctggccgacagcgtgtgggaggacagcctgtcaaagaggcagcgcaatcagggaagaatgaagaccctccctgtcctggtcctctcactgactctgctgaccgtgttctcggagaccagccctattctcactgagaagcaggctaaacaactgcttcgttcccgccgtcaggacaggccgagcaagcctggcttccccgacgagccaatgcgggaatacatgcaccacctgttggccctcgagcatagggctgaggaacagttcttggagcattggctgaacccacactgcaagccgcactgcgatcggaaccgaatccacccggtttag

SEQ ID NO: 9399 - DNA, 345 bp, synthetic construct
  misc_feature 1..345: note = source = /note="Description of Artificial Sequence: Synthetic coding sequence"
  source 1..345: mol_type = other DNA
atggccagcttcaagctggccgacagcgtgtgggaggacagcctgagcaagcgccagagaaatcagggcaggatgaaaactttacccgtcttagtgttgtccctcacactcctcacagtattttcagagacctctcccatcttgaccgagaagcaggcaaagcagctcctccgttcaagaagacaggatcgtccttccaagcctgggtttcctgacgaacctatgcgtgaatacatgcatcatctcctcgcacttgaacatcgtgccgaagaacagtttctggaacattggctcaacccccactgcaaaccacactgcgatcggaatcgcattcaccccgtttag

SEQ ID NO: 9400 - DNA, 444 bp, synthetic construct
  misc_feature 1..444: note = source = /note="Description of Artificial Sequence: Synthetic coding sequence"
  source 1..444: mol_type = other DNA
atggccctgcagcggacccacagcctgctgctgctgctgctgctgacactgcttggtctggggctggttcagccttcttacgggcaagacggcatgtaccaaaggtttttaaggcagcacgtgcatccggaagaaaccggaggttctgacagatactgtaatctaatgatgcagcggcggaaaatgaccctgtatcattgcaaacgttttaacacattcatccatgaggacatctggaatattcgatctatctgcagcaccacaaatattcaatgtaagaatggtaaaatgaattgccatgagggcgtggtgaaggtgactgactgcagagacaccggctcctctagggctcccaactgtcggtatagagcgatcgctagtactagacgagtggtcattgcctgcgaaggtaatcctcaagtgccagtccactttgatggttag

SEQ ID NO: 9401 - DNA, 1302 bp, synthetic construct
  misc_feature 1..1302: note = source = /note="Description of Artificial Sequence: Synthetic coding sequence"
  source 1..1302: mol_type = other DNA
atggagccccagctgggccccgaggccgccgccctgcggcccggctggctagccctgcttctttgggttagcgcattaagctgcagcttctccttacctgcctcctcgttgagtagtttggttccacaggtacggaccagctacaattttggccggactttcctgggactggacaagtgtaacgcctgtatcggaacttccatatgtaaaaagttctttaaagaggaaatcagatccgataactggctagcctcgcatctgggtctgccacctgacagtctgttgagctatcccgctaattactctgacgattccaaaatctggcgccccgtcgagatattcaggctggtgtccaagtaccaaaacgaaatttcggaccgacggatctgtgctagcgctagcgctcccaaaacttgttccattgagcgcgtgttgagaaaaacagaaaggttccagaaatggctccaggccaaacgtctaactccggatttggtgcagggccttgcgtcgcccctgctgaggtgcccttcccagagattactggatagggttgtcaggcgatacgccgaagtcgccgatgctgggtctattttcatggatcactttacagaccgggataaacttcggctactgtataccctggcagtgaactcccatccgatcctgctgcagatcttccctggcgcagaaggatggcctctgccaaagtacctgggctcctgcgggaggttccttgtctccacaagcacgcgacctttacaggaattctatgatgcacctcccgaccaagcggccgacttggcatatcagctgctaggcgtgctggagtccttaagatccaacgatctgaactatttcttttacttcacccatattgacgctggcatgttcggcgttttcaataacggacacctgtttatcagggatgcttccgcggtgggagttatcgataagcaagagggttcgcaagaggctaacagagccggcgagaacaaggacattttttcctgcctcgtaagcggctgccaggcccagctgccgtcctgcgagtccatctccgaaaagcagtccttggtacttgtatgtcagaaactgctgccaaggctcctacagggccggttccctagccctgtccaggacgacatcgattccatccttgtccagtgcggagacagtattcgtccggaccctgaggtactgggtgctgcctcacagctgaaagacattctccggccccttagaacttgcgacagcagatttgcgtacaggtatccagattgtaaatataacgataaattctag

SEQ ID NO: 9402 - DNA, 600 bp, synthetic construct
  misc_feature 1..600: note = source = /note="Description of Artificial Sequence: Synthetic coding sequence"
  source 1..600: mol_type = other DNA
atggagaccttccccctgctgctgctgagcctgggcctggtgctggcagaggcttcggaatcaactatgaaaatcattaaagaagagttcaccgatgaggagatgcagtatgacatggctaagtcaggccaggaaaaacagaccattgagatactcatgaacccaatcttgctggtaaagaatacgtcactctctatgagtaaggacgatatgagttctaccctgctgacctttaggagtctccattacaacgaccctaagggtaatagcagcggaaatgataaggaatgttgcaatgacatgacagtttggagaaaggtgagcgaagccaatggtagttgcaagtggtccaacaatttcattcggagctcaaccgaggttatgaggcgagtccatcgcgcacccagttgcaagtttgtacagaaccccggcatatcctgttgtgaaagcctagagctggaaaacactgtatgtcagttcaccacagggaagcagtttcctaggtgtcagtatcattccgtgacctccctcgagaagatattaactgtactgaccggccacagtttgatgagctggctcgtgtgcgggtcgaagctgtag

SEQ ID NO: 9403 - DNA, 600 bp, synthetic construct
  misc_feature 1..600: note = source = /note="Description of Artificial Sequence: Synthetic coding sequence"
  source 1..600: mol_type = other DNA
atggagaccttccccctgctgctgctgagcctgggcctggtgctggcggaggcgtcagagagtaccatgaagattattaaggaggaatttaccgatgaggagatgcaatatgacatggcgaaatccggacaggagaaacagacaatcgagatcctgatgaacccgatcttgctggtgaaaaatacatctctgagtatgtccaaggacgacatgagttctaccctgctgactttccgttcactccattataatgatccaaagggtaacagcagcggaaatgacaaagaatgttgtaatgatatgaccgtatggagaaaagtaagtgaggctaatggaagctgtaagtggtctaataattttatacgaagttccactgaggtgatgcgccgggttcacagagccccctcctgtaagttcgtgcagaaccctggtatctcttgctgcgaatcactggagctcgaaaacacagtatgccagttcacaactggaaaacaatttccaaggtgtcagtaccatagcgtcaccagtctggagaaaatcctgaccgtgctgaccgggcattccttgatgtcctggctggtttgcggtagtaagctttag

SEQ ID NO: 9404 - DNA, 291 bp, synthetic construct
  misc_feature 1..291: note = source = /note="Description of Artificial Sequence: Synthetic coding sequence"
  source 1..291: mol_type = other DNA
atgctgccctgcctggccctgctgctgctgatggagctgagcgtgtgtacagtggccggagatggcggggaagaacagacactgtccaccgaggccgaaacctgggagggggcaggtccttcaatccagctgcagctccaagaggttaaaactggtaaagcgtcccagttctttggactgatgggcaaacgcgtcggcgcctatcagctggagcatacatttcagggcctgctgggtaagcgaagtttgtttaccgaggggcgtgaggacgaggctcagggtagcgagtag

SEQ ID NO: 9405 - DNA, 981 bp, synthetic construct
  misc_feature 1..981: note = source = /note="Description of Artificial Sequence: Synthetic coding sequence"
  source 1..981: mol_type = other DNA
atgaccggcctgtgcggctacagcgcccccgacatgcggggcctgagattgattatgattcccgtagaactgttgttatgttacttgctcctgcacccggtcgacgccacctcatacggaaagcagacaaacgtgttgatgcactttcccctctcactggagagccaaactccttctagtgacccactctcatgtcagtttctgcatcctaagtcactgcctggcttctctcacatggctcccctgcccaaattcctggttagtctcgcgctgcgaaatgcactggaagaagcggggtgccaagccgacgtttgggctctgcagctgcaattatatcgccaaggtggggttaacgctactcaggtcctcatccagcatttgcggggacttcagaagggtcgcagcactgaaagaaatgtctccgtcgaggcgttggcctccgccctccagttgctggccagggagcagcagtccaccggacgcgtgggcagaagtttgccaactgaagattgcgaaaatgaaaaggagcaggctgtccataacgtagtgcagctgcttcctggtgtggggaccttttataacctcggcacggcgctgtattacgctacccagaattgtttgggaaaggcccgcgaaagggggcgggacggagccatagacctaggatatgacttgcttatgacaatggcaggtatgtcaggggggcccatgggcctggcaatatccgccgccctgaagccagcactgaggagcggcgtgcaacagcttattcagtactatcaggatcagaaggacgccaacattagtcagcccgaaaccaccaaggagggactacgggccatttccgacgtgtccgatcttgaagaaactaccactctggcctccttcatcagtgaagttgtctctagtgccccctattggggctgggctattattaaaagctacgacctggaccccggcgccgggagcttggagatatag

SEQ ID NO: 9406 - DNA, 1476 bp, synthetic construct
  misc_feature 1..1476: note = source = /note="Description of Artificial Sequence: Synthetic coding sequence"
  source 1..1476: mol_type = other DNA
atgcggtggatcctgtgctggagcctgaccctgtgcctgatggcccagacagccttgggggccctgcataccaagagaccacaggtcgtgacaaaatatggaactcttcaaggaaagcaaatgcatgtggggaagacacctatccaggtgtttctgggcgtcccattctctcggccccctctgggaatcctccgatttgcgccgcctgagcccccggagccctggaagggaatcagggacgccactacatatccgcctggttgcctgcaggaatcttggggacaactggccagcatgtacgtgtctacaagggagcgatacaagtggctgcggtttagcgaagactgcctgtatctcaacgtctatgcccccgcacgagctcccggcgacccccaactgccagtcatggtgtggttccccggaggagcctttatcgtgggagctgcatcctcttacgagggttccgatctggcagcaagagaaaaagtggtactcgtctttttgcagcaccggttaggcatattcgggttcctgtcaaccgacgactcccacgctagagggaactggggactgttagaccagatggctgcactgaggtgggtccaggaaaatattgctgcgttcggcggagatcccggcaacgtaaccctgttcgggcaaagcgccggcgccatgtcgattagtggattgatgatgtctcctctggccagtggactgttccaccgcgccatatctcaaagcggtacagcgctcttccggctgtttattacctccaatcctctgaaggtcgcaaagaaagtagcccacttagctggatgtaatcacaactccacccagatcctagttaactgtctgcgcgccctttcagggactaaggtgatgagggtgtctaacaaaatgagattcttacaattgaactttcaacgcgatccagaggagataatctggtccatgtcacccgtcgtggacggtgtggtgattccagacgatcccctggtcctgcttacgcaaggcaaggtgagcagtgttccttatctgctgggagtcaacaacctggagttcaactggctgcttccttataacataaccaaagaacaagtccccctggtggtggaagagtacttggacaatgttaatgagcatgattggaaaatgctccggaacaggatgatggatattgtgcaggacgcaacctttgtttacgccacgctacagacagcgcattaccacagagggctgtctatgggcaaggagaaggcactgtctctgcagatgatgaaatactgggctaattttgccagaacaggtaatcccaatgatggtaatctaccatgctggcctaggtacaataaggacgagaaatatctccagctcgatttcactacacgcgtgggcatgaagttgaaggagaaaaagatggctttctggatgagtttataccagtcacagcgccctgagaagcaaaggcagttttag

SEQ ID NO: 9407 - DNA, 285 bp, synthetic construct
  misc_feature 1..285: note = source = /note="Description of Artificial Sequence: Synthetic coding sequence"
  source 1..285: mol_type = other DNA
atggccgccttcccccacaagatcatcttcttcctggtgtgcagcacgctaacacacgtcgcattctcaggaatctttaataagagagatttcacccggtggccgaagcctcgctgcaagatgtacatcccactggaccccgactataacgcagactgccctaacgtaacggcgcccgtatgcgcttccaatggtcataccttccaaaacgaatgttttttctgtgtggagcagcgggagttccattacagaattaagtttgaaaagtatgggaaatgtgattag

SEQ ID NO: 9408 - DNA, 402 bp, synthetic construct
  misc_feature 1..402: note = source = /note="Description of Artificial Sequence: Synthetic coding sequence"
  source 1..402: mol_type = other DNA
atgcggcagcggctgctgcccagcgtgaccagcctgctgctggtggcgctgctgttccccggcagctctcaggcaaggcacgtgaatcacagtgcaactgaagccctaggcgaactgcgagagcgcgcgccaggacaaggaacaaacggctttcagctgctaagacatgctgttaaaagagacctgttgcctcctcggacaccgccctatcagggtgatgtgccccctgggatccgtaataccatttgtcatatgcagcaaggaatttgccgattattcttttgtcactctggagaaaaaaagagagatatatgctcggatccgtggaatagatgttgtgtcagtaataccgacgaagaagggaaggagaagcccgagatggacgggaggtcagggatctag

SEQ ID NO: 9409 - DNA, 564 bp, synthetic construct
  misc_feature 1..564: note = source = /note="Description of Artificial Sequence: Synthetic coding sequence"
  source 1..564: mol_type = other DNA
atgggctgctgcggctgcagcggcggctgcggcagcggctgcggcgggtgcgggtcaggatgtggtgggtgcgggagcagctgttgcgttcctatttgctgttgtaaacctgtgtgttgctgcgtgcctgcatgctcttgtagctcatgcggatcttgcggtggatcaaaaggagggagagggagctgcggcggttctaagggcgactgcggcagctgcggcgggtctaagggaggatgcggatcctgtggttgcagccaatgctcctgttataaaccatgctgctgtagtagcggctgcggaagtagctgctgccaatcgagctgttgcaaaccttgttgtagccagagcagctgctgtaagccatgctcttgctcctccgggtgcggcagctcttgctgccagtcctcatgctgcaaaccctgttgtagtcagtcatcatgctgcaaaccgtgctgctgctcctccggctgcgggtcaagttgttgtcaatccagctgctgtaaaccgtgctgctcccagtcaagttgttgcgtgccaatttgttgccagtgcaagatctag

SEQ ID NO: 9410 - DNA, 564 bp, synthetic construct
  misc_feature 1..564: note = source = /note="Description of Artificial Sequence: Synthetic coding sequence"
  source 1..564: mol_type = other DNA
atgcggcccctggccggcgcccccgtgcccaagcggcagaagtgcgatcactggactccatgcccttctgatacatatgcctataggctgctgagcggggggggcaggtcgaaatacgctaaaatctgctttgaagacaatctcctcatgggggagcagctggggaacgtggctcgcggcatcaatattgcaattgtaaattacgtcaccggcaacgtaaccgcaactcggtgttttgacatgtatgaaggggataactctggccccatgactaaatttatccagagcgctgcccccaagagcctcctctttatggttacctacgatgatggcagtactcgccttaacaacgacgccaaaaatgctatagaagcgttgggtagtaaggaaatccgcaatatgaagtttaggtcaagctgggtgttcattgccgccaagggcctcgagctgccgtctgaaatccaaagggagaagatcaaccatagcgatgcaaaaaacaacaggtattccgggtggccagcagaaatacagatcgagggctgcattccaaaggaacgctcctag

SEQ ID NO: 9411 - DNA, 249 bp, synthetic construct
  misc_feature 1..249: note = source = /note="Description of Artificial Sequence: Synthetic coding sequence"
  source 1..249: mol_type = other DNA
atgaagatcctgtgcatcttcctgaccttcgtgttcaccgtgagctgtggcccgtccgtcccccaaaagaaaacccgtgaggtagctgagcgaaagcgagagtgtcaactggttaggggcgcttgtaaacctgagtgcaattcctgggagtacgtgtactactattgcaacgtcaatccatgttgcgccgtctgggaatatcagaaacccatcatcaataaaattacctccaaactgcaccaaaaatag

SEQ ID NO: 9412 - DNA, 186 bp, synthetic construct
  misc_feature 1..186: note = source = /note="Description of Artificial Sequence: Synthetic coding sequence"
  source 1..186: mol_type = other DNA
atgaagatccacgtgttcctgttcgtgctgttcttcttcctggtgccgatcgccactagggtgaagtgtgctgttaaggacacatattcttgttttataatgagggggaagtgccgacatgagtgccacgatttcgagaaacctatcggattctgcactaaactcaatgccaattgttacatgtag

SEQ ID NO: 9413 - DNA, 1056 bp, synthetic construct
  misc_feature 1..1056: note = source = /note="Description of Artificial Sequence: Synthetic coding sequence"
  source 1..1056: mol_type = other DNA
atgggcaacctgttcatgctgtgggccgccctgggcatctgctgcgccgccttctccgccagtgcatggagcgttaacaactttctaatcacaggaccaaaagcatacctgacttatacaactagcgtcgcgttaggcgctcagtctggaatcgaggagtgcaaattccagttcgcgtgggagcgttggaactgccccgaaaacgccctgcagctgtctacacataacagactgcgctcagccacccgtgagacctcatttatacacgccattagttccgcaggcgtcatgtatataattactaagaactgttcaatgggggattttgagaattgtgggtgtgatggaagcaacaacggaaaaactgggggtcacggatggatctggggtggatgttctgacaacgttgaattcggcgaaaggatctctaagctgttcgttgacagtttggaaaaaggaaaagacgccagagctctaatgaacttgcataataacagagccggtcgcctcgccgtgcgagccacgatgaagcgaacctgcaagtgtcatggtatctccgggagctgcagcattcaaacttgttggctccagctcgccgaattccgggagatgggtgactacctgaaagctaaatatgaccaggcgctcaagatcgaaatggacaaacgtcagctgagagctggaaactctgctgaaggacattgggtgcccgctgaagctttcctgccttctgccgaggccgagctgatctttctggaggagtcccccgactattgtacatgcaattcgtctctggggatttacggaaccgaaggacgcgagtgcctccagaactcccacaacacaagtaggtgggaacgccggagctgcggacggttgtgtacggaatgtggcctacaggtcgaggagcgtaagaccgaggttatcagcagttgcaactgcaaattccagtggtgctgtacggttaagtgcgaccagtgtagacacgttgtgtccaaatactattgtgcccgcagtcctggcagcgcccagtccttagggaaaggatccgcttag

SEQ ID NO: 9414 - DNA, 1446 bp, synthetic construct
  misc_feature 1..1446: note = source = /note="Description of Artificial Sequence: Synthetic coding sequence"
  source 1..1446: mol_type = other DNA
atgcagagccggctgctgctgctgggcgcccccggcggccacggcggccctgcaagccgcagaatgcggctcttactgagacaggtcgttcagaggcgacccggaggcgacagacagaggccagaggtacgcctgctccacgccggatcaggggctgatactggcgacaccgtgaacatcggtgatgtgagctacaaacttaagatcccaaaaaacccagagctggtgccgcagaattatatttccgacagcctggcacaatccgtggtgcagcacctccgctggatcatgcagaaagacctgctcggacaggatgtctttctcattggaccccccggtcctctccgacgcagcatcgctatgcaatacctagagctcactaagcgggaagttgaatatattgctctttcccgtgacaccacggagaccgatctgaaacagcggagagaaatccgggcaggcactgcattctatatcgaccagtgtgccgtgcgggcagctacagaaggacgcactttgatactggagggactggaaaaagctgaaaggaatgtgcttcccgtattgaataatctgctcgaaaacagggagatgcagcttgaagacggtcggttccttatgtcagctgagcgctacgataaactgctgcgggaccataccaagaaggagctcgactcctggaagatcgtgcgtgtctcagagaactttcgtgtcatagcactaggccttcccgtgccccggtatagcggtaatcccctggacccaccattgaggtcccggtttcaggctcgggatatttattacctgcctttcaaagaccagctgaagttactgtactctataggcgctaacgtcagtgcagagaaagtctcacagcttctttccttcgcgaccaccctttgctctcaggagtcttctaccctgggactgcccgacttccctctcgattcgttagcggcagccgtgcaaatcctggacagctttccgatgatgcccatcaaacatgctattcagtggttgtatccatactcaatcctgcttggccatgaggggaagatggcagtggaaggcgtgctcaaacggttcgagttgcaggattccggaagttcacttttgcccaaagagattgtgaaggtggagaaaatgatggagaaccatgtttctcaagcgtccgttactatccgtattgccgacaaagaggtcacaatcaaggtgcccgccggcaccaggctattgtcccagccttgcgcgtcggaccggtttatccagaccttatcccataaacagctgcaggccgagatgatgcagtctcacatggttaaggacatttgtttgatcgggggaaagggctgtggaaagactgtgattgcaaagaatttcgcagataccctcggctacaatattgaacccattatgctgtatcagcacaaggtgccacatatctag

SEQ ID NO: 9415 - DNA, 786 bp, synthetic construct
  misc_feature 1..786: note = source = /note="Description of Artificial Sequence: Synthetic coding sequence"
  source 1..786: mol_type = other DNA
atggccagcctggccgtgagcaactggcccaagcccatgcccctgatcccatgtctctcttggtctactgcgtccggcgttttcaccacaggcgtgctgagtaagtccataaactggagggaactggaaaaacaatattatacacaaactgtatacgaggaggagattatacatatgctggagtattgcggtacggactcttttaagatggggcaggaatttgtgaagcactttacatcatctgcagataagttgacaaaccttaacctggtcagcagaacactgaaccttgatatttccaaccaggttgtttctcagaaaccagctgattgccacaactctagcaagactagcgtgtctgccacttcagaagggttattgctccaggatactagcaagatgaagaggttcaaccagaccctttctacaaacaaatcaggctacacctcaaggaaccctcagtcctaccacttgctgtcaaaggagcagtcccggaatagcctgagaaaggagagcttaatcttcatgaagggagtgatggacgaatgcacccacgtggcaaatttttcagtgccggtggacccctcactgatcatcgtggttcaagccaaggaagatgcttatataccacggacaggcgtcaggagtctccaggaaatctggcctggctgcgagataaggtacctggagggggggcatattagcgcttacttattcaagcaaggactctttcggcaggcgatttatgacgcattcgacaggttcctgcataagtacgccaactag

SEQ ID NO: 9416 - DNA, 1245 bp, synthetic construct
  misc_feature 1..1245: note = source = /note="Description of Artificial Sequence: Synthetic coding sequence"
  source 1..1245: mol_type = other DNA
atgggcgtgagcaagctggacatcctgtaccggcggctgctgctgacaaagctcttcatcaggggctgggggcgacctgaggatctcaagaggctattcgagttcagaaagatgataggcaatcgagagagatgtcaaaatttggtgtctagcgactatccggtccatattgacaaaattgaggagcaatcggactgcaaaattctggacggccacttcgtatcgccgatggctcattacgtacctgatatcatgcctattgagagtgtgattgctcgcttccagttcatagttcccaaggaatggaacagcaaatatagaccggtgtgtatccatcttgcaggcacaggggatcaccattactggcgtcggagaacactgatggctaggcccatgatcaaagaagcgcggatggctagtctactattagaaaatccctattacggctgtcgtaaaccaaaggaccaggtgaggtccagtttgaagaacgttagcgacttatttgttatgggaggggccctcgtgctggagtcagccgcactactccactggttggagagagaagggtatgggcccctgggcatgacgggcatctcaatgggcggacacatggcgtcacttgcagtttctaactggccaaaacctatgcccttgatcccttgcctaagttggtcaaccgcctcaggcgtgttcactaccaccgactccttcaagatgggtcaagagttcgtgaagcattttacttctagtgccgataaacttacaaaccttaatctagttagtcgtaccctcaatcttgacatatctaatcaagtcgtgagtcagaagcccgccgactgccacaactcaagcaagacatcagtcagcgccacatccgaggggctgctcctgcaggacacgagcaaaatgaaaaggttcaatcaaactctgtccacaaacaagtctgggtatacctctaggaacccccaatcctaccatcttctttccaaggaacagagcagaaattccctccgtaaagagtctttaatctttatgaagggcgttatggacgagtgtacacacgtggccaatttttcagtccctgtagatccttcgcttatcatcgttgtccaggcaaaggaggatgcgtacatacctaggacgggcgtcagatctttacaggagatctggccgggctgtgagattcgataccttgagggggggcacatcagtgcctatttgttcaagcaggggttgtttcggtag

SEQ ID NO: 9417 - DNA, 747 bp, synthetic construct
  misc_feature 1..747: note = source = /note="Description of Artificial Sequence: Synthetic coding sequence"
  source 1..747: mol_type = other DNA
atgaagctgaccttcttcctgggcctgctggccctgatcagctgctttacgccctccgaatcccagagattctccaggcgtccttacctccccggtcagctcccaccaccccccctgtacaggccgcgctgggtgcctccttccccccctcccccttatgacagcaggctgaactctcccctgtccctgccattcgtaccaggaagggtgcctcctagtagcttctcccgattcagccaagccgtcattctctcccagctatttcctttagaatccatcaggcagcctcgcctttttccagggtaccccaacttacattttcccctcagaccgtattatgttgggccaatcagaattctgaagccaccgttcccccctattccatttttcttggctatatacctgcccatctcaaacccggagcctcagattaacattaccacggccgatacgacgatcacaaccaatcctcccacaacggccacagccactacctcgactagcaccaagcctacaatgactatctcctcctcaactgtgcccatctcctcaacacccgaacctgccacgagcatttcggcggctactcccgccgccagcaccgaaaacactacccagattctggctaataggccccataccgtgctcttgaacgctacagttcaggtcaccacttcaaatcagactattctgtcctcccctgcatttaaaagtttctggcaaaaactgtttgcaatctttggttag

SEQ ID NO: 9418 - DNA, 231 bp, synthetic construct
  misc_feature 1..231: note = source = /note="Description of Artificial Sequence: Synthetic coding sequence"
  source 1..231: mol_type = other DNA
atgggcgccgccatcagccagggcgccctgatcgccatcgtgtgcaacggtctcgtggggttcctgctgctgctcctctgggtaatcctttgttgggcatgccactccagaagcgccgatgtggattccctgtccgagagctcaccaaactcctcgccggggccctgcccggaaaaggccccaccccctcagaaaccttcacacgaagggtcttacctcctccagccgtag

SEQ ID NO: 9419 - DNA, 1536 bp, synthetic construct
  misc_feature 1..1536: note = source = /note="Description of Artificial Sequence: Synthetic coding sequence"
  source 1..1536: mol_type = other DNA
atgctggtggacggccccagcgagcggcccgccctgtgcttcctgctactggcagtggctatgtcctttttcggcagtgccttgtctatcgatgaaaccagagcccacctgctcttgaaggagaaaatgatgagactcggcggacggctcgtgctcaacactaaagaggagctggctaacgagcggttaatgacactcaaaattgctgagatgaaagaggccatgcggaccttaattttccctccatctatgcattttttccaggcgaaacatctgatagagagatcccaggtgtttaacatccttcggatgatgccaaaaggggcggcactacaccttcacgacattggcattgttacaatggactggcttgtccgaaatgtaacatatagacctcactgccatatatgctttactcctagaggaattatgcagttcaggtttgctcaccctactcccaggcccagcgagaagtgtagcaaatggatcctgctggaagattatcgaaagagagtacagaacgtgactgagtttgatgactccctgctgaggaattttacactggtgacgcagcacccggaagtgatctacacaaaccaaaatgtcgtgtggagcaagttcgagactatattttttacaatatccggcctaattcactacgcgcccgtttttagggattatgtcttcagatccatgcaggagttttacgaggataatgttctgtatatggagattagggctaggctgttgcctgtctatgaactcagcggcgagcaccatgacgaggaatggtccgtcaaaacctaccaggaagtcgcccagaaattcgtggagacccatcctgagttcatcgggatcaagataatatacagcgatcatagaagcaaggatgttgccgtcatcgcggagtccattagaatggcaatgggtctgaggattaagtttcctacagttgtagcaggctttgatctcgtcggacacgaggatacaggtcacagcctccacgattataaggaggctctgatgatccccgcgaaagacggcgttaagctaccctatttttttcatgccggtgaaactgactggcagggaacctcgattgatcggaacatcctcgacgctctcatgctgaacacaactaggatcggtcacggcttcgccctgtcaaagcatccggcagtgcggacgtattcgtggaagaaggacatcccaatcgaggtttgcccgattagcaaccaggtcctgaaactggtatcagacctgcgtaaccatcctgttgccacactgatggctactggacacccgatggttatttccagcgacgatcccgctatgtttggggcaaaaggccttagttacgatttctatgaggtgttcatgggaattggggggatgaaagccgacctccgaacccttaagcaactcgccatgaactcaattaagtatagcactctgctcgagagcgaaaaaaatacatttatggagatctggaaaaagcggtgggataagttcattgccgacgtcgccactaaatag

SEQ ID NO: 9420 - DNA, 1536 bp, synthetic construct
  misc_feature 1..1536: note = source = /note="Description of Artificial Sequence: Synthetic coding sequence"
  source 1..1536: mol_type = other DNA
atgctggtggacggccccagcgagcggcccgccctgtgcttcctgctgttggctgtggcaatgtcatttttcggttctgcactcagtatcgacgaaacacgggcccatttgttgctcaaagaaaagatgatgaggcttggcggtcgccttgtacttaacactaaggaggaactggcaaacgagagactgatgaccctgaaaatcgccgagatgaaggaggctatgcggactcttattttccctccatcgatgcattttttccaagccaagcacctgattgagcgctcgcaggtgttcaacattttacgcatgatgcccaagggcgctgctctacaccttcatgatatcggcattgtgacaatggactggctggtcaggaatgtgacctatcggccacattgtcacatatgtttcaccccaagggggatcatgcagtttcggtttgctcaccccacgcccagaccatcagagaagtgctcaaaatggatccttttagaagactacaggaaacgagtgcagaatgtgaccgaattcgacgactcactgctgcgcaactttaccttagtcacacagcaccccgaagtcatctacacaaaccagaatgttgtctggtccaaatttgaaaccatatttttcaccatcagcggcctaatccactacgctccagtctttagggattatgtgttccgctcaatgcaggagttttacgaggataacgtactgtatatggaaatccgggctagacttctgcctgtgtacgagcttagtggcgagcatcatgacgaagaatggtccgtaaaaacctaccaggaggtcgctcagaaattcgtagagactcaccctgagttcatcggtattaaaatcatttatagtgatcaccggagtaaagatgtcgcagtgattgccgagagcatccggatggctatggggctccgcatcaagttcccaaccgtcgtggctgggtttgacctggtggggcacgaagacaccggacattccttacacgactataaagaggccctgatgattccggccaaagacggggttaagctaccctacttctttcacgcaggcgaaaccgactggcaaggaacgtctatcgaccggaatattctggatgcattaatgctgaatactaccaggatcggtcatggtttcgcactttcgaaacaccccgccgtccggacctattcttggaagaaagacattcccatcgaggtctgtcccatctcaaaccaggtgttaaaactggtttcagatcttagaaaccaccccgtcgctaccctcatggctactgggcaccccatggtcatctcctcagacgatccagcaatgtttggggcaaaaggccttagttatgatttctacgaagttttcatgggcatcgggggtatgaaggccgatctgagaacgctgaaacagcttgctatgaattctattaaatattcaactctgcttgagagcgaaaaaaacacattcatggagatctggaaaaagaggtgggacaagttcatcgcagacgtggcgaccaagtag

SEQ ID NO: 9421 - DNA, 240 bp, synthetic construct
  misc_feature 1..240: note = source = /note="Description of Artificial Sequence: Synthetic coding sequence"
  source 1..240: mol_type = other DNA
atgaagctgcacagcctgatcagcgtgctgctgctgttcgtgaccctgattccaaaggggaaaaccggcgttattcccggtcaaaagcagtgtatcgccctaaagggagtgtgtcgcgacaagctctgttctactctggacgacacgattggaatatgtaatgagggcaagaagtgctgcagaaggtggtggatacttgaaccatacccaactccagtgccgaagggtaagtctccatag

SEQ ID NO: 9422 - DNA, 351 bp, synthetic construct
  misc_feature 1..351: note = source = /note="Description of Artificial Sequence: Synthetic coding sequence"
  source 1..351: mol_type = other DNA
atggccgccggcagcgcccccatgcagctgcacctgcgggccaccattcgcatgaaggacggtctgtgtgtccccagaaagtggatataccaccttacagaaggctccaccgatcttaggaccgagggcagacctgacatgaagactgagctgtttagttcctcctgccccgggggtatcatgcttaatgagacgggacagggctaccaacgctttttactctataatagatccccacatccaccggaaaaatgtgttgaggagtttaaatctctgacctcttgcctagattctaaagcatttctcttgacaccccggaatcaggaagcttgtgaactttccaataactag

SEQ ID NO: 9423 - DNA, 543 bp, synthetic construct
  misc_feature 1..543: note = source = /note="Description of Artificial Sequence: Synthetic coding sequence"
  source 1..543: mol_type = other DNA
caggtgatccccatcaacagcggcgacctgttcgtgcaccccctgtggaaccgatcctgcgtggcctgcggtaatgacatcgcattgattaagctatctagatctgcacagctgggagatgctgtgcaactggcctctcttcccccagccggagacatattgcccaatgaaaccccatgttacatcactggttggggccggctttacactaacggcccactcccagataagctccaggaggcactcctccctgtggtggactacgagcattgtagtcgttggaattggtggggcagttccgtcaagaagaccatggtgtgcgccggtggggatatccggtcaggatgtaatggggactcgggcggcccgttgaattgtccaaccgaggacggggggtggcaggtgcatggggttacctctttcgtgagcgctttcgggtgcaatacgcgtaggaagcccacagtctttactcgggtgtctgctttcatcgactggattgaggagaagctccagggtaacaaagctcctgaatctaggacgtag

SEQ ID NO: 9424 - DNA, 1215 bp, synthetic construct
  misc_feature 1..1215: note = source = /note="Description of Artificial Sequence: Synthetic coding sequence"
  source 1..1215: mol_type = other DNA
atgccccccttcctgatcaccctgttcctgttccacagctgctgcctccgggcaaacggccatcttagggaagggatgaccctattaaagacagaattcgcccttcatttgtatcagagcgtggccgcctgtcggaacgagaccaactttgtgatttctccagcaggcgtctctttaccgctcgaaatcctgcagttcggcgctgagggatctacaggacagcagctcgcagacgcattgggttacacggtgcatgataagcgcgtgaaagatttcctccatgctgtatacgccaccctgcctacatcctcacagggaactgagatggaactcgcttgtagcttgttcgtccaggtggggacacctctgtcgccttgttttgtggaacacgtcagttggtgggctaattcatcgttagagccagccgatctctctgagccgaattcaaccgccattcagaccagtgaaggggccagccgagagacagccggcggcggaccgtcagaaggacctggcgggtggccctgggaacaggtgtcagccgccttcgcacagctcgtgctcgtgtcgacaatgagctttcagggcacatggcgcaagagattctcaagcaccgacacacaaattctccccttcacttgcgcttatgggcttgttctgcaggtgccaatgatgcatcagacgacagaggttaactacggtcagtttcaagatacggctggacatcaggtcggagtccttgagctgccctacttgggatccgccgtgagcctgtttctcgtgttaccaagagataaagacaccccactttcacatatcgaacctcatctgacagctagcaccattcacctgtggactacgagcctgaggcgggcacgcatggacgtcttcctccctagatttaggatccagaatcagttcaatctgaagtccattctgaattcttggggagttaccgatttgtttgaccccctgaaggcgaatctgaagggcatcagcggacaggatggcttctacgttagcgaggccatccataaggcaaaaattgaggttttggaagaaggaaccaaagccagcggcgcaacggccctactcctgctcaagagaagccgcatccctatttttaaggcggacagaccgttcatctactttttacgggaacccaatacagggtttgtcttctcaatcggccgagtatcaaacccacttgactag

SEQ ID NO: 9425 - DNA, 444 bp, synthetic construct
  misc_feature 1..444: note = source = /note="Description of Artificial Sequence: Synthetic coding sequence"
  source 1..444: mol_type = other DNA
atgggccccgaggccctgagcagcctgctgctgctgctgctggtggctagcggcgatgcggacatgaaagggcactttgaccccgccaaatgtaggtatgccctgggaatgcaggaccgtaccattccagattctgacatcagcgccagctcatcctggtccgattcaactgccgctcggcacagtcggctggagagttcggatggcgatggcgcctggtgtcctgcgggttcagtgtttcctaaggaggaggaatacttgcaggtcgacctacagcggctgcaccttgttgccctcgtcggaacccagggcagacacgctgggggcctaggtaaagaattttcccggagctatagactgaggtatagcagagacggacgccgctggatgggatggaaggatagatgggggcaggaggttatcagcggaaacgaggatccctag

SEQ ID NO: 9426 - DNA, 2631 bp, synthetic construct
  misc_feature 1..2631: note = source = /note="Description of Artificial Sequence: Synthetic coding sequence"
  source 1..2631: mol_type = other DNA
atgggccccgaggccctgagcagcctgctgctgctgctgctggtggcttccggcgatgccgacatgaaaggacatttcgacccagctaaatgtcgatatgctctgggcatgcaggatagaacaattccggactcagacatcagcgcaagctctagctggtccgactcaaccgccgcacgccactcacgcctggagagctctgacggtgacggtgcctggtgcccggcagggtccgttttccccaaagaagaggagtatttacaggttgatctacaaaggctacatctagtcgctctggttggtacacagggccgacatgcgggcggtctggggaaggagttctcaaggtcatacaggttgcggtattcccgcgatggccgtaggtggatggggtggaaggaccggtgggggcaggaagtgatctccggaaatgaggatccggaaggcgtggtgctgaaagacctgggcccgcccatggttgcaagacttgttcggttctatcctcgcgctgacagggttatgagcgtgtgcctgagggtggaattatatggctgtttatggagagacgggctactgagctatacagctccagtaggtcagacaatgtacttgtcggaggccgtgtatctgaatgattcaacatacgatgggcataccgtcggcgggttacaatatggtggcctgggtcagttggccgacggcgttgtgggcctggacgatttccggaagtcccaggagcttcgcgtttggccgggctacgattatgtcgggtggtccaaccactctttcagcagcggctacgtggagatggagtttgaattcgatcgcctgagggcctttcaggcaatgcaggtacattgtaacaacatgcatactctgggtgcccgtcttccaggcggagttgaatgtcgctttcggagagggcccgcaatggcgtgggaaggggaacctatgcggcacaatctgggcggaaacctcggcgacccacgggcaagagccgtgtcagtgccactgggggggcgcgtcgcgcgcttcctccagtgcaggttcctttttgcaggcccttggctgttgttcagtgagatttcttttatatctgacgtggtgaataatagctcaccggccttgggcgggacatttccgcccgcaccgtggtggccacccggccctccacctaccaatttttctagcctggagttagagccgcggggtcaacagccagtggctaaggccgagggttcgcctacggccatactgatcgggtgcctggtggctatcattctgctgcttttattgatcattgcacttatgctgtggagattgcactggaggaggctgttatcgaaagcagagagacgggtgctcgaagaggaattgaccgttcacctcagcgtgccgggagacacaatcttgatcaataacagacctggccctcgggaaccacctccctaccaggagccacgcccaaggggaaatcctcctcattcggccccctgtgtccctaatggcagcgcatactctggagactacatggagcccgagaagcctggggcccctttgctaccccctcctcctcagaacagcgtgccccattacgcggaagccgacattgtcacgttgcagggagtcaccggaggcaacacatatgcggtgcctgccctgcctcccggtgcagtaggggacggcccacctcgagtcgacttccccagatctcgcctgcgcttcaaggaaaaactgggggaggggcagtttggtgaggttcacctgtgcgaggtggattcacctcaggacctggtttccctggatttccctctgaatgtgcgcaaagggcatcctttgcttgttgccgtaaaaatactgaggcctgacgctacgaaaaatgcccggaacgactttctgaaggaagtgaagatcatgtcccggctaaaggatcccaacatcatcaggcttctcggcgtatgtgtgcaggacgatcccttatgcatgattacagactatatggagaatggcgatcttaaccagttcctgtcagcccatcagctcgaggataaggccgctgaaggcgcccccggcgatgggcaggccgcccagggaccaactatctcctacccaatgctgctccacgtggccgcacagatcgcgagcggaatgaggtaccttgctaccctgaatttcgtgcacagggacttggccacaaggaactgccttgttggtgagaacttcaccataaagattgccgattttgggatgtctcgcaacctgtacgcaggtgattattaccgagtacagggcagggccgtcctgccaattcgatggatggcatgggagtgcatactaatggggaagttcactacggcctcagacgtctgggccttcggggtgactttgtgggaagtcttaatgctgtgtcgggcccagccgtttggacagctgaccgacgagcaggtgatagagaatgcaggagaatttttcagggatcaggggcgccaagtgtatttaagcaggccccccgcttgtccccagggtctctacgagctgatgctgcgctgctggtcgcgggagtccgagcaacggcctccattcagtcagttacacagattccttgcggaagatgctcttaacaccgtgtag

SEQ ID NO: 9427 - DNA, 2631 bp, synthetic construct
  misc_feature 1..2631: note = source = /note="Description of Artificial Sequence: Synthetic coding sequence"
  source 1..2631: mol_type = other DNA
atgggccccgaggccctgagcagcctgctgctgctgctgctggtggcttcaggggacgccgatatgaagggacactttgatcctgctaagtgccggtatgccctggggatgcaggacagaacaattcccgactccgacatctccgcttcctctagttggtctgactccaccgccgctagacatagccggctcgaaagctctgatggtgatggggcttggtgtccagccgggagtgtctttcctaaggaagaggagtacctgcaggtggatttgcagcggctgcatcttgtggccctagtggggacacaggggcgccacgcaggcggacttggtaaggagttcagtcgtagctaccggttgagatactccagagatggtcgccgctggatgggatggaaggacaggtggggacaggaggtgattagcgggaacgaagatccagagggggtggtactgaaggacttgggaccccctatggttgcaagactcgtgagattctacccccgggcggaccgggtcatgagtgtatgccttcgggtagagctgtatgggtgcctgtggcgggacggcctactaagctacactgcacccgtgggacagacaatgtatctatccgaggccgtatatctcaatgacagcacgtacgatggacacaccgtgggcggccttcagtatggcgggctggggcagctggcagatggagtcgtggggctggatgacttccggaagtcccaggagcttagagtttggcccgggtatgattatgtcggttggtctaaccactcctttagctctggatacgttgagatggaattcgagtttgatagattgcgggccttccaggcaatgcaggtccactgtaacaatatgcacactttgggcgctcggctgcctggtggcgtggagtgtcggttcagacgagggcccgccatggcgtgggagggcgaaccaatgagacataatttgggtgggaaccttggtgatcctagagctcgggccgtttctgtgcccctcggggggcgagtcgctagattcttgcagtgtcgttttctctttgcagggccatggttgttgttctccgagatctcattcatcagtgatgtagtgaacaacagttcaccagccctgggtggcacttttcccccagccccctggtggcctccgggccccccccccaccaatttttcatctttggagctcgaacctcggggccagcagccagttgccaaggccgaaggcagtccaacagcaattttaatcgggtgtctggttgcaataatattactgctcttgttaataatcgcactgatgttatggaggctgcattggcggcgtctgcttagcaaggccgagagacgagtgctggaagaagagctgacggtacatctgtcagtccccggcgacactatactaatcaacaataggcctggaccacgggagccccccccctaccaggagccccgtccacgcggaaatccaccccactccgccccatgcgtccccaatggatcggcgtactccggagattatatggaacccgagaaacccggggcgccattactgcccccaccaccccagaatagtgttccacactacgccgaggctgatatagttacattgcagggtgtcacaggaggcaacacttacgctgtgccagccctgccccccggagcagttggcgacggccccccccgtgtcgactttccacgcagcagactccgatttaaggaaaagctcggcgagggacagttcggcgaggtgcatctgtgtgaggtcgactcccctcaggacctcgtgtcactggatttccctcttaatgtaagaaaagggcaccccctgctcgtggcagtgaaaatcttgcgccctgacgccactaaaaacgctagaaacgacttcctcaaggaggtgaagatcatgagtcgtctgaaagatccaaatattattcgcctgctaggggtatgcgtgcaagacgacccgctctgtatgatcaccgactacatggagaacggggacctcaaccagtttctctctgcccaccagttggaggacaaggcagccgagggggctccgggagacgggcaggctgctcaaggcccaacgatttcctatccaatgctcctacacgtggccgcccagattgcttcgggaatgcgctacctggctaccctcaattttgttcaccgtgacctggcaacccgcaactgtttggttggggagaacttcaccatcaagatcgccgatttcggaatgtctaggaacctatatgccggggactattacagagtccaggggagagcggtgctccccattaggtggatggcgtgggaatgcatactgatggggaagtttacaacagcaagcgacgtgtgggctttcggcgtgaccttgtgggaggtgctgatgctctgtagagcccagcccttcggccaactcactgacgagcaggtcatcgagaacgccggtgagttttttcgtgatcagggcagacaggtgtatctttcacgaccacctgcctgtcctcagggtctctacgagctgatgctgcgatgctggagtagggaatcagagcagagacctccgttctctcaactgcataggtttctcgcggaagacgccctcaacaccgtctag

SEQ ID NO: 9428 - DNA, 2742 bp, synthetic construct
  misc_feature 1..2742: note = source = /note="Description of Artificial Sequence: Synthetic coding sequence"
  source 1..2742: mol_type = other DNA
atgggccccgaggccctgagcagcctgctgctgctgctgctggtggcctcaggggacgccgatatgaaaggccacttcgacccagctaaatgccgatatgccctgggcatgcaagacagaactatccctgactctgacatttcagcgtcaagctcttggtcagactctaccgccgccaggcatagtcgcctggagagcagtgacggagacggcgcctggtgtcccgctggcagtgtatttccaaaagaagaagaatatctgcaggtggacttacaacgcctgcatcttgtcgccctggtggggacccagggcagacatgctggcggattagggaaagaatttagtaggtcttaccgactgcgctacagtcgggatggtagacgttggatgggttggaaagatcggtgggggcaagaggtgataagcggaaatgaggacccggagggagtggtcttaaaggacctcgggccacccatggtggccagactcgtaagattctacccgcgagctgaccgcgtgatgagcgtgtgtttgagagttgagttgtacggttgcctgtggagggacgggctgctgagctacaccgcccctgtggggcagaccatgtatctcagtgaggccgtgtatctaaatgactccacctacgacggccacactgtgggaggactccagtacggaggactgggccagttggctgatggcgtggtgggtctcgacgactttaggaagtctcaagagctccgggtctggccagggtatgactatgtcggctggtcgaaccattcctttagctctggctacgtcgaaatggaatttgagtttgatagactgcgggcctttcaagctatgcaggtccactgtaacaacatgcacaccctaggagcgagactgcctgggggggtcgagtgtcgtttccggcgcggtcccgcaatggcttgggagggcgaaccaatgcgccataatttgggaggaaaccttggtgatcctagagctcgggctgtatcagtccccctcgggggcagggtcgcaaggtttttgcagtgccggtttcttttcgccggaccatggctgctcttctcggaaatctcctttatcagcgacgttgtaaacaactcctcccctgcactgggaggaaccttcccacccgcaccctggtggccacctggacccccaccaacaaattttagctctttggagctggagcccagaggccagcagcctgtggcaaaagccgaaggctccccaacggcaattttaattggttgcctcgtggccatcatactgctcttgctgcttatcatcgctttgatgctgtggcgccttcactggcggcgactcctcagcaaagctgagcgacgcgtcttggaagaggaactcacggtgcacctgagcgtgcccggcgacaccattctgattaacaaccggccgggtccccgcgagcccccaccgtaccaagaaccgcggcctcggggcaatccaccacattcagccccttgtgtacctaacggtagcgctctgcttctgtccaaccccgcatatagactgcttctagctacctacgctcgcccccctcgcggtcccggtccacccactccggcttgggcaaaaccgactaatacccaggcatactcaggcgactacatggaacccgaaaagccaggagccccgctactacccccccctccccagaattctgtcccgcactatgctgaagccgatatcgtgaccttgcagggcgtgacgggcggtaatacttacgccgtacctgcactccctccaggggctgtgggtgatggcccaccgcgggtggatttccccaggagcagactgaggtttaaggagaagttgggcgaaggacagtttggagaggtgcacctctgcgaagtggactccccacaggatttggtgtcattggatttcccacttaatgtccgcaaaggacacccgcttctggttgccgtgaagattcttcggcccgatgcaaccaaaaacgcacgaaatgatttcctcaaagaagtgaagattatgtcaagactcaaagatccaaacattatccggctcctaggggtgtgtgtgcaggacgatcctctgtgcatgatcaccgactacatggagaatggggacctgaaccagtttctaagtgcacatcaactcgaagataaagccgccgagggcgcccccggggacggtcaggcagcacaagggccaacaattagctaccctatgctgctgcatgtggcagcccaaatcgcaagcggcatgcgatacctggcaactctgaacttcgttcaccgagacctggctacaaggaattgtctcgtgggggagaactttacaatcaaaatagcagactttggaatgtcccgtaatctttacgcgggcgactactaccgcgtgcaggggagggctgtccttcccattcgctggatggcatgggaatgtatcctgatggggaaattcaccacggctagtgacgtgtgggcctttggggtgaccctttgggaggtgttaatgctgtgtagggcacagccctttgggcagctcaccgacgagcaagtcattgaaaacgctggggaattctttcgcgaccaggggcgacaagtgtatctgtcgaggcctccggcctgtccacagggcctgtatgagctaatgctcaggtgttggagccgagagtcagaacagcgaccgcccttcagccaactgcatagattcctggccgaagatgccctgaatacagtgtag

SEQ ID NO: 9429 - DNA, 444 bp, synthetic construct
  misc_feature 1..444: note = source = /note="Description of Artificial Sequence: Synthetic coding sequence"
  source 1..444: mol_type = other DNA
atgggccccgaggccctgagcagcctgctgctgctgctgctggtggcaagcggagacgccgatatgaaaggtcattttgatcccgcgaagtgccggtatgccttgggtatgcaggatcgcacgataccagactcagacatttcagcttcttcttcctggtccgattccacagccgcacgacatagccgactggaatctagcgacggggacggggcctggtgtccggcaggaagcgtctttcccaaggaggaagagtacttgcaggtagacctgcagcgcttacacctcgtagctctggtggggactcaaggcaggcacgctggtggcctgggaaaagaattctcgcggtcatataggcttagatacagtagagacgggcgccgctggatgggttggaaggaccgatggggtcaggaggtgattagtggtaatgaggatccatag

SEQ ID NO: 9430 - DNA, 2631 bp, synthetic construct
  misc_feature 1..2631: note = source = /note="Description of Artificial Sequence: Synthetic coding sequence"
  source 1..2631: mol_type = other DNA
atgggccccgaggccctgagcagcctgctgctgctgctgctggtggcatcaggagatgcagacatgaaggggcatttcgatccagccaaatgtagatatgcactggggatgcaggacagaacgatacctgactccgacatatctgcctcatcgagttggtctgactcaactgccgctaggcactcacgcctggaatcatccgatggcgacggtgcttggtgtccagctgggtctgtatttcctaaggaagaggagtacctgcaggtcgatttgcagcggctccatctcgtcgctcttgtgggaacccagggccgtcatgcagggggcctgggtaaggagttctctcgctcctacaggttgaggtactccagggatgggaggagatggatgggctggaaagacagatggggccaggaggtgatcagcggtaacgaagaccccgagggtgtggtcctcaaagatctcggaccaccgatggtcgctaggctggtgcggttttaccccagagcagatcgtgtgatgtcagtctgcttacgagtggagctctacggctgtttgtggagggacggtcttctcagctatacagctcccgtcggccagaccatgtatttgtcagaagcagtctacctgaatgacagcacatacgatggacacactgtcggaggcctgcaatacggtgggctgggccagcttgcagacggggtggtgggtctggacgatttccggaagagccaggagctgcgggtgtggcccggctacgattatgtcggctggagcaaccactccttttcctccggctatgtggaaatggaattcgagtttgatagactgagagcattccaggcaatgcaggtgcattgtaataatatgcacactctcggggctcggttaccagggggagtcgaatgtcggtttcgtcgaggccctgctatggcctgggaaggcgaaccaatgcggcataacctgggcggaaacctaggggacccaagggccagagccgtaagcgtaccgcttggcgggcgagtcgcccggttcctacagtgccggttcttgtttgccgggccctggctgcttttttccgagatttcttttatctccgatgtcgtgaacaattccagccctgccctagggggtacttttcctcccgcgccatggtggccgcccgggccccctcctacaaacttttcatctctggagttggagcctcgaggtcaacagccggttgccaaagcggagggatctccgaccgcaatcttaatcgggtgcctggtcgctataatactgctacttttgctgatcattgccctcatgctgtggcgtctgcactggcgccggttgctgtccaaagctgagcgaagagtcctcgaagaagagctgactgtgcacctgtctgtgccgggcgacacgatactaatcaacaacaggccaggcccacgtgagccacccccatatcaggaacccagaccaagaggaaacccaccccactctgccccatgtgtacccaacgggagcgcgtatagtggtgattacatggaacctgaaaaacctggcgcgccactgttgcctccacctcctcagaacagcgttccgcactatgccgaagccgacattgtgaccctgcaaggagttacaggagggaacacatatgcagtgcccgcacttccaccaggcgcagtgggcgatggacccccgcgtgtggattttccgagaagcagactcaggtttaaggagaagctaggagaaggtcagtttggagaagtccacctgtgcgaagttgatagtccccaagatctggtgagcttggactttcccttgaatgtgaggaaagggcatcctctgttggtggcagtcaagattttacggcccgatgccaccaagaacgcgcgcaacgacttcctgaaggaagttaagataatgagtcgccttaaagatccaaacattatcaggctgctcggcgtgtgtgttcaagacgacccactctgcatgattacagactatatggagaacggtgacctcaatcagttcctgtctgcacaccagttagaggataaggcagccgaaggggcacctggtgatggccaggccgctcagggtcccacaatcagctaccctatgctgttgcacgttgcagcacagattgcttcaggtatgcgataccttgcgactttgaacttcgttcatcgcgatcttgcaacaaggaactgtctagtgggagagaactttacaatcaaaatcgctgattttggaatgtccaggaacctctacgccggtgactattacagggtgcagggccgggcagtcttgccaatccgttggatggcttgggaatgtatattaatgggcaagtttacaactgcttctgacgtgtgggcgttcggggtaactctgtgggaggtcttgatgctgtgtcgtgcacagccctttggtcagctgactgatgagcaagtaatagaaaacgcgggcgagttctttagagaccaggggcgacaagtctacctatctcgcccacccgcatgtcctcagggtctgtacgagctgatgctgcgctgctggtcaagagagtctgagcagaggccacccttttcccagctgcataggtttctggcagaagatgccttaaacaccgtatag

SEQ ID NO: 9431 - DNA, 2631 bp, synthetic construct
  misc_feature 1..2631: note = source = /note="Description of Artificial Sequence: Synthetic coding sequence"
  source 1..2631: mol_type = other DNA
atgggccccgaggccctgagcagcctgctgctgctgctgctggtggcttccggggatgcggacatgaagggacatttcgatcctgctaaatgcaggtacgctctcggcatgcaagacaggactattccagattcggatataagcgccagttcctcatggagcgattctacagccgcacgccattctcgcctggagtcgagtgacggagacggggcctggtgccccgcgggaagcgtgttccccaaggaggaagagtatctgcaggtcgacttgcaacggctgcatctggttgccttagtggggacacagggtaggcacgcaggcggcctgggaaaggaattctccaggtcgtacagattgaggtactcaagggatggccgcagatggatgggttggaaggacaggtggggccaagaggtaatctccggtaacgaagatccagagggtgtggtgctgaaagacctgggccctcccatggtcgcgcggctcgtgcggttctaccccagagcggacagggtgatgtctgtgtgcctgcgggtggaactgtacgggtgcctgtggcgcgatggcctgctctcttacacagcaccggtcgggcagacaatgtatttgtccgaagcagtctaccttaacgacagcacttacgacggacacaccgtggggggtctgcagtatggagggctcgggcagctagcagacggcgtggtcggcttagacgactttcgcaagagtcaggagctgagagtttggcccggctacgactacgtgggctggagcaaccacagttttagctcgggctacgtggagatggaattcgaattcgatagattgcgggcctttcaagctatgcaagtccattgcaataacatgcatactcttggggcccgtttgccagggggagtggaatgccggttcaggcgaggccccgccatggcatgggaaggagagccaatgagacataacttgggcggaaacctgggcgatccgcgcgcccgtgctgtctcagtgcctctagggggaagagtagcacggttcctgcaatgcagattcctcttcgccggtccctggttgctgttcagcgagatttcattcattagtgacgtggtcaataactcgagtcctgctctgggcggcacattccccccggctccctggtggccgccaggcccgccgcctacgaatttcagcagtctggaactggaaccgcgaggccagcagcctgtcgccaaggccgaaggttcaccaacggccatactaattggctgcttagtagcaatcatactattgcttctattaattattgcgctcatgctctggcgtctccattggcggaggctcttgtctaaagccgagagaagagttctcgaagaagaacttacagtgcacctgagtgttcccggggataccattctgatcaataatcggcctgggccgcgagagcccccaccgtatcaggaaccccggcctcgcggaaaccctccccattccgccccatgcgtcccaaacgggagcgcttacagcggagactacatggaaccagaaaaaccaggagctcctctccttccgccgccaccccaaaattccgtaccgcattatgccgaggccgacattgttaccctccagggcgtcactggaggaaatacttatgccgtgcccgccctgccccccggagccgtaggggatggcccaccaagggttgactttccaaggtccaggctgcgttttaaggaaaaactaggcgagggccagttcggagaagtccatctgtgcgaggtggatagcccgcaggatctggtctcactggactttcctttgaatgttcgcaaaggccatcctctcctggtcgctgttaaaatattgaggcccgacgctactaaaaatgccagaaacgacttcctgaaggaggttaagatcatgtccagacttaaagacccaaacatcattcgcctcctaggggtgtgcgttcaagacgatccattgtgcatgattaccgactacatggaaaatggcgatttgaatcagttcctctccgcacaccaactagaggacaaggctgccgaaggggcgcctggagatggccaggcagcccagggaccaacaattagttatccaatgcttttacatgtagcggcccagattgcctctggaatgcgctatctcgccaccttgaatttcgtgcacagggatctggcgacccggaactgtcttgtgggggaaaacttcacaatcaagatcgccgacttcgggatgtcgcgaaatctgtacgctggcgattactatcgcgtgcagggccgggccgtgctgccaatccgatggatggcctgggaatgcattttgatggggaaattcaccacggccagtgatgtatgggcattcggcgtcactctatgggaggttctaatgctgtgcagggcgcagccttttggccagctcacagacgagcaggtgatagagaatgctggcgaattctttcgggaccaggggcggcaagtgtatctcagccggccacccgcatgcccacagggcctgtatgagttgatgctgcggtgttggtcaagagagtcggagcagaggccaccattctcacagctgcatcgcttcctggcggaagatgccctcaataccgtttag

SEQ ID NO: 9432 - DNA, 2631 bp, synthetic construct
  misc_feature 1..2631: note = source = /note="Description of Artificial Sequence: Synthetic coding sequence"
  source 1..2631: mol_type = other DNA
atgggccccgaggccctgagcagcctgctgctgctgctgctggtggcttcaggagatgcggatatgaaggggcactttgaccccgcaaaatgccgctacgcattgggtatgcaggatcgaactattcctgatagtgacatcagtgcctcgtcaagttggagcgactccaccgccgcaagacactcccgcctggagagctccgacggcgacggggcctggtgcccagcgggatccgtgttccctaaagaggaagaatatctgcaggtagacctacagcgactgcatctggtggcacttgtggggacgcagggaaggcacgcagggggcctcggcaaggagtttagtcggagttacagactgcggtattcgcgagacggcaggcggtggatggggtggaaggacagatggggacaggaagtcatctcgggcaacgaagatccggaaggggttgtgctgaaagatctgggaccacccatggtcgcaaggcttgtccggttttaccctcgagctgacagagttatgtccgtgtgcctgcgagtcgaactgtatggctgcctgtggcgggatggcctattatcttatacagctcccgtggggcagaccatgtatttaagtgaagctgtgtaccttaatgactcaacgtatgacggacacacggtcgggggactacaatacggcggactgggacagctcgctgacggggttgtgggccttgatgattttagaaagagccaggagttacgtgtgtggccaggatacgattatgtgggatggtccaaccatagcttctctagtggttatgtagaaatggaattcgagttcgaccggctcagagcattccaggcgatgcaggtccactgtaataacatgcacacattgggcgcccggctacctggcggtgtggagtgcaggttcaggagagggccagcaatggcttgggaaggcgagcccatgaggcacaacctgggcgggaacctgggtgaccccagagccagggcagtaagcgtaccacttgggggcagagtcgcacggttcctgcagtgtcgctttttgttcgcaggaccttggctgttgttctccgaaatatcatttattagtgatgtggtgaataatagctcccccgcactgggcggaaccttccctcctgccccatggtggcctccagggccccccccaacaaatttttcttcattagagttggagccacgggggcagcaacccgtggcaaaagccgagggcagtcctactgcaatcctcatcgggtgtttggtggcaatcatcttgctgttgttgcttattatcgccctgatgctttggagactgcattggcgacgtcttctgagcaaagctgagcgacgtgtgctcgaggaagagctgacagtgcatctctccgtcccaggagacaccattctcattaacaaccgccccgggccacgggaacctccgccctaccaggagcccagaccaaggggcaatccacctcactccgctccctgcgtacccaacggctccgcctacagtggggattacatggagccagagaagcccggagccccactcctacccccccccccgcagaatagcgtgcctcactatgccgaagccgatatcgtcaccctgcagggcgtgaccggaggcaacacctatgccgtaccagctttacccccgggtgccgtgggagacgggcctccaagggtggactttccccgatcccgactgcgattcaaagagaaattgggcgagggccaattcggggaggttcacctgtgtgaagtggactcaccccaggacctcgttagtctggatttccctctaaacgtccgcaaagggcatccgctgctggtcgcagtcaaaattctgcgtcctgatgccactaaaaatgctaggaatgacttccttaaggaggtgaagatcatgagccgactgaaagatcccaatattattcggctactgggggtctgtgtgcaggatgatccactctgcatgatcaccgactacatggagaatggtgatttgaatcagttcctctcggcccaccagctcgaagataaggctgcagagggggctccaggtgacggtcaagcagcacaaggtcctaccatcagctacccaatgctgctacacgtggccgcacagatcgcgtcaggcatgcgctatttggccacactcaatttcgtgcatagagatctggccaccagaaattgtctagtaggtgaaaacttcaccattaagattgcggatttcggaatgtccaggaacctatatgccggcgattattaccgagtgcagggtcgcgccgttctgcccattaggtggatggcttgggaatgtatccttatgggaaaatttaccacagcctctgacgtgtgggccttcggagtcacgttgtgggaagtgctgatgttgtgtagagctcagccgttcggccagctgaccgacgagcaggtgattgagaacgcaggtgagttcttccgcgaccagggccgtcaagtttatttgagcagacctccggcgtgcccccaaggtctgtatgaactgatgctgcggtgctggtcccgagagagcgagcagcgcccacctttctctcagctccatagattcttggcagaagacgctttgaatacagtttag

SEQ ID NO: 9433 - DNA, 2742 bp, synthetic construct
  misc_feature 1..2742: note = source = /note="Description of Artificial Sequence: Synthetic coding sequence"
  source 1..2742: mol_type = other DNA
atgggccccgaggccctgagcagcctgctgctgctgctgctggtggcctccggcgatgccgacatgaagggtcattttgatcctgccaaatgtcgctacgccctaggcatgcaggaccggaccatcccggactccgatatctcagctagctcttcctggagtgacagtaccgcggccaggcacagtcggttggaatcatccgacggcgatggcgcttggtgtcctgctggcagtgtgttccccaaagaggaggagtacctgcaggttgacttacaacgcctgcacctggtggccttggtcgggacccagggccgtcatgcggggggtctgggaaaggaatttagcagatcataccgccttcgctatagtcgagacgggcggcggtggatgggctggaaagaccgctgggggcaggaagtcatcagcggcaacgaggaccccgagggagtagtgctgaaggatctcggcccaccgatggttgcccgcttggtgcggttctatcctagagccgaccgagttatgagtgtctgcctcagggtagaactgtatggctgcctttggagagatggactgctgtcttacacagctccagtcgggcagacaatgtatttgagcgaagccgtgtacttaaatgactctacttatgacgggcacacagtcggtggtctgcaatatggcggcctggggcagctcgccgatggagtggtgggactcgatgatttccggaagtcacaggaattgcgggtttggccaggctacgattacgtgggatggtctaatcacagcttttccagcggctacgtcgagatggagttcgagtttgacaggctgcgcgcctttcaggcaatgcaagttcactgcaacaatatgcacaccctgggtgctaggctgccaggaggggtcgagtgtcggttccgaagagggccagccatggcctgggagggcgagcctatgcgccacaatctgggcggtaacctgggagatccgagggcgagagccgtctctgtcccgctcggaggtcgagtggctagatttctgcagtgccgcttcttgttcgcggggccatggctgctgttcagcgaaatctcattcatttcagatgtggtgaataactcctcccccgccctcggcggtactttccctccagctccttggtggccccctggcccccctccgacaaacttcagctcactggaattagagccacggggacagcagccggtcgccaaggctgaaggctctccaactgcaatccttatcggttgtttagtcgccatcatactgctgttgttattaatcatcgccctcatgctctggagactccactggcgaagactgttgagtaaagccgaaaggcgggtgctggaggaagaattaaccgttcatctgtctgtgccaggggacacaatactgattaataacaggcccgggcccagggagccacccccgtatcaggaacccagaccccggggtaatccgccccactcagcgccatgtgtacccaatggaagcgccctactgctttcaaacccagcctatcgtctccttctcgctacctatgctagaccacctcggggccccggacccccaacccccgcatgggcgaaacccactaatacgcaagcctatagcggggattatatggaacccgaaaagcctggagccccactgttgcctcctcctcctcagaactccgtgccccattatgctgaggccgatatcgtgacgcttcagggcgtaacagggggtaatacctatgccgtgcccgcactcccccccggagcagtaggagatggacccccccgggtcgacttccctaggtctagattgaggttcaaggaaaagctgggagagggtcagttcggagaagttcacctttgtgaggtagacagtccacaggacctggtgtcgttggactttcccttaaatgtgaggaaaggacacccgctgctcgtggccgtcaagattttgcggcccgatgcaaccaaaaacgcccgcaacgacttcctgaaagaggtgaagataatgtcacgcttgaaggaccctaatattatcagacttctcggagtgtgcgtgcaagatgatcctctgtgcatgatcacagattatatggagaatggcgacctgaatcagtttctttccgcacatcagctcgaggacaaagccgccgagggtgcacccggcgatggccaggctgcgcaggggcccacaatcagctatccaatgctgctgcacgtggccgcacagatcgccagcggtatgcggtacttggccactctcaattttgtacaccgagacctagctacaaggaattgtttggttggggagaatttcacaatcaaaatcgcagactttggcatgagccggaacctgtacgccggcgattactatcgggttcaaggaagagcagtgcttcctatacggtggatggcctgggagtgtatcctgatgggaaagtttaccaccgcttcggacgtgtgggcgtttggcgtcacgctctgggaggtcctcatgctctgccgcgcgcagcctttcggacagctaactgacgagcaggtgatcgagaatgcaggggaattctttcgcgatcaggggagacaggtgtacctgagccggccacccgcctgtccacagggtttgtacgagttgatgctgcgctgctggagccgagagtcggagcagaggcctccgttttctcagttacatcgattccttgcagaagacgcgttgaatacggtgtag

SEQ ID NO: 9434 - DNA, 2742 bp, synthetic construct
  misc_feature 1..2742: note = source = /note="Description of Artificial Sequence: Synthetic coding sequence"
  source 1..2742: mol_type = other DNA
atgggccccgaggccctgagcagcctgctgctgctgctgctggtggcttctggcgatgcggacatgaaaggtcatttcgaccctgcaaagtgcaggtatgcccttggcatgcaggacaggactatccctgactcagacatcagcgccagctcgagttggtccgacagtacagcagcccgacacagccgactggagagctcggatggcgatggagcatggtgcccggcaggaagtgtgtttcccaaagaggaagagtacttacaggtcgacttgcagcggttgcacctagtagcattagttgggacacagggccgccacgccggcgggcttggaaaggagttctcaaggagctatcgacttaggtacagccgagacggcagacgctggatgggatggaaagatagatggggtcaagaagtgatctccgggaacgaggatcccgaaggcgttgtcctgaaagatttaggacctcctatggtcgcgaggttggtgcgtttctacccacgggccgatcgggtaatgagtgtatgtctcagagtcgagctgtacggttgcttatggagggacgggctcctttcttatacggcacccgttggccagacgatgtatctgtcagaggctgtgtatcttaacgattctacctatgacggacacaccgtcggaggactgcagtacggtggcttaggccagttggcagatggcgtggtaggactggatgactttcgaaagagccaggaattgcgcgtatggccaggatatgattatgttggatggagcaatcacagcttcagcagcggttatgtcgaaatggagttcgagttcgacaggctaagagcgttccaagcaatgcaggtacactgtaataatatgcacacactgggggcacggctgcccggaggtgtcgagtgtcgtttccgtcggggtccggccatggcttgggagggcgaacccatgcgacataacctcgggggtaacctcggggacccgcgagccagggctgtctccgtgcctttgggcgggagagttgctcggttcctgcaatgtcggttcctctttgcaggcccctggttactgttttccgagattagcttcatctctgatgtggtgaataattcaagcccagctcttgggggcacattcccgcccgccccatggtggccccctggcccaccgccgacgaattttagctcgctggagcttgagcctaggggtcagcagccagttgctaaagcagaagggagcccaacagctattcttattggttgcctggtggctataatcttgctcctgctgctgatcattgccttaatgctgtggagactgcattggagacgcctccttagtaaggccgagcgacgcgttctggaggaagagctgactgtgcatctttccgtcccaggggacaccatcctaattaataacaggcccgggccccgagaacccccaccttaccaagagccacggccccgcggcaatccacctcattctgcaccctgtgtgccgaacgggagcgctctcttgctcagcaatcccgcgtataggttattgttggccacctacgcccgtcccccgaggggacccggaccaccaacacctgcctgggcaaagccaacgaacacccaggcctacagcggagattatatggaaccggaaaagccaggagcccctctcttgcctccaccccctcaaaacagcgttccacattatgcagaggccgatatcgtcactcttcagggcgtcaccgggggcaacacttatgccgtgcctgcactgcctcccggtgcagtaggggacggacccccacgcgtggacttccccaggtcgcggctgagatttaaggagaagttaggagaggggcaattcggcgaagttcatttgtgcgaagtggactccccccaagacctagtgtcgcttgactttccgctcaatgtacggaagggccacccactgctggttgccgtaaagatccttagacccgatgcaacaaaaaacgcccggaatgacttcctcaaagaggtgaagatcatgtcaaggttgaaggaccccaatattattcgcctacttggtgtctgcgttcaggatgacccactctgtatgattaccgattatatggagaacggagacctgaaccagttcctcagtgctcaccagctggaggataaggccgcagaaggcgctcctggagatggacaagcagcccagggccccacgatttcgtaccccatgctgctgcacgtggcagcccaaatagctagcggcatgcgctacctggccaccctcaatttcgtccacagagatttagccacccggaactgtctcgtgggcgaaaattttacaatcaagatcgccgacttcggaatgtccaggaacctgtatgcgggggattattaccgtgtccaggggcgcgcagtcctaccaataaggtggatggcgtgggaatgcatcttgatgggcaagttcacaactgcaagtgatgtgtgggccttcggcgttactttatgggaggtgctgatgctgtgccgcgctcaaccttttggccagctaaccgacgaacaggtcattgagaacgctggtgagttctttcgagatcagggaagacaggtctatcttagccgtccacccgcttgtcctcagggtttatacgagcttatgctgaggtgctggagccgggagtccgaacaacgacctccctttagccagctgcacaggtttctcgctgaggacgccctcaatacggtgtag

SEQ ID NO: 9435 - DNA, 309 bp, synthetic construct
  misc_feature 1..309: note = source = /note="Description of Artificial Sequence: Synthetic coding sequence"
  source 1..309: mol_type = other DNA
atgagcgtgatgaagccctgcctgatgaccatcgccatcctgatgattctggcccagaagacaccaggaggtctatttcgcagccacaacggcaagtccagggagccctggaatccgtgtgagctgtatcaaggcatgtgtcggaatgcatgcagggaatatgagatccagtatctgacatgccccaatgaccagaagtgctgtctgaaactcagcgtgaaaatcacttcgtctaagaacgtcaaggaagactacgactctaatagcaatctgtcggtgacgaacagctccagctactctcatatctag

SEQ ID NO: 9436 - DNA, 267 bp, synthetic construct
  misc_feature 1..267: note = source = /note="Description of Artificial Sequence: Synthetic coding sequence"
  source 1..267: mol_type = other DNA
atgctgcccgaccacttcagccccctgagcggcgacatcaagctgagtgtactagcgctggtggttttagtggtcctcgctcagacagccccagacggatggatacgacgctgctactatgggacaggacggtgcagaaagagctgcaaagaaatcgaaaggaagaaggagaaatgcggagagaagcatatttgctgcgttcctaaggaaaaggacaagctcagccacatacatgatcaaaaggagactagcgagctgtatatttag

SEQ ID NO: 9437 - DNA, 1401 bp, synthetic construct
  misc_feature 1..1401: note = source = /note="Description of Artificial Sequence: Synthetic coding sequence"
  source 1..1401: mol_type = other DNA
atgaagccccccctgctggtgttcatcgtgtgcctgctgtggctgaaagatagccactgtgctcctacttggaaggacaagactgctatctccgagaacctaaagtccttcagcgaagtgggagaaatcgacgcagacgaggaagttaaaaaggcactgacaggcattaaacaaatgaagatcatgatggaaagaaaggagaaagagcatactaaccttatgtccacattaaagaaatgccgtgaagaaaagcaggaggccctcaaactgttaaacgaagtgcaggaacatctggaggaagaagagaggctgtgtcgcgagtccctagctgattcttggggcgagtgccgatcatgcctagagaacaattgcatgcgcatctatactacttgtcagccgagttggtcctccgttaagaacaaaattgaaaggttctttcggaagatctatcagtttctgttcccattccatgaggataatgagaaagacctgcctatctccgaaaaacttatcgaggaagacgctcaactgacccagatggaggacgtctttagtcagctcactgtggacgtgaatagcttgtttaataggagcttcaatgtgttccggcagatgcagcaggagttcgaccagactttccaaagtcactttatcagtgatacagacttaaccgagccttactttttccctgcctttagtaaggagccaatgaccaaagcggatcttgagcagtgctgggatattcctaatttcttccagcttttctgcaactttagtgtcagcatctacgaatctgtcagtgaaaccataacaaaaatgctcaaggcaattgaggacctgcccaagcaggataaggctccagaccacggtggactgatctccaagatgttgccaggtcaggatcgggggctgtgtggagaattggatcaaaatctctctcggtgctttaagtttcatgaaaagtgccagaaatgccaagctcacctcagtgaggattgccctgacgtaccagccctgcacaccgagttggacgaggccattcgactagtgaacgtgagtaatcagcagtacggacaaatactccagatgacaagaaaacacctcgaagacacagcatatctcgtggaaaaaatgcgtggccagttcggatgggtgtccgagctggctaatcaagcaccagaaaccgagatcatcttcaactctattcaggtggtcccccggatccatgagggaaatatttcaaagcaggacgagacaatgatgaccgatctaagcattcttcctagcagcaactttactctgaagattcctctggaggaaagcgccgagagcagtaatttcatcggatatgtcgtcgctaaggctttacagcattttaaagagcacttcaaaacatggtag

SEQ ID NO: 9438 - DNA, 207 bp, synthetic construct
  misc_feature 1..207: note = source = /note="Description of Artificial Sequence: Synthetic coding sequence"
  source 1..207: mol_type = other DNA
atgaagctgtgcgtgaccgtgctgagcctgctggtgctggtggccgcattttgctcacttgcactaagtgcacctacaaagtcgagcgaatggaagctccagggcgtctgtttccagtgctgcagtggaaaagaccccatacatcagtcttgtcccacgtggacgatggtgcgccaaagaaaaatgcctactacaggcaagggctag

SEQ ID NO: 9439 - DNA, 420 bp, synthetic construct
  misc_feature 1..420: note = source = /note="Description of Artificial Sequence: Synthetic coding sequence"
  source 1..420: mol_type = other DNA
atgtacaagctggccagctgctgcctgctgttcatcggcttcctgaaccccctgctgagcctcccgctgttagacagccgggaaatttctttccagttatccgcaccacatgaggacgcacgcttgactccagaggagctagagagagctagtctgctgcagatcctgcccgaaatgttgggtgccgagcggggcgatatattaagaaaggccgatagcagcaccaatatctttaacccgcgggggaatttgagaaagtttcaggacttctctggccaggaccctaacatactactgtcacacctgctcgcaaggatatggaagccatacaaaaagcaacgccggaaactgaggcaggatcttcgcctttggaagaaggagcctggcctcagaattttcaaaaattacgtctatatctag

SEQ ID NO: 9440 - DNA, 1974 bp, synthetic construct
  misc_feature 1..1974: note = source = /note="Description of Artificial Sequence: Synthetic coding sequence"
  source 1..1974: mol_type = other DNA
atgcggaccgtggtgctgaccatgaaggccagcgtgatcgagatgttcctcgtcttgctggttacaggcgtgcactcaaacaaagaaactgctaagaagatcaagaggcccaagtttactgtcccgcagatcaattgtgatgttaaagccggaaaaatcatcgatccagaatttatcgttaagtgtccagcagggtgccaggaccccaagtatcatgtctacggcaccgatgtgtacgctagttattcgtctgtgtgcggggccgcagtccacagtggggttctggacaatagcggcggcaaaatcctggtgagaaaggtcgcggggcaatctgggtataagggctcttacagtaatggggtgcagtctctctcgctgccccgctggcgagagtcctttattgtcctggaatcaaagccaaagaagggagttacctatcctagcgcgctgacctattccagtagtaagagtcccgctgctcaggctggagaaaccactaaagcttatcagcgaccgccaatcccaggaacaaccgcccagcccgtgaccctcatgcagctcttggccgtcaccgtagccgtggctacacctaccactctcccacgcccttccccatcagcagcatcgactaccagtatcccccggccccagtcagtgggacacagaagccaagagatggatctgtggtctacagcgacatacacatccagccaaaaccggccccgggccgaccctggcatccaaagacaggacccgtcaggggccgcatttcagaagcccgtaggggccgacgtgtctctggattgcaaaatagacctctccttcctcatcgacgggagcacttctattggcaaaaggcgcttccggattcaaaaacaactgctggcagatgtggcccaggccctagatattggtcctgctgggcctctgatgggcgtggttcagtatggcgataatccagccacccactttaatctgaaaacccacacaaattctcgggatttgaaaacagccattgagaagattacgcagagaggggggcttagcaacgtcggccgcgccattagcttcgtcacgaagaatttcttcagtaaggctaatggtaaccgcagcggagctccgaatgtcgtggtagtgatggtggatggttggcccacagacaaggtagaggaggcaagcaggctggcacgcgagagcggcatcaacatattctttataaccattgagggcgctgcggaaaatgaaaaacagtatgtggtcgagcctaacttcgcgaataaagcggtctgcagaactaatgggttctattctctgcacgtgcagtcttggttcgggcttcataagaccttgcagcccctggtgaaacgtgtttgcgataccgaccgcctagcctgttcaaagacctgtctaaactcagccgacatcggcttcgttatcgatggctcaagtagtgtgggaactgggaatttccgcactgtcctccagttcgtcaccaacctgactaaggagttcgaaatttctgatacagacacccggattggcgccgtgcagtacacctatgagcagcggctggagttcgggttcgataaatacagctctaaaccagacatcctgaatgcaatcaagcgtgtgggatactggagtggaggaacatccactggggcagcgattaatttcgcactggaacagctgtttaagaagtctaaacctaataaacggaagctgatgattttaattacggatggccggtcctatgatgatgttagaatacccgcaatggcagctcatctgaagggcgtgatcacctacgcgataggagtcgcctgggcggcacaggaggagctagaggtgatagccactcaccccgccagagaccacagtttctttgtggatgagttcgacaacctacatcagtatgtccctcggatcatccagaatatctgcactgagtttaattcgcagcctagaaactag

SEQ ID NO: 9441 - DNA, 3975 bp, synthetic construct
  misc_feature 1..3975: note = source = /note="Description of Artificial Sequence: Synthetic coding sequence"
  source 1..3975: mol_type = other DNA
atgcggcacggcgtggcctgggccctgctggtggccgccgccctgggactcggagcaagaggggtgcggggagcagttgccctggcagacttttaccctttcggagcggagaggggagacgcagttacccctaagcaagacgacggtggctcaggcctgagaccactgagcgtgccgtttcccttctttggagctgagcactccgggctctatgtgaacaacaacggcatcatttcttttcttaaggaagtcagtcaatttacgccggttgcgttccccatcgccaaggatagatgtgtcgtcgctgcgttttgggccgatgtggataaccgaagggccggggacgtgtactatcgcgaagcaacagaccccgccatgctgagacgcgccacagaggacgttaggcattacttccccgaactgctggacttcaatgcaacttgggtgtttgtagcaacttggtaccgggtgacttttttcggagggtcaagctcctcgcccgtgaatactttccagactgtactcatcaccgatggtaagctgtcattcacaattttcaactatgaatccatcgtctggactaccgggacacatgcctcttccggcggtaatgcgactgggctagggggtattgccgcccaggctggctttaatgctggtgacgggcagcgctattttagcattccaggtagtcgcacagctgacatggcagaagtcgagaccacaaccaatgtgggagtgccagggaggtgggcttttaggatcgacgatgctcaggtgagagtaggcggttgtggacacactaccagcgtgtgtctagcccttcgtccttgcctcaacggcggcaagtgcattgacgattgtgttactggtaaccctagctacacctgctcatgcctatccggttttactgggaggcgatgtcatctcgatgtcaacgagtgcgcctcccagccctgtcaaaatggtggcacatgtactcacggcataaactcattcagatgccaatgtcctgccggcttcggcgggcccacttgcgagactgcccagagcccctgtgacacgaaggagtgccagcacggtggccagtgccaggttgagaacggaagcgcagtttgcgtgtgtcaggctggctacaccggagccgcttgcgagatggatgtcgatgactgctcacctgatccatgtttgaacggcggatcctgtgtggacttggtgggaaattatacttgtctgtgcgctgagccctttaaaggactgaggtgtgaaacaggcgaccacccagtacccgacgcctgcctgagcgcaccgtgtcacaacgggggaacatgcgtggatgccgaccaaggatatgtctgtgaatgtcccgaagggttcatgggtcttgattgcagggagagagtacctgacgattgtgaatgtcggaacggtggaagatgtctgggagccaatacgacgttgtgccagtgtcccctcggtttcttcggattgctgtgcgagtttgaaattacggctatgccctgcaacatgaatacccagtgcccagacggtggttattgtatggaacatggtggctcctacctgtgtgtgtgtcataccgaccacaacgcatcgcacagtctgcccagcccatgcgacagtgacccctgctttaatggaggtagctgtgacgcccacgatgatagctacacctgtgaatgccctcggggcttccacggcaaacactgtgagaaagcccgcccacatctctgttcctcagggccgtgtagaaatggggggacgtgcaaagaggctggaggcgagtaccactgttcctgtccatacagattcacaggacggcactgtgaaatcggaaagccagattcttgtgcatccgggccttgtcacaacggcggtacatgtttccactacatcggaaaatacaagtgtgactgccctccaggctttagcggtcgccactgcgagattgctccaagcccttgttttagaagcccctgcgttaacggaggaacctgcgaggatcgagataccgattttttctgccattgccaggcagggtacatggggcgccgttgtcaggccgaggtcgattgcggcccaccagaagaggtgaagcatgccaccctgagatttaacggcacccggttgggagccgtcgcactctacgcttgcgatcgaggatactctctgtccgccccatcgcgaattcgagtgtgtcagccccatggcgtctggtcagaaccaccccagtgcctggagattgatgagtgtcgctcccagccctgtctgcacggcgggtcctgtcaggaccgcgtcgctggctatctctgtctgtgcagtacgggctacgagggggcccattgtgaattggagcgcgacgaatgccgggcccatccgtgccgaaacggtgggtcatgtcgtaatctccctggcgcgtacgtctgtcgttgcccggccggcttcgtgggagtgcattgcgaaacagaagtggatgcctgtgactcttccccttgccaacatggaggccgctgcgagagcggcggtggagcttatttgtgcgtctgccccgaatcctttttcggctaccattgtgagacagtttccgatccctgttttagttccccatgcggcggcaggggttactgcctcgcatctaacggctcccacagttgcacctgcaaggtaggctacactggggaagactgcgctaaggagttgtttccacccacggctttaaaaatggaaagagtggaggaaagcggggtatctatatcttggaatccacccaacgggcccgcagctaggcaaatgcttgacggttatgctgtgacttacgtatcctcagacggatcatataggagaactgattttgtggaccgcacacgctcaagccaccagcttcaggcccttgcagccggtagagcatacaatatatctgtattttcagttaaacggaactctaataacaaaaatgatatcagcaggcccgctgtgttgcttgcaaggacacgcccccgtccggttgaggggtttgaggtgacgaacgtgactgctagtactatttctgtacagtgggccctgcatcgaatcaggcacgccactgtaagtggcgtgagagtcagcatccggcaccctgaagcccttcgtgaccaggccacagatgtggacagatccgtggacagattcaccttccgtgccctgctgcctggaaagagatatacaatccaactgacaaccctgtccgggttgcgcggagaggaacatcccacagaatcacttgccaccgcccccacacatgtttggacaaggcctttgcctcctgccaatctgaccgcggcaagggtgaccgccacaagcgcccatgtggtctgggatgcccccacgcctggctccctgttggaagcttacgtgatcaacgttacgacgtcacagtcgacaaaatctcgctacgtgcctaacggcaagctggcctcatatactgtgcgagatcttctgcccggtcggcggtaccagctgagtgtaatcgctgtgcagagcactgaactggggccgcagcattccgaacctgcccatctctatatcataactagccctcgggacggtgccgacaggagatggcatcagggaggccatcacccccgggtgcttaaaaacaggccgccgccagctaggctgcctgaactgcggttgttgaacgatcactccgcccctgaaacacccacacagccccccaggttcagcgaattagtcgacggacgagggcgcgtctcagccaggttcggcgggagtccttctaaagctgccacagtaaggtcccagccaaccgcaagcgcgcaactcgaaaacatggaagaagcgcccaagcgggttagtctggctctccagctcccggagcacggatccaaagatatcggaagcgagagtgctgcactcgtgggaacgctaggtctgaccgattgttcacaaggaccatag

SEQ ID NO: 9442 - DNA, 732 bp, synthetic construct
  misc_feature 1..732: note = source = /note="Description of Artificial Sequence: Synthetic coding sequence"
  source 1..732: mol_type = other DNA
atgggcatcttcctggtgtacgtgggcttcgtgttcttcagcgtgttgtatgtccagcaggggctgtcgagtcaggcaaagtttacagaattcccaagaaatgtgacagctactgagggccagaatgtcgaaatgagctgcgccttccagagtggctctgcttctgtgtaccttgagatccagtggtggttcctgcgaggaccggaggatctggaccccggcgctgagggagccggcgcacaagtggagctgttgcccgaccgtgaccctgattccgacggcacaaaaatcagtaccgtgaaggtgcaaggcaatgatatcagccataagcttcagatcagcaaggtgcgaaagaaggacgagggactgtacgagtgtagagttactgatgccaattatggcgagcttcaggagcacaaggcacaagcctacctcaaagtcaacgctaacagtcacgcacgccgaatgcaagcctttgaggcttctccaatgtggctgcaggacatgaagcctaggaaaaatgttagtgcagccattccctctagcattcatggatcggctaatcagaggacgcacagtacctccagcccccaggtcgtggccaagattcccaaacagtcacctcagtcggggatggaaacccactttgaaccgtttatcctccctttaactaacgccccacagaaggggcagagttaccgcgttgacaggtttatgaacggcgacttctag

SEQ ID NO: 9443 - DNA, 1218 bp, synthetic construct
  misc_feature 1..1218: note = source = /note="Description of Artificial Sequence: Synthetic coding sequence"
  source 1..1218: mol_type = other DNA
atgtggtacgtgagcacccggggcgtggccccccgggtgaacttcgagggggccctttttagcggctatgcaccggatggcggcctgtttatgcccgaggaactgcctcagcttgaccgcggcaccctttgccagtggtcaaccctgtcctatcccggcctagtcaaagagctgtgcgcccttttcattgggagcgaacttcttcccaaggatgaactgaatgacttaattgatagagcgttcagtcggttcaggcacagggaggttgtgcatttgagccgcctgcgcaacgggttgaatgtgctggaattatggcatggagtgacatacgccttcaaagatctctcactaagctgcactactcagtttttgcaatatttcctggagaaaagggaaaaacatgtgacagtggtagtcggtaccagtggtgataccggttcagcggccattgagagtgtgcagggtgcaaagaacatggacattattgtactgctgcccaaagggcattgcaccaagatccaggagctgcagatgactaccgtgcttaaacagaatgttcatgtgtttggggtggaaggcaactctgatgagttggatgagccaataaaaaccgtgtttgctgacgtggcctttgttaaaaagcacaatctaatgtcattgaattctattaattggtctcgcgtcctggtacagatggctcatcatttcttcgcctactttcagtgtaccccgagccttgacacacacccccttccactggtcgaagtggttgtaccaaccggagcagctggcaacctggctgccgggtacatcgctcaaaagattggtctccccatacgccttgttgtagctgtaaacagaaacgacattatccaccgaaccgtacagcagggcgattttagcctaagcgaagctgtgaagagcacccttgcgtccgccatggatatccaggttccttacaatatggagagagtcttctggcttctgtccgggtccgattctcaggtgactcgcgctctgatggagcagttcgagaggacccagtccgttaacctgccaaaagagcttcacagtaaatgggagcgtcaggactatgagaagatggcagtcatggaatgcgacggatgctgtgtcgagctgtgcctggggaactgcgggcctcgtcgcggctctgtgaccgatatccctggtaccgctatggtcagagggggaggatag

SEQ ID NO: 9444 - DNA, 573 bp, synthetic construct
  misc_feature 1..573: note = source = /note="Description of Artificial Sequence: Synthetic coding sequence"
  source 1..573: mol_type = other DNA
atgcggaccgtggtgctgaccatgaaggccagcgtgatcgagatgttcctggtgctcctggtcacgggagtccatagtaacaaggagaccgcaaagaaaattaaacgccctaagtttactgtgccacagattaactgcgacgttaaggcgggaaaaatcatcgacccagagttcattgtgaaatgcccggcaggatgtcaggatcctaagtaccacgtgtacggcaccgacgtgtatgccagctacagctctgtgtgtggcgccgccgtacacagtggagttctggacaattcaggcggtaagatattagtacggaaggtggccgggcagtctggctataagggctcttacagcaacggtgtgcagagtctctccctcccgcgttggagagaatccttcattgtgctcgaatctaagcccaagaagggcgtgacgtaccctagtgctctgacatacagttctagtaagtctccagcggctcaggcagacctgtggagcacggctacttacacatctagtcagaatcggcctcgggctgatcctgttcagcgccaaccttgttacagtttgtag

SEQ ID NO: 9445 - DNA, 399 bp, synthetic construct
  misc_feature 1..399: note = source = /note="Description of Artificial Sequence: Synthetic coding sequence"
  source 1..399: mol_type = other DNA
atggcccccagcccccggaccggcagccggcaggacgccaccgccttgcctagcatgtctagtaccttctgggcctttatgatccttgcctcactgctgatcgcctactgcagtcagctggcggctggcacgtgcgaaatcgtcacgcttgaccgcgactcttcccaaccccggaggactattgcgcgccagacagcccgctgcgcatgcagaaagggacagattgcaggtaccactcgtgcaagacccgcttgcgtggatgcaaggatcatcaaaacgaagcagtggtgtgatatgctaccgtgcctggaaggagaggggtgtgatttactaattaatcggtctggatggacctgcacacagccgggcggaagaattaaaactacgacagtgtcttag

SEQ ID NO: 9446 - DNA, 957 bp, synthetic construct
  misc_feature 1..957: note = source = /note="Description of Artificial Sequence: Synthetic coding sequence"
  source 1..957: mol_type = other DNA
atgctgcccctgaccatgaccgtgctgatcctgctgctgctgcccacaggacaggccgctccaaaagacggcgtgaccaggccagattccgaggtccagcatcagcttcttcctaatccttttcagcccggacaggaacaactgggcttgcttcaatcctacctgaaaggccttggaaggaccgaggttcaactggagcatctgtcgcgagaacaagtccttttgtatctgtttgctctgcacgactatgaccaatccggacagctggatggtttagaattgctgtcgatgcttacagccgcgctcgctccaggtgctgcaaactcccccaccaccaaccctgtgatcctgattgtggataaggtgctcgagacccaggacctgaatggggatggcctaatgacaccagcagagctaataaacttccctggtgttgcgcttaggcatgtggagccaggagagcccctcgccccatcgccacaggagccccaggctgtcggtcgtcagtctctactggcaaaatcacctctgcggcaggaaacccaggaggcaccaggccctcgggaggaagctaaaggccaggtcgaggcacggagagaatcactggaccccgtgcaggagcccggcggccaggctgaggccgacggagatgtgccaggacccaggggagaggctgaggggcaggctgaggcaaaaggagacgcacccgggcctcgtggagaggcaggcggccaagcagaggccgagggagacgcccccgggccccggggggaagcggggggccaggctgaagcggaaggagatgctccggggccacggggggaggccgggggccaggcggaagccagggagaatggggaagaagcgaaggaactgcctggagagaccctggaatcaaagaatacccagaacgacttcgaggttcacattgtacaggtggagaacgacgaaatctag

SEQ ID NO: 9447 - DNA, 399 bp, synthetic construct
  misc_feature 1..399: note = source = /note="Description of Artificial Sequence: Synthetic coding sequence"
  source 1..399: mol_type = other DNA
atgctgcccctgaccatgaccgtgctgatcctgctgctgctgcccacaggccaggcggcaccgaaggacggagtcaccagacctgattcagaggtgcagcaccaactcctgcccaatcctttccagcccggacaagagcaactcgggctgctgcagagttatttaaaagggttgggccgaacagaagttcagctcgaacatctctcgagggaacaggtgctcctctatctgtttgcattacacgattacgatcagtccgggcaattggatgggctggaacttctttctatgctcacggcagcccttgcacccggagccgccaattcccctacaaccaatccaggcaatttagacgctcgacttgacggcggcgagaaagcgatgcagccacaatggtag

SEQ ID NO: 9448 - DNA, 732 bp, synthetic construct
  misc_feature 1..732: note = source = /note="Description of Artificial Sequence: Synthetic coding sequence"
  source 1..732: mol_type = other DNA
atgctgctgagcctgctgggcgcctgcgccgtggtgggccccttccacggtccagaatgggagccagtgcaaggcctcctgagccagaaccacagctgtagagacccccagtgttgtggcaacctcctcgttctgtgcctgttcctcgtctggcaagtgaggcactgctggcaccaagtaacacgcacacggttttctacgagaaacgtcattaaggtccctctgcagaagcgggccgtgccctctatgcgatgcgagaccgtgttcaaactgacacccgagtttttttcgccaggcaaatctcgcggcctggacagccagcagtgtgcacaacgacagaggtggggatatagacgttcactccaggagtcctgggcccagaacctgctgagcccccaacatccttgtccaggacccccctcaggggtgcacacgcatagcgagcctatcttctgtaccacatctatcagcaatacatgtctgctgcctcagaatagcagctggaaagcttggcaagtgccctggtgcctgcatgacggccaaacccgcccagcactggatatgtgccaggagatggaacagctgttacttcactcccaagaaagattggtgtccctcgagccggtcatctccgtaaggagccgtccaacaagtatgaccctcactacctccctaccgaatctcctatcagcggagaggcttcagttctgtccgcagcgcgcaccagcttag

SEQ ID NO: 9449 - DNA, 2505 bp, synthetic construct
  misc_feature 1..2505: note = source = /note="Description of Artificial Sequence: Synthetic coding sequence"
  source 1..2505: mol_type = other DNA
atgaagcacaccctggccctgctggcccccctgctgggcctgggccttggcctagccctgtctcagctagccgcgggcgccacagactgtaaatttctcggacctgcagagcacttaactttcaccccagcggcacgtgcgagatggctggcccctcgggtcagggcacctggcctgctcgattctctttatggtactgtcaggcgtttcttaagtgttgtgcagctcaacccctttcctagtgagttagtgaaagccctgcttaacgagctggcgtccgtaaaggtgaacgaggttgtgcgttatgaagccggctacgtggtgtgtgctgtaatcgccggactttatctccttctggtccccaccgccggcctgtgcttctgctgctgccggtgccaccggagatgtggcggacgggttaagaccgagcacaaagctcttgcttgcgagcgggctgccctcatggtttttcttttgctgacaaccctactgctgttaatcggtgtggtgtgtgctttcgtgacaaaccagaggactcacgagcagatgggcccaagcattgaggccatgcccgaaactctactctcgctgtgggggttggtgagtgacgtcccacaggaactgcaggccgtggcccagcaatttagtctaccacaggagcaggtgtccgaagagctcgatggggttggcgtgtctatcggctcagccatacatacgcagttgaggagctcagtttacccactgctggccgctgtcggctcccttggacaggtgcttcaagtcagcgtgcaccacctccagacactgaatgccaccgtggtggagctgcaagcaggccaacaggacctcgagcccgctatccgtgaacatcgggaccgccttctggaactgctgcaggaggcaagatgccagggagactgcgcgggagccctgagctgggccagaactctcgagctgggcgccgacttctcccaggtcccatcggtcgaccatgttctccaccagctcaagggggtccctgaagcaaatttcagctccatggtccaggaggaaaacagtacattcaatgcactgccggccctggcagcaatgcagacatcaagtgtggtccaggagttgaagaaggctgtcgcacaacagccagagggcgtgcggaccttggcagaagggttccccggtctagaagcagctagccggtgggctcaggccctccaagaggtggaggagagttcacgcccttatctccaggaagtgcagcgctatgaaacttatcgatggatcgtaggatgcgtcctttgttccgtggtcttgtttgtcgtgctgtgtaacttgctcggactgaatctggggatttgggggttgtctgcgcgagatgatccttctcatcctgaggcaaagggagaggccggagctaggtttcttatggccggggtaggtttgtcgtttctgttcgccgcacccctgattctccttgtttttgccacctttttggtgggtgggaatgtgcagacccttgtgtgccagagctgggagaacggggagctctttgaatttgccgacacaccggggaacctgccacccagcatgaacttaagtcagcttctggggcttcgtaaaaacatcagcatccaccaagcataccagcagtgcaaggagggtgcagccctttggactgtcctgcagttgaatgacagttacgaccttgaagaacacctggacatcaatcagtatactaacaagttacggcaagaactccaaagcttaaaagtcgatacccagagccttgatcttttgagctcagcggcgagaagggaccttgaggccctccagagctcaggcctgcaacggatccattatcccgatttcctcgtgcagatacagcggccggtcgtcaagacctccatggagcagctggcccaggagctgcaaggccttgctcaagcacaggataattctgtcctagggcaaagattgcaggaggaggctcaaggacttcggaatttacatcaggagaaggtcgtgcctcaacaaagtctggtcgctaaactgaatttatctgtacgtgccctggaaagttctgcgcctaacctacaacttgaaacttccgacgtcctggctaatgtgacatacctgaagggggagctaccggcatgggccgcccgaatcttgcggaacgtgtccgagtgttttctggctagggagatgggttatttctcccagtatgtggcttgggttcgggaggaggtaacccaaagaatcgcaacatgccagccccttagcggagcactggataattcccgtgtcatcctgtgtgatatgatggccgacccatggaatgcgttttggttttgtttagcctggtgcacgttcttcttgataccaagtatcatctttgccgtcaaaacatccaagtatttcaggcctattcggaagagactgtcttccacttcctcagaggaaacccagctgttccatatccccagagtaacctccctgaagctctag

SEQ ID NO: 9450 - DNA, 1185 bp, synthetic construct
  misc_feature 1..1185: note = source = /note="Description of Artificial Sequence: Synthetic coding sequence"
  source 1..1185: mol_type = other DNA
atgtggcggtgccccctgggcctgctgctgctgctgcccctggccggtcatctggctctgggggcacagcaggggagagggaggcgcgagctcgcccccgggctccatctgcgcgggattcgcgatgcgggagggaggtattgtcaggaacaggacctttgttgcaggggaagggcggatgattgcgcactgccttatctgggggcaatctgttattgcgatctgttctgtaaccgcactgttagcgactgctgtccttttccccccatccaggggtgtatgcatggtggccggatctaccccgtactgggtacctactgggataattgcaatcgctgtacgtgccaggaaaaccgccagtggcagtgtgaccaggagccatgtctggttgaccccgacatgattaaggctattaaccaggggaactatggatggcaagccgggaaccactctgctttttgggggatgaccctggatgagggtattaggtatcgcctggggactatccgcccgtcaagctcagtgatgaacatgcacgaaatttatacagtgcttaaccctggcgaagtcttacctaccgcttttgaagcgagcgaaaagtggccaaacttgattcacgaaccacttgaccagggcaactgtgccggaagctgggccttcagcaccgccgcagtggcctctgacagggtttcgattcatagcctaggtcacatgacaccagtactgtcaccccaaaacctgctatcctgtgacacacatcagcaacagggctgtaggggggggcgtttagacggcgcatggtggttccttagaagacgcggagtagtaagtgaccactgctatcccttttctgggcgagagagggacgaagcaggaccggcaccaccctgtatgatgcactcccgcgccatggggcgcggcaaacgccaagccactgctcattgtccaaattcctatgtcaataacaacgatatctatcaggtcacaccagtatatagactgggatcaaatgacaaagaaattatgaaggaactcatggaaaacgggcccgtgcaggccctgatggaggtccatgaggattttttcctctataaaggtggtatctactcacacacgccggtatcgctagggcggccagaacgttaccgtcggcatgggacacattcagtgaaaatcacgggatag

SEQ ID NO: 9451 - DNA, 303 bp, synthetic construct
  misc_feature 1..303: note = source = /note="Description of Artificial Sequence: Synthetic coding sequence"
  source 1..303: mol_type = other DNA
atggccgccgccctggccctggtggccggcgtgctgagcggcgccgttctgccactgtggtctgcattaccccagtacaagaaaaaaatcacggaccggtgctttcaccattccgagtgctatagcggatgctgcctaatggacctcgactccggaggggctttctgcgcaccccgagctcggatcacaatgatatgtctgcctcaaacaaagggcgccacaaatatcatatgcccttgtagaatgggtctgacatgcatttccaaggacctcatgtgctctcgccgatgtcatatgatatag

SEQ ID NO: 9452 - DNA, 978 bp, synthetic construct
  misc_feature 1..978: note = source = /note="Description of Artificial Sequence: Synthetic coding sequence"
  source 1..978: mol_type = other DNA
atgcggctgccccggcgggccgccctgggcctgctgcccctgctgctgctcctgcctcccgcacccgaagcagcaaaaaagcctactccatgccatagatgccggggattagttgacaaatttaaccaaggcatggttgacacagcaaaaaaaaattttgggggtggcaatactgcctgggaggaaaagaccctgtccaaatacgaatcgagcgagattcggctactcgagattctggagggattgtgcgaatcatcagatttcgaatgcaatcagatgctagaagcacaggaggagcacttggaagcatggtggctgcagttaaagagcgagtatccggatctcttcgaatggttctgcgtgaagactttgaaggtttgttgctcacccgggacatacggaccagattgtttagcctgccaaggaggatctcaacgcccctgcagcggcaatgggcactgctccggagacggctctaggcaaggcgatggctcctgccggtgccacatgggttatcaaggacccctgtgtacagattgtatggacggctatttctccagtctcaggaatgagacacatagcatttgtacagcatgtgatgaatcgtgtaaaacatgttccgggctcaccaaccgggactgtggtgaatgtgaagtgggttgggtgcttgacgaaggcgcttgtgttgagtgcgattctagttgtgtgggatgtaccggagagggccctggtaactgcaaagagtgcatttctggatatgcaagggaacacgggcagtgcgccgacgtcgacgagtgtagcttagccgagaaaacgtgtgtgcggaaaaacgagaactgctacaacacccctgggtcctatgtgtgtgtgtgcccagacggctttgaggaaactgaggacgcgtgcgttccccctgccgaggctgaagcgacagagggcgaatctcccacccagcttccaagcagagaggacctatag

SEQ ID NO: 9453 - DNA, 459 bp, synthetic construct
  misc_feature 1..459: note = source = /note="Description of Artificial Sequence: Synthetic coding sequence"
  source 1..459: mol_type = other DNA
atgcggggccccggccaccccctgctgctgggcctgctgctggtgcttggggcagcaggtagaggaagaggaggtgccgagccaagagaacctgccgacggccaggcactgctgcgcctggtcgtcgagcttgtgcaggagctgcgcaaacaccattccgcagaacacaagggtctacaactactcgggcgagactgcgccttaggacgcgcagaagcagcaggattgggaccgagcccagagcagagggttgaaatagtcccacgggatcttcgcatgaaagataagttcctgaagcacctcacgggcccattgtatttcagtcccaagtgctctaagcactttcaccgactctaccacaacactagggattgtacaatacctgcctattataagcgttgcgctcgtctcctgacccggcttgccgttagcccagtgtgcatggaagataaacaatag

SEQ ID NO: 9454 - DNA, 411 bp, synthetic construct
  misc_feature 1..411: note = source = /note="Description of Artificial Sequence: Synthetic coding sequence"
  source 1..411: mol_type = other DNA
atggcccggaccaagcagaccgcccggaagagcaccggcggcaaggcccccaggaagcagctagccacaaaagccgctcgtaaaagtgccccagccactggtggtgttaagaaaccacatagatatcgcccagggaccgttgccctgcgcgagataaggcgatatcagaagtccactgagttgcttatccgaaagctgccttttcaacggctggtcagagagatagcccaggatttcaaaaccgatctgcgcttccagtcctccgctgttatggccttgcaagaagcatccgaggcctaccttgtgggactgttcgaggatactaatctctgtgcaattcatgccaaacgagttactattatgccaaaggacattcagctcgcacgccgaatcaggggagaaagggcctag

SEQ ID NO: 9455 - DNA, 1209 bp, synthetic construct
  misc_feature 1..1209: note = source = /note="Description of Artificial Sequence: Synthetic coding sequence"
  source 1..1209: mol_type = other DNA
atgcggctgccccggcgggccgccctgggcctgctgcccctgctgctattactgccaccagctcccgaggcggccaagaagcccacaccttgccatcgctgccgcgggctagtggacaagttcaatcaaggtatggtggacacagccaaaaaaaatttcggaggtggaaacacagcctgggaagagaaaactctctctaaatacgaaagctccgaaattcgcttgttagagattctggagggtttatgcgagtccagtgattttgagtgcaaccaaatgctagaggcccaagaagaacatctcgaggcttggtggcttcaacttaaaagtgagtatcccgacctcttcgagtggttctgcgtcaaaacactcaaggtgtgttgtagtccagggacctatggccctgactgcctcgcatgccaagggggatcccaaaggccctgctctggaaacggacactgtagcggtgatggaagcaggcaaggagacggctcatgccgatgtcatatgggataccaaggcccactctgtacagactgtatggacggatacttcagttccctgcgcaacgagacacattcaatatgtactgtcaggacagggttgtcagacagctatcctccgtgctgcctgtcgctcggatgctggaggggagtaggacacgcatggatccgaggaagaaatactcatacacaacctggttatagctctcgggtgtggattgccgcttttagccctgcgtgtgatgagagctgcaagacttgctctggactcacaaatcgagactgtggcgagtgtgaagtaggttgggtgcttgacgagggtgcttgcgtcgatgttgacgagtgcgctgccgagcctccaccttgttctgctgctcagttctgtaaaaatgccaatggaagttatacatgcgaagaatgtgatagctcatgcgtaggatgtactggagaagggcctgggaactgcaaagaatgcatctccggatacgcaagagagcatgggcagtgtgcagacgtggacgagtgcagccttgctgagaagacatgcgttcgcaagaacgagaactgttacaatacgcccggaagctatgtgtgcgtttgcccagatggcttcgaagaaaccgaagatgcctgtgtgccaccagccgaggcagaggccaccgagggagagagcccaactcaactccctagccgggaagacctgtag

SEQ ID NO: 9456 - DNA, 633 bp, synthetic construct
  misc_feature 1..633: note = source = /note="Description of Artificial Sequence: Synthetic coding sequence"
  source 1..633: mol_type = other DNA
atgagcgccggcaagatgatgcggaccctgatcaccacccaccccctacccctgctgctactcccccagcagctcctccagctggtccagtttcaagaggtggacaccgattttgacttcccagaggaggacaagaaagaagaattcgaagagtgcttggagaagtttttctcaacggggcccgctcggccacctaccaaagaaaaagtgaaaagaagagttttgatcgagccgggcatgcccctgaatcatatagaatactgtaatcacgagattatggggaaaaacgtctattacaaacacagatgggttgccgagcactattttctccttatgcagtacgatgaactccaaaagatttgctataaccgctttgtgccctgcaaaaatggaatccgaaagtgtaacagaagcaaggggctggttgagggcgtttattgtaatctgaccgaagcttttgagattcctgcctgtaagtacgaatctctttaccgtaaaggatatgtgctcattacttgcagttggcagaacgagatgcagaaaaggatcccccacactatcaatgacttggtagaacccccagagcaccgttcctttctctctgaagatggcgtcttcgttatctcaccatag

SEQ ID NO: 9457 - DNA, 585 bp, synthetic construct
  misc_feature 1..585: note = source = /note="Description of Artificial Sequence: Synthetic coding sequence"
  source 1..585: mol_type = other DNA
atgaccatgcggcacaactggacccccgacctgagccccctgtgggtacttttgctctgtgcacatgtggtgacactgcttgtacgggccactcctgtctcgcaaaccacgactgcagcgactgcctctgtgcggtctacgaaagacccttgtccgtcccaaccgccggtgttccctgccgccaagcaatgcccggccctggaagttacatggccagaggtggaggtgccactgaatggcactttgtccctgtcttgtgtggcatgtagtagattccccaactttagcattttatattggttaggaaatgggtctttcatcgagcacctccctggaagattgtgggagggctctacaagccgagaacgggggtcaacagggactcagctgtgtaaagcgctggtgctggaacagcttacaccagcactgcacagtactaatttctcatgtgtactggtagacccggaacaggtcgtgcagcgacacgtggtgttagctcaactgtgggcggggctgcgagccactttacccccaactcaggaggccctgcccagttcccattcctctccccagcagcagggttag

SEQ ID NO: 9458 - DNA, 4059 bp, synthetic construct
  misc_feature 1..4059: note = source = /note="Description of Artificial Sequence: Synthetic coding sequence"
  source 1..4059: mol_type = other DNA
atgcggcacggcgtggcctgggccctgctggtggccgccgccctgggcctgggtgcccgaggagttaggggagctgtagccctggcagacttctatccttttggcgctgagaggggtgacgcagtgacaccaaagcaggacgacgggggctctggcctgcgacccttgagtgttccattccccttcttcggtgctgagcattctgggctttatgttaataacaacggaataatcagctttctgaaagaagtttctcagttcacaccagtggcattcccaatcgcgaaagatcggtgcgtcgtggccgcattttgggccgatgtggacaacagaagagctggcgacgtgtactacagggaagcaactgaccccgcaatgctcagacgcgccactgaagatgtgcggcactacttcccagagctcttggactttaatgctacctgggtattcgtggccacatggtacagagtcacgttttttggaggctcttccagctctcccgtgaacacattccagactgtcctgatcaccgacggaaaactgagctttactattttcaactacgaaagcatcgtctggactacggggacccacgcctcgtctggaggaaatgccaccggactgggaggaattgccgcccaggctgggttcaatgctggtgacgggcagcggtacttttccattccggggagcaggaccgctgatatggcggaggtggaaactacaactaacgtgggggtgccggggaggtgggcctttagaatcgatgacgcccaggtgagggtaggcggatgcggccataccacttccgtttgcctggccctgcgcccttgcctaaatggtgggaagtgcattgatgattgtgtaacaggaaatcctagctatacttgcagttgcctcagcggattcactggccgcaggtgccacctagacgttaatgaatgcgccagtcaaccgtgtcagaacggaggaacctgcacccacggaatcaactcatttcgctgccagtgcccagccggtttcgggggccccacatgcgagacagcgcagtcaccatgcgacacgaaagagtgccagcacggaggccagtgtcaggtcgagaatggctccgcagtctgcgtgtgccaagctggctataccggtgcagcctgcgagatggacgtggacgactgttctcctgatccatgtctcaacggaggttcatgcgtagacctcgtgggcaattatacatgcctatgtgccgaaccttttaaaggcttgaggtgcgaaacgggggaccatcccgtgccagatgcttgcctctccgcaccgtgccataatggcgggacctgcgttgacgctgatcagggctatgtgtgtgagtgtccagaaggctttatgggactggattgtcgcgaacgagtccctgacgattgtgagtgtcggaacggcggtcgctgcctgggagccaacactactctgtgtcagtgcccactggggttttttgggttactatgtgagttcgaaatcacagctatgccttgcaatatgaacacccaatgtcccgatggcgggtactgtatggagcatggcggcagctatctgtgcgtatgtcatactgatcacaacgcatcccacagcctgccatctccctgcgacagcgacccctgcttcaacggaggaagttgtgacgctcacgacgacagctatacatgcgagtgcccgaggggctttcacggcaaacattgcgagaaagctaggccccacctttgtagtagcggtccttgccgcaatggtggaacctgcaaagaggccggtggtgagtaccattgctcatgcccctaccggttcaccggacgccactgcgaaattgggaagcccgattcgtgcgcctcgggaccctgccacaacggagggacctgttttcattacataggcaagtacaaatgcgattgcccccccggattctctggtagacactgcgagattgcacctagtccgtgtttccggagtccgtgtgttaacggcggcacatgtgaggaccgtgatacagattttttttgccattgtcaggctgggtacatgggaagacgctgtcaagcagaagtcgactgcggaccgcccgaggaggtgaaacatgccactctccgatttaatgggactagactcggtgccgtggcactgtacgcctgcgataggggatattctctgtccgctcctagccgcattagggtctgccagccccacggtgtgtggagtgaaccaccccagtgcctcgaaatcgacgagtgccggagccagccatgtctgcacggtggttcctgtcaggatagggtcgccggctacttatgcctgtgttccaccggatatgagggagcccactgcgagttggagcgagatgaatgccgggctcacccttgcagaaacgggggtagctgtcgaaacttgccaggcgcttatgtgtgtagatgccccgctgggttcgtgggggtgcactgcgagacagaggtagacgcctgcgattcgtcaccctgtcagcatggaggacggtgtgaatctggtggcggggcatacttgtgtgtgtgccctgaatcctttttcgggtatcactgcgagacagtttcggatccctgctttagctccccttgtggtggtcgaggatactgcctcgcctcaaacggctctcactcatgcacatgcaaagtgggctacaccggagaggattgcgccaaggaactctttccacccaccgcccttaagatggagagagtcgaagagtccggagttagcatctcatggaatccacctaatgggcctgctgcccggcagatgctcgatgggtatgctgtgacgtacgtgtcatcagacggaagctaccgtagaacggatttcgtcgatcggacgcggagcagtcatcagctgcaggctcttgccgctggcagggcctacaacatcagtgtgttttctgtgaaacgtaactccaataataagaacgacatctcaagacccgctgtactattggccagaacccgccctcgacctgtcgaagggtttgaagtgaccaacgtgaccgccagcacgatttccgtacaatgggccttacatagaatccggcatgctacagtttctggcgtgcgggtgtcaattcgacatcccgaggcgctccgtgaccaggctaccgacgtcgatcgctcagttgatcgctttactttccgggccctgctgcctggaaagagatacacaattcagctgaccaccctgtccgggcttcgaggagaggagcatcccaccgaatccctggccaccgctcctacgcatgtttggacacggcctctgcccccagcaaatctgaccgccgcaagagtgacagctacaagcgcgcacgtcgtgtgggacgccccgacacctgggagcctgcttgaagcttacgttattaacgttaccacatcccaaagtaccaagtcgcgctacgtcccaaatggcaaattggcctcttatactgtcagggatttactccccggccggcgatatcagctgtcagttatcgccgtgcagtcaaccgaactggggcctcaacactcggaacctgcccatctgtacattattacaagcccgcgggatggtgctgataggaggtggcatcagggtgggcaccaccctcgggtgcttaagaaccgtcccccgcctgccaggttgcccgagctgcgactgctgaacgatcatagcgcccccgagacaccaactcagccacctagattttcagaactggttgatgggcggggaagagtgtccgcgcgcttcggaggaagcccctccaaagccgcaacggtaaggagccatgtccccgggaattgctctgagaatccttgtcagaacggaggtacttgcgtgccgggggcggatgcccactcttgcgattgtgggcccgggttcaaaggcaggcgatgtgaactggcgtgcataaaggtttcgagaccatgcactcggctgttctccgagaccaaggcattccccgtctgggaggggggagtttgccaccacgtgaaacaatcaaaaagccagacgttagagaagtcttag

SEQ ID NO: 9459 - DNA, 957 bp, synthetic construct
  misc_feature 1..957: note = source = /note="Description of Artificial Sequence: Synthetic coding sequence"
  source 1..957: mol_type = other DNA
atgctgcccctgaccatgaccgtgctgatcctgctgctgctgcccacgggccaagcagcacctaaggatggcgttactcggccagacagtgaggtgcagcaccagctgctgcccaaccctttccagccaggccaggaacagcttggattactgcagagctaccttaagggactgggaagaaccgaggttcagcttgagcacctgtcccgagagcaggtcctgctgtacctcttcgctctgcacgattacgaccaaagtggtcagctggatgggttagaactcctttctatgttgacagccgctctcgctcccggcgcagccaatagcccgaccacaaaccctgttatcctgattgtcgacaaggtgctggagacacaggacttgaacggcgatgggcttatgactccggccgaattaatcaacttcccaggtgttgcattacggcatgttgagcctggggagcctttagccccctctcctcaggaaccccaggccgtgggccgccagtctctcttggccaagtcacctctgagacaggagacgcaggaagcgcccggtccccgtgaagaagctaaaggacaggtggaggcaagacgtgaatcccttgaccccgtgcaggagccaggcggacaggcagaggctgatggcgacgtccccggcccacgaggcgaggccgagggtcaagctgaggctaaaggagatgcaccaggtccacggggggaagcaggcggtcaagccgaagccgagggagatgccccgggacccaggggcgaggccggtggccaggccgaagctgaaggcgatgccccgggacctagaggtgaagctggaggccaggctgaggcaagggagaacggcgaagaggctaaagagctccctggcgaaaccctggaatccaaaaacacccagaatgactttgaggtgcacatcgtgcaggtggagaacgacgaaatctag

SEQ ID NO: 9460 - DNA, 816 bp, synthetic construct
  misc_feature 1..816: note = source = /note="Description of Artificial Sequence: Synthetic coding sequence"
  source 1..816: mol_type = other DNA
atgcaggccgcctgctggtacgtgctgttcctgctgcagcccaccgtgtacctggtaacatgcgcaaatttaactaatggcggaaagtcggagctccttaagtccggctcctctaagtcaacgctgaagcacatttggacagagagcagcaaagacttgagtatctcacgtcttctcagccagactttccggggtaaggagaatgatacagacctcgatctcaggtacgatacccccgaaccctatagcgagcaagacctgtgggattggctcagaaattcgaccgacttgcaggagcccagaccacgggccaaacggagacctattgtcaaaactgggaaatttaaaaaaatgttcggatggggcgatttccactctaacatcaagaccgttaagctcaatctgctgataacgggcaaaatagtggatcacggcaatggcacattttccgtgtactttcgccacaactctacaggtcagggcaacgtaagcgtttcactcgtcccccctacgaagatcgtggagtttgacctcgcccaacaaaccgtcatcgacgcaaaggatagtaaatccttcaactgtcgcatcgagtatgagaaggttgacaaggctacgaagaacacactgtgcaactacgatccatccaagacctgctaccaggagcaaacccagtcacacgtcagctggctctgcagcaaaccctttaaagtgatttgcatctacatctctttctacagtaccgattacaagctcgtgcagaaggtatgcccagactacaactatcattctgacaccccatactttccctctgggtag

SEQ ID NO: 9461 - DNA, 999 bp, synthetic construct
  misc_feature 1..999: note = source = /note="Description of Artificial Sequence: Synthetic coding sequence"
  source 1..999: mol_type = other DNA
atgctgctgctggccgccgccttcctggtggccttcgtgctgctgttatatatggtctcccccctgatatcacctaaaccgctagccctgccaggagctcacgtggttgtgacaggagggtccagcggtataggtaagtgtattgcaatcgagtgctataaacagggagccttcatcactctcgtagccaggaacgaggataaactgctccaggctaagaaggagatcgagatgcacagcatcaacgacaagcaggtcgtcttgtgtatttctgtagatgtcagtcaagactacaaccaagtggagaacgtcattaagcaggcccaggagaagcttggccccgtggacatgttggttaactgtgctggcatggccgtaagtggcaagttcgaagatcttgaggtcagcacttttgaacgactgatgagtataaactacctgggatcagtgtaccccagcagagccgtcataaccactatgaaagagaggcgcgtagggagaattgtcttcgtcagttcccaggctggccagctcggactattcggctttaccgcctattccgccagtaaattcgccatacggggtctcgccgaagccctgcagatggaggtgaagccatataacgtgtatattacagtggcctatcccccggatacagacacgcctgggttcgcagaggagaacagaacaaagcccttggagactagattaatctctgagaccacttcggtttgcaagccagaacaggtagcgaagcagatcgttaaggacgccatacagggaaattttaacagctcacttggcagcgatggatatatgctttcagccctcacgtgcggtatggccccagttacttccatcaccgaaggacttcagcaggtcgtgacaatgggcctgtttcgtaccattgcgctattctatctgggctctttcgatagtattgtccggcgatgcatgatgcagcgagagaagagtgaaaacgccgataaaacggcatag

SEQ ID NO: 9462 - DNA, 1497 bp, synthetic construct
  misc_feature 1..1497: note = source = /note="Description of Artificial Sequence: Synthetic coding sequence"
  source 1..1497: mol_type = other DNA
atgagcttcagcgccaccatcctgttcagcccccccagcggcagcgaagcaagatgttgctgctgtgcctgcaagtctgaaacaaacggaggtaataccggtagccagggaggaaatccaccacccagcaccccgattacagtcaccggacacggcctcgccgttcagtcctccgagcagcttctgcacgtgatataccagcgagtggataaggccgtgggtcttgctgaggccgctctcggcctagctcgtgctaacaatgaactgcttaaacgtctccaagaggaagtgggcgacctgaggcaggggaaggtgagcattccggatgaggacggggagtcccgggcccattcaagtcccccagaagaaccaggacccctgaaggaatctccgggagaagctttcaaggcattgtcggccgtggaggaagagtgcgactcagtaggctccggtgtgcaggtagttatcgaggagctgagacagctcggagctgcctccgtgggtcccggtcctctgggcttcccggccacccagagggacatgagacttccggggtgcactctggctgccagtgaggctgccccactgttgaatccgctggtcgatgattacgtggcatccgagggcgcggtgcagagagtgctggtcccggcctacgcaaagcaactctctcctgctacccaactggccatccagcgggccacacccgaaacaggtcctgagaacggtacgaaactcccgcccccacggcccgaggacatgctcaacgcagctgctgctctcgacagcgccttggaggagtccggacccgggagtaccggcgagttgaggcattcgttggggttgaccgtttccccttgtcgaacaagaggttcaggccagaagaacagtcgacggaaaagagacctagttctgagtaaactcgtgcacaacgtgcataatcatatcacaaatgacaagaggtttaacgggagtgaatcaataaagagcagctggaacatatcagtcgtaaagttccttttagaaaaattgaaacaggaactggtcacttcccctcacaattacaccgataaggagctgaaaggagcctgcgttgcgtattttctcaccaagaggcgggagtaccgcaatagcttgaacccattcaaaggcctgaaggagaaggaggaaaagaagcttaggtcacgcagatatcgcctgttcgccaaccggtcaagcattatgaggcactttggcccggaggatcagcgcctgtggaacgacgtgacagaggaactgatgagtgatgaggaggactccctgaacgaacccgatcgcctgccgtcagcagaagctcagctgctgcctccggagttgtacaatcctaattttcaggaggaggaggatgaggggggcgatgaaaatgcccctggctctccatcctttgatcagcctcataaaacatgctgtccagacctgaacagcttcattgaaatcaaggtcgaaaaggatgagtag

SEQ ID NO: 9463 - DNA, 966 bp, synthetic construct
  misc_feature 1..966: note = source = /note="Description of Artificial Sequence: Synthetic coding sequence"
  source 1..966: mol_type = other DNA
atgcggctgccccggcgggccgccctgggcctgctgcccctgctgctccttttaccacctgccccagaggctgccaagaaaccaacaccttgccaccgatgcaggggcctcgtggacaaatttaaccagggaatggtagacacggcaaaaaagaattttggggggggaaacacagcgtgggaggagaagaccctgagcaagtatgaatctagcgagatccgtttgctggaaatactggaaggcctgtgcgagtcctctgacttcgagtgtaaccaaatgctggaggcccaggaggagcatctagaagcgtggtggttgcagctcaagtcagaatatcccgacttgtttgagtggttttgtgttaaaacacttaaggtgtgttgcagccccggtacctatggccctgattgtttagcctgccaagggggatcccagagaccctgtagcggcaatgggcattgctccggcgatggaagcagacagggcgatggctcttgtcgatgtcatatgggataccaaggcccattatgtacggattgtatggacgggtacttttcctcgctccgaaacgagacacactccatatgtactgcttgcgatgagagctgtaagacatgctctggattgacaaacagggactgcggagaatgtgaagtgggttgggttctcgacgagggcgcttgcgtggacgtggacgagtgtgctgctgagccccccccctgctcggctgcgcagttctgcaagaacgcaaacggtagctatacgtgtgaggatgtagatgaatgctctctagctgagaagacttgtgtaaggaagaacgagaattgctacaatactcctggctcttacgtttgcgtttgtcctgacgggttcgaagagaccgaggatgcctgcgtccccccagccgaggctgaggcaaccgaaggcgagagtcctacccaactgccctcaagagaggacttgtag

SEQ ID NO: 9464 - DNA, 711 bp, synthetic construct
  misc_feature 1..711: note = source = /note="Description of Artificial Sequence: Synthetic coding sequence"
  source 1..711: mol_type = other DNA
atgatgggcatcttcctggtgtacgtgggcttcgtgttcttcagcgtgttgtacgtccagcagggcctgtcaagccaggctaaattcaccgagtttcctcggaacgtgaccgctactgaggggcagaatgtagaaatgagctgtgcttttcagtccggaagcgcctccgtgtatctagaaattcagtggtggttcttacgaggtccggaggacctggatccgggagctgagggtgctggagctcaggtggaactgctgcccgatagagaccccgacagcgacggcaccaaaatctccaccgttaaagtgcaggggaatgatatctcccataagttgcagatctcaaaggtgcggaagaaagacgagggcctgtacgagtgccgcgtaactgacgccaattatggagagttgcaagagcacaaggcccaggcctacctgaaagtgaatgccaatagtcatgcacggcggatgcaagccttcgaagccagtccaatgtggctccaggacatgaaaccccgtaagaacgtgtccgcagctatcccaagtagcatccacggatcagccaaccaaaggacccactctaccagctctccacaggtggtggcaaagatacctaagcagtctccccaaagtggtgccaggatcgctacctctcacggtttgtcagtgctgttactggtctgcggctttgtgaaaggggcattgttatag

SEQ ID NO: 9465 - DNA, 273 bp, synthetic construct
  misc_feature 1..273: note = source = /note="Description of Artificial Sequence: Synthetic coding sequence"
  source 1..273: mol_type = other DNA
atgaacatgaagcccgccaccgccagcgccctgctgctgctgctgttaggccttgcatggacccaagggagtcatggttggggcgctgatgccagtagcctgcagaaacgtgcgggccgggacgaccagaattacaattataatcagcacgcctaccctacagcttatggaggtaagtacagtgtgaaaacacctgccaagggcggtgttagcccctctagctctgcatctcgagttcaaccaggccttttacaatgggtgaagttctggtag

SEQ ID NO: 9466 - DNA, 360 bp, synthetic construct
  misc_feature 1..360: note = source = /note="Description of Artificial Sequence: Synthetic coding sequence"
  source 1..360: mol_type = other DNA
atgcccgccgtgttcatgctggccagcagcagcgccctgcagtgcgggcgcggggtgccccggtttcccagaactgaagtgggagctggtcattcagtcaacgaagagaccaaggctgaaaaggtggggaaccagacttctgtgatccctgccacatcccggcaggctgccctcggcacatcatggacccagcgccgcacccagccgctacaggagcgcagtcactggcatccccgcggcaataacgcctcaggtatggggggtcatagaatgtttcctggcccattgaggggcccagccgcgcaggtgctggagaacgagtgcggcagtctaggacgggctgctgaggggaggtcatag

SEQ ID NO: 9467 - DNA, 639 bp, synthetic construct
  misc_feature 1..639: note = source = /note="Description of Artificial Sequence: Synthetic coding sequence"
  source 1..639: mol_type = other DNA
atgctgagcagcgtggtgttctggggcctgatcgccctgatcggcacctcaaggggtagttacccttttagtcactccatgaaaccacacttgcatccgcgcctctatcatggctgctacggtgatataatgactatgaagaccagcggcgcgacctgcgatgccaactccgtgatgaactgtggaattcggggctccgaaatgtttgccgaaatggatcttagagccataaagccttatcagaccctgatcaaagaggtcggacaaaggcattgcgtggatcccgccgtaatcgcagccattatttcacgcgagagccacggaggctccgttctgcaggacgggtgggaccaccgtggattaaagtttggtctaatgcagctcgataagcagacttaccaccctgtgggagcatgggactcaaaggagcatcttagccaggcaacaggtatacttacggagcgcatcaaggccatccagaagaaatttccaacatggtctgttgcccagcacttgaaaggaggactatctgcatttaagagcggaatcgaggccatcgccacaccgagcgatattgacaacgacttcgtgaacgatattattgcacgagccaaattttacaagcgacagagtttctag

SEQ ID NO: 9468 - DNA, 387 bp, synthetic construct
  misc_feature 1..387: note = source = /note="Description of Artificial Sequence: Synthetic coding sequence"
  source 1..387: mol_type = other DNA
atgcgggtggcccggcggacccggaacgtgtgccggtgcccccgggctgctggccccggagtcccagagcccagggccgccccactgccactgctcgccatggcccccccccctgcatgcagatcccctatgagtcccccgcccccacccttgcttttgcttctgctcagtctcgcgctcctgggagcacgagctagagcagaaccagcaggatctgctgtgcctgcgcaatcacgtccttgcgtggattgtcacgccttcgagttcatgcagagagctcttcaggatctcaggaagacagcatgttccttagatgccaggaccgaaaccctcctgctgcaggccgagcggagagcactatgcgcctgctggccagcaggacactag

SEQ ID NO: 9469 - DNA, 399 bp, synthetic construct
  misc_feature 1..399: note = source = /note="Description of Artificial Sequence: Synthetic coding sequence"
  source 1..399: mol_type = other DNA
atgggcccccgggtgctgcagccccccctgctgctgctgctgctggccctgctcctggccgcactgccctgcggggcagaagaggcttctccgctgagacccgcccaggtgacactgtccccccctcccgcggtcacaaacggttcccagccgggtgctcctcataatagcacccatacacggccgcctggagcttctggcagcgctttgaccaggtccttttacgtgattctgggattttgcgggctgacagcgctttattttctgattcgagcctttagacttaagaagccacagaggagaagatacgggctgctcgccaatacagaagatcctacagagatggcaagcctcgatagcgacgaggagacggtattcgaaagtagaaatctgcggtag

SEQ ID NO: 9470 - DNA, 585 bp, synthetic construct
  misc_feature 1..585: note = source = /note="Description of Artificial Sequence: Synthetic coding sequence"
  source 1..585: mol_type = other DNA
atgagcgccctgtggctgctgctgggcctgctggccctgatggacctatcggaatcctcgaattgggggtgttatggaaatatacagagcctggatactccaggggcaagctgcggaatcggacgtaggcatggtctgaactactgcggagtgcgtgcatctgaaagactggccgaaatcgacatgccatatctcctcaagtatcaacctatgatgcaaaccattggccagaaatattgcatggaccccgcagtcatagctggtgtcttgagcagaaagtcacccggagacaagattttagtgaacatgggtgaccggacgagcatggttcaggatcccggttcacaggcgccaacttcctggatatctgaaagccaggtcagtcaaacaaccgaagtgctgactacgagaataaaagagattcagaggagattccccacctggacgccggaccagtacttgaggggtgggttatgtgcctattccgggggggctggatatgtgcggtcttcccaggatttatcttgtgatttctgcaatgatgtactggcaagagccaagtatctgaaaaggcatggtttttag

SEQ ID NO: 9471 - DNA, 441 bp, synthetic construct
  misc_feature 1..441: note = source = /note="Description of Artificial Sequence: Synthetic coding sequence"
  source 1..441: mol_type = other DNA
atggtgatcaccatctactacgacgtgaaggtgcggttcatcgtgcgtggctgcggccagtacatctcgtacagatgtcaggagaaaagaaatacatactttgcagaatattggtaccaggcacagtgctgccagtatgactactgcaactcctggtcaagcccccagctccagagctcattacctgagccacacgaccgccccctggccttgcccctgtcagactcccagattcagtggttctatcaagctctgaacttaagcttgcccctgcccaatttccacgccggtactgaaccggatgggctagatccaatggtgaccttatctctcaatctgggccttagttttgccgagctgcggaggatgtatttgttccttaactccagcggtttattggtgctgccccaggccgggctgctgactcctcacccatcgtag

SEQ ID NO: 9472 - DNA, 234 bp, synthetic construct
  misc_feature 1..234: note = source = /note="Description of Artificial Sequence: Synthetic coding sequence"
  source 1..234: mol_type = other DNA
atgggcagcagcggcctgctgagcctgctggtgctgttcgtgctgctcgccaacgttcaggggccggggctcaccgattggctttttcctcggcgatgcccaaaaattcgagaagagtgcgagtttcaggaaagggacgtatgcaccaaagatcgccagtgtcaggacaataaaaaatgttgtgtgttctcatgtggcaagaagtgcctggatctcaagcaagggaaacagtag

SEQ ID NO: 9473 - DNA, 444 bp, synthetic construct
  misc_feature 1..444: note = source = /note="Description of Artificial Sequence: Synthetic coding sequence"
  source 1..444: mol_type = other DNA
atgggccaggaggtgcacggcagctgctgggccctgggcgccggcggagggcagcgacaatgggtgggaagaagcatgcccccactcgccccccagttgtgtagagctgttttcctggtgccgatcctgctcctgctgcaagtgaagcccctgaatggatccccggggcctaaggatggttcccagaccgaaaagactccctccgcagatcagaaccaggagcaatttgaagagcattttgtggcttcctccgtgggcgagatgtggcaagtggtggacatggcacagcaggaggaagaccaatcaagtaaaaccgctgctgtgcataagcacagctttcacctgtcgttttgctttagtctggcgtctgtcatggttttttccgggggcccactacgtagaacattcccaaacatccaactctgcttcatgctcactcattag

SEQ ID NO: 9474 - DNA, 1695 bp, synthetic construct
  misc_feature 1..1695: note = source = /note="Description of Artificial Sequence: Synthetic coding sequence"
  source 1..1695: mol_type = other DNA
atggcccccaagaagctgagctgcctgcggagcctgctgctgcccttgagcctgactttgctcctgcctcaggcagataccaggtcctttgtcgtggatcggggacacgaccgcttccttctggatggggcacctttcagatatgtgagcggcagcctgcattacttcagagtgccacgcgtgctgtgggccgacaggttgctgaaaatgcggtggagcgggttgaacgccatccagttctatgttccctggaattaccatgaaccacagccgggggtgtataatttcaatggaagccgggatcttatcgcgttcttaaacgaggccgctctggccaacctgctggtcatcttgagaccaggaccctatatctgcgccgagtgggagatgggagggttgccatcttggcttctgcggaagcccgaaatccacttgagaacatcagaccccgctgacaacatgactaaaatctttacactacttcgaaagtacgaaccccatggccccctggtgaactccgaatattacacaggttggttggactactggggccagaaccatagcacacgctccgtgtctgcagtgactaaggggctcgaaaatatgcttaagctcggtgctagcgttaacatgtacatgttccacgggggtaccaactttggctattggaatggcgctgataagaagggacgctttctccccatcactacctcatacgactatgatgccccaatttctgaggctggagacccaacgccaaagctattcgctctgagggacgtgatcagcaagttccaggaggtgccactggggcctctccccccacctagccccaaaatgatgctggggcctgtgactcttcatctggtgggacatctgctggcctttctggacctgttatgcccacgaggaccaattcatagcattcttccgatgacttttgaggccgttaagcaagatcacggctttatgctgtaccgtacttacatgactcacacgatattcgaacccacccctttctgggtacccaacaacggcgtgcatgatagggcttatgtcatggtcgatggggtcttccaaggcgtggtagagcggaatatgagggataagttatttctgaccggcaagctcggctccaaactggacatactcgtcgagaatatgggacgcctgtcattcggttccaactcctcagattttaaaggactcctcaaaccacccatcttgggccaaacaattctgacgcagtggatgatgttccctctcaagatcgataacctggttaagtggtggtttcctttgcagctgccaaagtggccctacccccaggcccctagcggccccactttctactccaagacatttccgatcctcggcagtgtgggcgatacctttctgtacctgccaggttggacgaaaggccaggtatggattaacgggttcaatcttggaaggtactggacgaagcagggtccacagcaaaccctttatgtcccacgatttctgttgtttccaagaggcgccctgaataaaatcacccttcttgagttagaggacgtacccctacagccccaggtgcaatttctggacaagccaatcctcaattccacttctaccctccataggacgcatattaactcactttctgccgatacccttagcgcctctgagccgatggagctcagtggacattag

SEQ ID NO: 9475 - DNA, 423 bp, synthetic construct
  misc_feature 1..423: note = source = /note="Description of Artificial Sequence: Synthetic coding sequence"
  source 1..423: mol_type = other DNA
atgttcttcaccatcagccggaagaacatgagccagaagctgagcctgctactgttagtgtttggcctaatctgggggctgatgttgttgcactacacctttcaacagccacgccatcagtcttcggtgaaactccgcgagcagatcctggatctttccaagcgctacgtcaaggctctggctgaagagaacaagaatacagttgacgtggaaaatggcgcctctatggctgggtacgctgacttgaagaggacaatcgctgtgctgctggacgacatcttgcagcggctcgtcaagttagagaataaagtagattatatcgtagttaatggcagcgctgcaaacaccactaatggaacctccggtaatctggtgcctgtcactactaataaaaggacaaacgtctctgggtctattcgctag

SEQ ID NO: 9476 - DNA, 528 bp, synthetic construct
  misc_feature 1..528: note = source = /note="Description of Artificial Sequence: Synthetic coding sequence"
  source 1..528: mol_type = other DNA
atgctgccccccatggccctgcccagcgtgagctggatgctgctgtcatgtttaatgttgttatctcaagtgcagggggaagagccgcagagggagctcccatccgcccgcatcagatgtcccaagggctccaaggcctatggcagtcactgttatgctctgttcctttcaccaaaatcctggactgatgctgatctcgcatgtcagaagcggccctctgggaacctggtctccgttctgtcaggcgcagagggctcttttgtgagcagcctggtgaaatcaatcggtaactcatacagctacgtttggatcggacttcacgatcctactcagggcactgaacccaacggggaggggtgggaatggtcctctagtgatgtgatgaattacttcgcttgggaaaggaatccatcaacaatcagcagtccaggacactgcgccagtctttcccggtctactgcttttcttcggtggaaggactataattgcaacgtccgactcccgtatgtctgtaaattcaccgattag

SEQ ID NO: 9477 - DNA, 381 bp, synthetic construct
  misc_feature 1..381: note = source = /note="Description of Artificial Sequence: Synthetic coding sequence"
  source 1..381: mol_type = other DNA
atgcacctgagccagctgctggcctgcgccctgctgctgaccctgttaagcttgcgcccctccgaagcgaagccaggagcccctcccaaagttcctaggacccctcccgcagaggagttggccgagccacaggcagccggcggggggcagaaaaaaggagacaaggcccctggagggggcggcgcaaaccttaagggtgaccgtagtcggttgctcagggatcttcgcgtcgataccaagagccgggcagcatgggcaagactactgcaggagcaccctaatgccaggaagtataaaggcgccaacaaaaaagggctgagtaaaggctgcttcggactcaagttggataggataggttctatgtctgggttgggctgctag

SEQ ID NO: 9478 - DNA, 288 bp, synthetic construct
  misc_feature 1..288: note = source = /note="Description of Artificial Sequence: Synthetic coding sequence"
  source 1..288: mol_type = other DNA
atggcccccccccccgcctgccggagccccatgagccccccccccccaccacttctactcctcctccttagtttagccctgctgggcgccagagcccgtgctgaacccgcgggaagcgccgtgccagcccagtcacgcccttgtgtggattgccatgcttttgagttcatgcagagggctctccaggatctgcggaaaacagcatgcagccttgacgcacgcactgagactctcctattgcaggcagaaagacgggccctctgtgcctgctggcctgctggtcactag

SEQ ID NO: 9479 - DNA, 423 bp, synthetic construct
  misc_feature 1..423: note = source = /note="Description of Artificial Sequence: Synthetic coding sequence"
  source 1..423: mol_type = other DNA
atgttcttcaccatcagccggaagaacatgagccagaagctgagcctgctgctgctggtgttcggactaatctgggggttgatgctgctgcattacacatttcagcagcctcggcaccagtctagcgtgaaactgagagaacagattctggacctaagtaaaagatatgtgaaagctttagctgaggagaacaaaaacaccgtcgatgtggagaacggggcgtctatggcaggctatgcagatctgaaaaggacgatcgccgtccttctagacgacatcctacagaggcttgttaagttagagaacaaagtggattatattgtcgtgaatggctccgcagctaatacaacaaacggaacttccggaaacctggtaccagtaacaaccaataagagaactaacgtctcaggcagcattagatag

SEQ ID NO: 9480 - DNA, 291 bp, synthetic construct
  misc_feature 1..291: note = source = /note="Description of Artificial Sequence: Synthetic coding sequence"
  source 1..291: mol_type = other DNA
atggagcacaaggaggtggtgctgctgctgctgctgttcctgaagtcgggccagggagaacccctcgacgattatgttaatacccagggccctagcctcttctctgtcactaaaaagcagctcggggccgggagcagagaggaatgcgcggcaaagtgcgaagaagacaaggagtttacgtgcagggcatttcagtatcacagcaaagaacagcagtgtgtcattatggccgaaaaccgtaagtccagcatcatcatccgtatgcgggacgctgtactgttcgagaagtag

SEQ ID NO: 9481 - DNA, 678 bp, synthetic construct
  misc_feature 1..678: note = source = /note="Description of Artificial Sequence: Synthetic coding sequence"
  source 1..678: mol_type = other DNA
tgagccgacctgcccagctgctggggcgccggcccctgctacaccggccacaaagtcggcgctcttcgccgcgatacagtgatttgctgttgccgtcacggtgactatagcaccccctgcctgtttactcctgggaagccatctcgcaatcctagcccgtggaagagaaccctgtggactctgtcagctccttgggccggccccgctggatggactggggaggaacagaacgcaactaagacaggcttgattacaagaagaccacgccctttacgcagaagaccccacccagctccggcttcaccacttccggagattattaggggcaacatcccacggatgcttggaaaatttgtccctgtcaactgggaacctccacaacccctgccattccctaaatacttgcgatgctatcgatgcttattggaaaccaaagagttagggtgtctactgggttcagatatttgcctgactccagcgggatcaagttgcatcaccctgcataagaagaattcttctggcagtgacgttatggtcagcgattgcaggagtaaagagcagatgtctgattgcagtaatactcggacaagtcctgtgtctgggttctggatcttcagtcagtactgtttcctcgacttttgcaatgatccccagaatcgcggattgtacacaccctag

SEQ ID NO: 9482 - DNA, 684 bp, synthetic construct
  misc_feature 1..684: note = source = /note="Description of Artificial Sequence: Synthetic coding sequence"
  source 1..684: mol_type = other DNA
atgggcgccgtgatgggcaccttcagcagcctgcagaccaagcagaggaggccatctaaggacatcgcctggtggtactaccagtaccagcgtgacaaaatcgaagacgaactggagatgaccatggtgtgccatcgtcctgaaggtctcgagcagctcgaagctcagacaaatttcactaaacgggagttgcaggtgttgtaccgcgggttcaaaaacgaatgcccatccggagtagtgaacgaagacacatttaagcaaatttatgcacagttcttcccacatggcgatgcctctacctacgcccactacctgttcaatgccttcgacaccactcagaccggatctgtgaaattcgaagattttgtcacggctttgtctattctgctgcggggaactgttcacgaaaagcttaggtggactttcaatttgtacgatatcaacaaggacggctatatcaataaagaagaaatgatggatatcgtcaaggctatctacgatatgatggggaagtatacttacccggtcctgaaggaagacacaccacgccaacatgttgatgtgttctttcagaaaatggataagaacaaagatggcatagtgacgcttgatgagtttctcgaaagttgccaggaggatgataacattatgcgctcattacagctgttccagaatgtaatgtag

SEQ ID NO: 9483 - DNA, 546 bp, synthetic construct
  misc_feature 1..546: note = source = /note="Description of Artificial Sequence: Synthetic coding sequence"
  source 1..546: mol_type = other DNA
atgcaggtgaacttcgtgagctacgtgcagctgaccagccgggccctccccagccttaccgactcaaaggggagtctggttgtggtgtcatcccttctgggcagagttcctacaagcttctcgactccctattccgctgcgaagttcgcacttgacggattctttgggagtctccgtcgggagttagacgtccaggatgttaatgtcgcgatcactatgtgtgtgctgggcctcagagaccgggccagtgccgcggaggccgtgcgatcaagtacttccagaccacggcaaccagagcacagaggggtgccccttcaatcccagacagccatgtttcttcctccaaccgtgccgggtgcccggacattgaccgagacacctctgagaggatggcctcagccaaagatgaaatcttccagacagaagtctaagacagagaagaatgacggccatttggaacccgtgacagcttgggaggtgcaagtccctagagtaaggagactgtgcaggggtctcgctcgtccacacttgttcggccacgactag

SEQ ID NO: 9484 - DNA, 423 bp, synthetic construct
  misc_feature 1..423: note = source = /note="Description of Artificial Sequence: Synthetic coding sequence"
  source 1..423: mol_type = other DNA
atgagcgacctgctgctgctgggcctgatcggcggcctgaccctgctgttgctccttaccctgctggcttttgcaggctattctgggctgctggccggggtggaagtgtccgctggctccccacctattcgcaatgtgactgtcgcatataaattccatatgggtttgtacggagaaaccggccgcctctttactgagtcctgctccataagtcccaaactgaggtcaatagcggtctattatgataatccacatatggtgccacccgataaatgccgttgcgctgtgggaagtatcttgtcagaaggagaggaaagtccatcccccgaattgatagatctctatcagaaatttggctttaaggtgttctccttcccggccccttcccatgtcgtgacagccacctttccctacaccacctag

SEQ ID NO: 9485 - DNA, 177 bp, synthetic construct
  misc_feature 1..177: note = source = /note="Description of Artificial Sequence: Synthetic coding sequence"
  source 1..177: mol_type = other DNA
atgggccccgaggccctgagcagcctgctgctgctgctgctggtggcctctggagacgccgacatgaaaggtcatttcgaccctgccaaatgtagatacgccttagggatgcaggataggaccattccagactcagacatctctgccagcagctcctggtctgatagtaccgcctag

SEQ ID NO: 9486 - DNA, 2742 bp, synthetic construct
  misc_feature 1..2742: note = source = /note="Description of Artificial Sequence: Synthetic coding sequence"
  source 1..2742: mol_type = other DNA
atgggccccgaggccctgagcagcctgctgctgctgctgctggtggcatctggcgacgctgatatgaagggtcattttgatccagccaaatgtcgttacgcattggggatgcaggacaggacaattccagacagcgatatctctgcatcctcttcttggagtgatagtaccgccgccaggcattcaagactggaaagttccgacggggatggggcttggtgtcccgcgggttccgtattcccaaaagaggaagaatacctgcaggtggacctgcagaggctgcacttagtcgccctcgttgggacacaaggacgtcacgcagggggactgggtaaagaattttccagaagctataggcttcggtacagccgcgacgggagacgctggatgggctggaaagatcgatggggtcaagaggtgattagcgggaacgaggatccagagggcgtagtgctgaaggacctcggccctccaatggtagcaaggctcgtgcgcttctatcctagagcagacagagtgatgagcgtatgtttaagggtcgaactgtacgggtgcctgtggcgcgatgggctgttgtcttataccgccccggtgggtcagacaatgtacctgtcagaggctgtttaccttaacgactcaacttacgacggacatacagtcggaggcttgcaatatggggggctgggtcagctggccgatggtgttgttggcttggatgatttccggaagtctcaggaactgcgggtttggcccgggtacgattacgtcggatggtccaatcattccttttccagcggctacgtggagatggagttcgagttcgatcgcttaagggcattccaggccatgcaggtgcactgcaataatatgcatacacttggggcacgcctcccggggggcgtggagtgtcgtttccgaagggggcccgcaatggcttgggaaggagagccaatgcgccacaacctcggtggaaatctcggagatccacgcgctagggcagttagcgtgcctcttggaggtcgcgtcgcaagattcctgcaatgcagatttctttttgcgggaccatggttactgtttagcgagatcagcttcataagcgatgttgtcaataactcaagccctgcccttggagggacatttcccccagccccttggtggcctcccggaccacccccaacgaattttagttcacttgaacttgagcctaggggccagcagcctgtcgcaaaagcagaaggcagtcccacagccattctaattggctgcctcgtggcgattatcctactgctcctgctgattatcgccctgatgctgtggcgcttacactggagacggctcctgtctaaagccgaacgcagggtcttagaggaggagcttaccgtacatctatccgtgcctggggataccattctgatcaataacagacccggtcccagagaacctcctccttaccaggagccacgcccaaggggtaatcctccacactctgcgccctgcgtccccaatggcagcgccctcctcctatcgaatcctgcctataggctattattagctacatacgctcgcccccccaggggtcccgggcctccaactcctgcttgggctaagccgacgaatacccaggcttattctggcgactacatggagccagaaaagcccggtgccccactcctgcctcccccaccacagaatagcgtcccacattatgccgaggcggatatcgtaacccttcagggtgtcaccggaggtaacacttatgcagtgcccgccctgccacccggcgctgtgggcgacggaccaccccgcgtagactttccacggtcccgactacgtttcaaggagaagcttggagaagggcagttcggcgaggtccacctgtgcgaggtggacagtccccaggacctggtaagcctcgatttcccgcttaacgtgagaaaggggcaccccctactcgtggcagtcaaaatattgcggcccgatgctactaagaatgcgaggaacgatttcctcaaagaggtcaaaataatgtctcgattgaaagatcctaacattatcaggttgctaggcgtctgtgttcaggatgatccgctgtgcatgattaccgactatatggagaacggcgacctgaatcagtttttgagcgcccaccagctggaggataaagccgctgagggggcccctggggacgggcaggccgctcagggtcccacaatcagctatccaatgctgctgcatgtggcagcacagatcgctagcggtatgaggtatctggccactctgaattttgttcacagagatcttgccaccaggaactgtcttgtgggcgagaattttacaattaagattgccgacttcggcatgtccagaaacttatacgctggcgactattaccgagtccagggacgagccgtgctcccaatcagatggatggcctgggagtgtattttaatgggtaagtttactaccgcaagcgatgtgtgggcttttggcgttactctttgggaagtcttaatgctttgtcgcgcacaaccctttggtcaactcaccgacgagcaggtgatcgagaatgccggggagttcttcagagaccagggcagacaggtgtacctctctcggccccccgcctgcccccaggggttgtacgaattaatgctcaggtgttggtccagggagtccgaacagaggccccctttctcacagctccatcggttcctggccgaggatgctttaaatacagtgtag

SEQ ID NO: 9487 - DNA, 1146 bp, synthetic construct
  misc_feature 1..1146: note = source = /note="Description of Artificial Sequence: Synthetic coding sequence"
  source 1..1146: mol_type = other DNA
atgcggctgctggcctggctgatcttcctggccaactggggcggcgcaagagcggagcctggtaaattttggcacatcgcagatctgcatttggatcctgattataaggtgagtaaggaccctttccaggtctgtccaagcgctggctcacagcccgtgccagacgccggaccttggggtgactacctctgtgatagcccttgggctctcattaactcatctatttatgccatgaaagagatagagccggagcctgacttcatcttgtggaccggtgacgacacacctcacgtccctgatgagaaactcggagaggcagccgtgcttgaaattgtagagaggctgacaaagctaattcgtgaggtcttcccaggagctttttactgcgagaagcttcccggtccttccggagccggacgaatagtggtgttgaataccaacttatattacacgagtaatgcgctgactgcagacatggcggatcccggtcagcagttccagtggctagaggacgtcctcaccgacgcctcgaaggccggagacatggtgtacatcgtgggccacgtgccgcccgggtttttcgagaagactcagaataaggcgtggtttagggaaggttttaacgaaaaatatctaaaagtggtgcgcaagcatcaccgtgtaattgcggggcagttctttggccaccatcacactgattctttccgaatgttatacgatgatgctggcgtgcccatatcagcgatgtttatcacgcccggcgtgactccctggaagaccactctccctggcgttgtcaatggcgcaaacaatcccgccattcgggtttttgagtacgatcgcgccacactgtcactcaaagacatggtcacatattttatgaacctgagccaggccaatgctcaaggtacaccacgatgggaattagagtaccagtccacactgcagcgctattacgtttacaacagcgtgagctatagtgctggggtttgtgacgaggcatgttctatgcaacacgtatgtgcaatgagacaagtggacattgatgcctatacaacatgcctctatgcctctgggaccaccccagttccccagctcccattgctcctcatggccctactgggcctgtgcaccctggttctgtag

SEQ ID NO: 9488 - DNA, 456 bp, synthetic construct
  misc_feature 1..456: note = source = /note="Description of Artificial Sequence: Synthetic coding sequence"
  source 1..456: mol_type = other DNA
atgcgggtggccggcgccgccaagctggtggtggccgtggccgtgttccttttgactttttacgtgatcagccaagtatttgaaatcaaaatggacgcatccctcggtaacctgttcgcccggtcagcccttgatacggcagcaaggtctactaagccccctcgatataagtgcggcatcagcaaagcttgcccagagaaacacttcgccttcaaaatggcctcaggcgccgcaaatgttgtcggccccaagatttgcctcgaggacaatgtgttaatgtctggagtgaaaaataatgtcgggcgcggaattaatgtcgcgctcgccaacgggaaaactggggaggtcctagataccaaatattttgatatgtgggggggggacgtggccccctttatcgaatttctgaaggccatccaggatgggaccatcgttctcatgggtacctacgattag

SEQ ID NO: 9489 - DNA, 936 bp, synthetic construct
  misc_feature 1..936: note = source = /note="Description of Artificial Sequence: Synthetic coding sequence"
  source 1..936: mol_type = other DNA
tgagcccccagcccctgcagccacttcaactgcggcagccaggtgacggacggcggcactatcaaacagaaaatttttacattcgacgctatgtttagcaccaactacagtcacatggagaattaccggaaaagagaggacctggtgtaccagagtactgtgcgtctcccagaggtcaggatctcagataacggcccctacgaatgccacgtgggcatttatgaccgcgctaccagggagaaggttgtcttagcgtccggaaacattttcctcaatgtaatggcgccacctacctccatcgaagttgtggcagccgatactccagcaccgtttagccggtaccaggctcaaaactttacattggtttgtatagtctctggagggaagcctgctccaatggtgtatttcaaacgagatggcgagcccatcgatgccgtacccctgagtgaaccccccgcggcgtcgagtggcccgctgcaagattcacgaccctttcgtagtttactacacagagacctcgatgataccaaaatgcagaaatctctctcattgctggacgctgaaaatcgggggggtagaccatacaccgaaaggcccagtagaggccttacccctgatccgaatattcttttgcagcctaccactgaaaatatacctgaaaccgtggtatcccgcgaatttccccgctgggttcattctgccgagccaacctactttcttcggcacagtcgtactccctcctccgacggcacagtggaggttagagccctgttaacttggacactcaatccccaaattgataatgaggcgctgtttagttgcgaggttaagcatccagccctcagcatgcccatgcaggcagaagtcaccctggtcgctcccaaaggacctaaaattgttatgacgccgtcgcgtgctcgggtcggggatacttag

SEQ ID NO: 9490 - DNA, 978 bp, synthetic construct
  misc_feature 1..978: note = source = /note="Description of Artificial Sequence: Synthetic coding sequence"
  source 1..978: mol_type = other DNA
atgcagggccgggtggccggcagctgcgcccccctgggcctgctgctcgtgtgcctgcacctgccaggcttgttcgcaaggtcaattggggtggtggaggagaaggtgtctcagaatcttggtactaatttgcctcagctggggcagccttcctcaacgggaccatccaattccgagcatccccagccagccctagaccccaggtctaatgatctggcgagggtgccactcaagcttagcgtgccagctagtgatgggtttcctcctgcgggcggatctgcagtgcagaggtggccaccctcctggggactgcctgccatggacagttggcctcctgaagatccctggcaaatgatggctgccgcagctgaagatcgcctaggcgaggcattgccagaagagctgagttacctctccagcgcggcggccttggctcctggcagtggaccactgccaggggagtcttctcccgatgcgacaggcctcagtcccaaggcctcattactgcatcaagactcagagtcccggagactgccacgtagtaattccctgggcgccggagggaagatcttgagccagagacccccttggagcctgatacacagggtccttccagatcatccatggggaactctaaacccgtctgtttcttggggaggagggggacctgggacgggctggggcacacggcccatgcctcaccctgaggggatctgggggataaataaccagccaccaggtacttcctggggaaacattaaccggtatcccggtggctcatggggaaacatcaataggtatcctgggggttcctggggcaacattaataggtaccccgggggttcttggggtaacattcatctctacccagggataaacaatcccttccccccaggagtgctacggccacccggcagtagctggaatattccggccgggttccccaatcctccttctccaagactacaatggggttag

SEQ ID NO: 9491 - DNA, 957 bp, synthetic construct
  misc_feature 1..957: note = source = /note="Description of Artificial Sequence: Synthetic coding sequence"
  source 1..957: mol_type = other DNA
atgggcctgcacctgcggccctaccgggtgggcctgctgcccgacggcctcctctttctgttgctcctcttgatgctactcgcagaccccgccctgcctgcaggccgtcaccctcccgtggtactgggctggtttaccacaaaacaccccggacccccaagcttcctcatggtgtggatgtacgtcagcctcgcccttggacgaccttcccactggtcatcgtggaccccagccaaagcagcctgggtgccaatcagtaccccctggtggcgggcattatgggccggggccactcatggtgttcgaatgtcagaggggcttcccatgactggcgcagaaccccagcggcagcctcaggcatggaaagataaatatatcagagcatttgtttctctgggagcgccctggggtggagttgccaagactctccgagtgttagccagcggggacaacaatagaatccccgtcatcggccccttaaagattcgagaacagcagcggagcgccgtgtctacaagttggctacttccctacaactacacctggtctccagaaaaggtgttcgttcagacacccacaatcaattacactctgcgtgattataggaagtttttccaggatataggtttcgaggatggctggctcatgagacaggatactgaggggctggtggaagctaccatgccccctggggtccagctgcactgcctgtatggaacaggtgtaccaacgccagactctttttattatgagtcttttccagatagggaccccaagatatgtttcggggacggcgacggcacagtgaacctgaagtccgctctgcaatgccaagcttggcagtcccgccaagagcatcaggtgcttttgcaggaacttccgggctctgagcacattgaaatgctggccaacgctacaactcttgcctacttgaaacgcgtgctgctgggaccctag

SEQ ID NO: 9492 - DNA, 1575 bp, synthetic construct
  misc_feature 1..1575: note = source = /note="Description of Artificial Sequence: Synthetic coding sequence"
  source 1..1575: mol_type = other DNA
tacgccctgcgggaccggcagggcaacgccatcggcgtgaccgcctgcgatatcgatggagatgggcgcgaagagatttactttctgaatacaaacaacgcattttcaggggtggcgacctatacagacaaactattcaagttccgcaacaaccggtgggaggatattctgtccgatgaggtgaatgtggcgcggggagtggccagcttgtttgccggccggagcgttgcctgtgtggaccggaaaggtagcggtcgctacagcatttatatagccaactacgcgtacggtaatgttgggcccgatgccttgatcgaaatggacccagaagcgagcgaccttagccgtggcatcctagccctacgcgatgttgctgcagaagctggggtatctaaatacacagggggcaggggagttagcgtcggacccattctgtccagttccgcaagcgacatcttctgcgacaatgagaacggccccaacttccttttccataaccgcggcgacgggacattcgtcgatgccgccgcgagtgccggcgtggacgatccacaccagcacggacggggggttgcgctagcagacttcaatagggatggcaaagttgacatcgtctatggcaactggaacgggccacacaggctgtacctgcagatgtcaacacacgggaaggtgcgattccgagatattgcctcccctaaattctctatgccatctcctgtcagaacagtgatcacagctgacttcgataacgatcaagagctggaaattttttttaataacatcgcatatcgcagctcatctgcaaataggttgtttcgtgtgatcaggagggagcatggcgaccccttaatagaggaacttaaccccggggatgcccttgagccagaggggagggggacaggtggcgtggtcaccgactttgacggagatggtatgcttgatctcattctgtcgcacggagagagcatggctcagcctctcagtgtttttagaggcaatcagggattcaacaataactggctccgagtcgtacctcggaccagattcggggcattcgctagaggggctaaggtcgtactctataccaaaaaaagtggggctcatttaaggatcatcgatgggggttcgggatacttgtgcgagatggaacccgtggctcacttcggcctgggcaaggatgaggcaagctcagtcgaagtgacttggcccgacgggaaaatggtcagccgcaacgtggcttctggggagatgaattccgtcctcgagatcctttatcctagggacgaggacaccctccaagacccagcacccttagaaacgcctatgaatgcttctagcagtcactcctgtgcactggagacttctccctatgtttccaccccaatggaggcgaccggggctgggccaactcgctccgcagtgggcgctactagccctacccgcatggcccagcccgcttggggtttgtctgcctcacacagagctcccgcccccccgcctcctccactactcctgccactgccactcttgctgcctctcctggaacttccccttttgcaccgctccagctag

SEQ ID NO: 9493 - DNA, 636 bp, synthetic construct
  misc_feature 1..636: note = source = /note="Description of Artificial Sequence: Synthetic coding sequence"
  source 1..636: mol_type = other DNA
atggtgagccggatggtgagcaccatgctgagcggcctgctgttctggctggcttctggatggacaccagctttcgcctactctccccgtacacctgaccgtgttagcgaagcggacatacagcggctgctccatggcgtgatggaacagttaggtatcgcaaggccacgagtggaatatccagcgcaccaggccatgaacttggtgggccctcagtccatcgaagggggggcccatgagggcctgcaacatctcggaccttttggcaatatccctaatatcgtagcagaattgacaggggataacattcccaaggatttctccgaggaccaaggttacccagatcctccaaacccctgtcctgtcggaaaaaccgacgacgggtgcttggagaatacgccagataccgccgagttctcccgggagttccaactccatcagcacctgttcgacccagagcacgattaccccggattgggcaaatggaacaaaaaactgctctacgagaagatgaagggcggggagcggcggaaacggcggtctgttaatccctaccttcagggccagcggctggataacgtggtggccaagaagtcagtaccacatttttctgatgaagacaaagatccagagtag

SEQ ID NO: 9494 - DNA, 465 bp, synthetic construct
  misc_feature 1..465: note = source = /note="Description of Artificial Sequence: Synthetic coding sequence"
  source 1..465: mol_type = other DNA
atggccctgggcgtgcccatcagcgtgtacctgctgttcaacgccatgaccgccctgacagaagaggccgctgtaacagtcactcctcccataactgctcaacagggcaactggacagtaaataaaaccgaagccgacaacatcgagggtcctatcgctcttaagttttcacacttatgcctggaagaccataactcttactgcattaacggggcttgcgcctttcaccatgagcttgaaaaggcaatttgcagatgcttcactggatacactggagaaagatgtgagcacctgacccttacttcctacgctgtggacagctacgagaagtatatcgctatcggcattggcgttggactgctgctgagcggatttctggtcattttttactgttatattagaaagaggtgtctgaagttgaagagtccctacaatgtgtgtagcggagaacgccggccgctgtag

SEQ ID NO: 9495 - DNA, 1446 bp, synthetic construct
  misc_feature 1..1446: note = source = /note="Description of Artificial Sequence: Synthetic coding sequence"
  source 1..1446: mol_type = other DNA
atgggcaagctgcggcccggccgggtggagtggctggccagcggccatactgagaggccacacctgtttcagaatttgctgctgtttctgtgggccctgctcaattgtggtttgggagtgtccgcacaaggtccaggagagtggacaccatgggtttcgtggacccggtgttcatcatcttgcggccggggcgtgtcagtaagaagccgccgctgtctaagactgcctggcgaagagccatgctggggggacagtcacgagtatagactttgtcaacttccggactgcccgccgggggctgttccctttcgtgacctacagtgtgctctgtacaacggaaggcctgtactagggacacagaagacgtaccagtgggtgcccttccacggagcccccaaccagtgtgatctcaattgtctggctgagggccatgcattttaccattctttcgggcgcgttctggatggcactgcttgcagccccggggcccaaggcgtgtgcgtcgcaggtaggtgcctgagcgccggatgtgacggactgcttggttccggggccctggaggataggtgcggtagatgtggcggagctaacgattcctgtctattcgtccagcgcgttttccgggatgccggtgcattcgcaggctattggaacgtcacacttattcccgagggcgcgagacatatacgcgtcgagcacagaagcagaaaccatttagccttgatgggcggagatggccgctacgtgttaaatggtcactgggtcgtgtctccacctggcacttacgaggcggcagggactcatgtcgtgtatacaagggataccggaccacaggagacacttcaggcagccggacccacttctcacgatctgttactgcaggttctcctccaggaaccgaaccccggcatcgaattcgaattctggcttcctcgggaacgctactcaccatttcaggctcgggtgcaagctctcggctggccattacgccagccccagccccgaggcgtcgaaccccagccaccagctgctccagctgtcacccccgcgcagactcccacacttgcaccggacccctgcccaccgtgccccgacactcggggaagggctcatcggctcttgcattattgtggctctgacttcgtgttccaggccagagtcctgggccaccaccaccaggctcaggaaacccgctatgaagtgaggatccagcttgtgtataagaaccggtcgcccctcagagctcgcgagtacgtctgggcccccgggcattgcccctgcccgatgctggccccccaccgcgattacttgatggctgtgcaacggctggtgagtccggacggcacgcaagatcagctgctgctgccgcacgcaggctatgcaagaccttggtccccagcggaggacagccggatccggttaactgcccgccgctgcccgggatag

SEQ ID NO: 9496 - DNA, 627 bp, synthetic construct
  misc_feature 1..627: note = source = /note="Description of Artificial Sequence: Synthetic coding sequence"
  source 1..627: mol_type = other DNA
atggccgacatgcagaacctggtggagcggctggagcgggccgtgggacgtctggaggctgtgtctcacacatccgacatgcaccgcggttacgcagactcgccctcaaaggcgggcgctgccccttacgtgcaggctttcgacagcctgctggcgggtccggttgcagaatacttgaagattagcaaggagataggtggggatgtccagaaacatgctgaaatggtgcacaccgggttgaaacttgagagagccctgctggttacagcttcacagtgtcagcagcctgcagagaataagctgtctgacttattagctcctattagtgagcagattaaggaggtcatcacattcagagagaagaaccgcgggtcaaagcttttcaaccatctgtccgccgtctctgagtctatccaagccctgggctgggtggccatggctccaaaaccaggcccttacgtcaaagagatgaatgacgctgcaatgttttacacgaacagagtgctgaaggagtacaaggacgtggacaagaagcacgtagattgggtgaaagcatatttgagcatttggactgaattgcaggcctacatcaaggagttccacacaaccggtctggcatggagctag

SEQ ID NO: 9497 - DNA, 1482 bp, synthetic construct
  misc_feature 1..1482: note = source = /note="Description of Artificial Sequence: Synthetic coding sequence"
  source 1..1482: mol_type = other DNA
agcgaggccgtgtacctgaacgacagcacctacgacggccacaccgtaggcggcctgcagtacgggggcctgggtcagctcgcggatggggtcgtagggctggacgatttccgcaaaagccaagagctgcgagtttggcccggctacgactatgtggggtggtccaatcattccttttcaagcggttatgtcgaaatggaatttgaatttgaccgactacgagcgtttcaagctatgcaggtgcattgcaacaacatgcacacccttggggctcgccttcctgggggcgtagaatgtcgatttaggaggggccctgcaatggcctgggaaggcgagcctatgaggcacaatttaggaggcaacttgggggatccacgggctagggcagtgtccgtgcccctcgggggccgcgtcgcccgatttctgcaatgtcgttttctttttgcaggaccgtggttattgttcagcgaaatatctttcatcagcgatgtggtgaataatagtagccctgccttgggggggacattccctcccgctccctggtggccgcccggccctcccccaacaaatttctctagcttagaactcgagccaagaggccagcagccagtcgcaaaagcggagggatcccctaccgccatcctcatcgggtgcctcgtggcaataattctcttgttactcctgatcatcgcactcatgctgtggcgactgcattggcgtcggctcctcagcaaggtgctagaaagccatccacgcactcgaagtccgggcctggtcggcattcggccaactcccctgccagttagtcctatggctctccgctgctgttcacccatccaacccactgcttctttctggccattaactccggtaccactggaagcccgggcccccccacacccccctggcccaaaccccccaacacctcgtggcgtaacaggggggaatacttatgctgtgccagcgttgcccccgggggctgttggcgacgggccgccccgcgtcgacttcccgagatcgcgtcttagatttaaggagaaacttggcgaaggtcaattcggggaggtccatctgtgcgaggtggactccccccaggacctggtgtctctggacttccccctcaacgtacggaaaggtcaccccctgctcgtggcagtcaaaattctgaggccagatgccactaagaacgctcgtaacgacttcctgaaggaggttaagataatgtcccgccttaaagaccctaatattatcagattgcttggagtgtgcgtccaggacgacccactttgtatgatcaccgattatatggaaaacggcgatctgaaccagttcttgtccgcccaccagctagaggataaggccgctgaaggcgcgcccggagatggccaggcagcccaaggaccgaccatatcttacccaatgctcctgcatgtagccgcccagattgcctccggcatgcggtacctggccacactgaactag

SEQ ID NO: 9498 - DNA, 2319 bp, synthetic construct
  misc_feature 1..2319: note = source = /note="Description of Artificial Sequence: Synthetic coding sequence"
  source 1..2319: mol_type = other DNA
atgcagttccagctgaccctgttcctgcacctgggctggctgagctacagcaaagcccaagatgattgcaatcgcggcgcctgtcatccaactaccggcgaccttctggtgggaaggaatactcagctaatggctagtagtacgtgcggactgtctagagcccagaagtattgcatcctgagttacttggaaggagaacaaaagtgttttatttgcgacagcagatttccctacgatccctatgatcaacctaacagtcatactatcgagaatgtgattgttagcttcgaaccggaccgcgagaaaaagtggtggcaatccgagaatggcttggaccacgtcagcatccgcctggatctggaagcccttttccggtttagccacctgattctgacattcaagacatttcgacccgccgctatgctggtggagcgctcaactgactacggtcataattggaaagtgttcaaatatttcgccaaggactgcgccactagtttccctaatatcacaagtggacaggctcagggagtgggagacatcgtctgcgattcaaaatactccgacatagagccgtctactggcggagaagtcgttctcaaagtgctggacccctcatttgagatcgagaacccatattccccctatattcaggatctagtgacactgacaaatctgcgtattaactttaccaagctgcacacactaggggacgcccttctcggcagaaggcagaatgactcactagacaagtattattatgcgctgtacgagatgatcgtacgcggaagctgcttttgcaatggtcatgcttctgagtgcaggccgatgcagaagatgcgtggcgacgtgttctcaccacctggcatggtgcacgggcagtgtgtatgccagcacaatactgatggacccaattgcgaaaggtgcaaggacttcttccaggacgctccttggaggcctgccgccgacctgcaggataacgcatgtcggtcttgctcctgcaattcacacagcagtaggtgtcatttcgatatgacaacctatctagcctctggggggttgagtgggggggtttgtgaagactgtcagcacaacaccgaaggacaacattgcgatcgttgccggcccctgttctaccgcgaccctctcaagacaatatctgatccctatgcttgtattccttgtgaatgtgatcctgacgggactattagtggcggtatctgcgtgtcccacagcgatcctgccctgggttcggtggccgggcaatgcctgtgtaaagagaatgttgagggagccaagtgcgaccagtgcaagcctaaccactatggcctgtctgctacggaccctctgggatgtcagccatgtgactgcaatccactggggtccctgcccttcctgacgtgcgatgtggatacaggacagtgcctgtgcctcagctatgtaactggcgcacactgcgaggagtgtactgtgggctattggggtctgggaaatcatttacacggatgcagtccgtgtgactgcgacatcggcggcgcttactccaacgtgtgcagtcctaaaaacggccagtgtgagtgcaggccccacgtcactggtagatcttgtagcgaacccgcccctggttacttctttgcccccttaaatttttacttatatgaggccgaggaggctacgacacttcagggtctggcgcctctggggtctgagacattcggtcagtcgccagcggtgcatgtagtgctcggggagccagtgccggggaatcccgtgacttggaccgggcctggatttgccagagtgctgcccggagccggcctccgatttgctgtgaataatattcctttcccagtggatttcacaatcgctattcattacgagactcagtctgctgcggattggacagtgcagattgttgtaaaccctcctggaggttccgaacactgtataccgaagacgttgcagagcaagccacagtctttcgccctccctgccgcgacgaggatcatgttgttgccaactcctatctgcctggaacccgatgtacagtactctattgatgtgtacttctcccagccactccaaggggagtctcatgcccacagtcacgttctcgtggacagcgccgctgtccaatggcacaacctaggttccctccagcccccccctccggaatgcaagcagttctcctgcttttcatttccatcatcatgggactaccgtcacccaccccctcatctcgccaatttctgcatcttctcaagggacggagttagccctcactggcctgggtggtcccagacgcctgacctgaggtag

SEQ ID NO: 9499 - DNA, 1371 bp, synthetic construct
  misc_feature 1..1371: note = source = /note="Description of Artificial Sequence: Synthetic coding sequence"
  source 1..1371: mol_type = other DNA
atgggccgggccggcgccgccgccgtgatccccggcctggccctgctgtgggcggtgggcctgggatctgccgcacccagccctcatctcagactgagttttcaggagttgcaggcttggcacggcctgcagacattcagtctcgaacggacgtgttgttaccaggcgttattggtggacgaagagagaggtaggctgttcgtcggagcggagaaccatgtagcgagtctcaacctagataacatctccaagcgagctaagaaactggcctggccagcacctgttgagtggcgtgaggaatgtaattgggctgggaaagatatcggaaccgagtgcatgaacttcgttaagcttttgcatgcttacaatcgcacgcatctgctggcatgtggaacaggcgcgtttcaccccacctgtgccttcgtagaggtagggcatagagcagaagagcctgtgttaagactggacccaggtaggatcgaggatggtaagggcaagagtccctatgatcctagacaccgcgccgcttccgtcctggtgggggaagaactgtatagcggtgtagccgcagatcttatgggccgcgacttcacaatattcaggtctctagggcaacgcccatctctgagaaccgagcctcatgactcaagatggctgaatgaacctaaattcgtcaaagtgttctggatccccgagtccgaaaatcctgatgacgataagatctactttttctttagggagactgctgtggaggcagctcccgcattggggagattatccgtatctagagtagggcagatatgtaggaacgatgttggtgggcagcgatccctggtgaacaaatggactaccttcctgaaggccagactggtctgttccgttcctggcgtagagggtgatacccatttcgatcaacttcaggatgttttcttactctcatcccgcgatcaccgtactccattgctgtatgccgtattcagtacgagcagctcgatctttcaaggctctgcagtgtgcgtatactctatgaatgacgtccgccgggcatttttgggccctttcgcgcacaaggaaggacccatgcatcagtgggtgtcctaccaggggcgggtgccctacccacgtcaggcttgcgctccagctcggccgctggccccctccgtacctccacgtactagccagactatgtcgtctagccttagggggacaacaccttcttgcaccaccctgagctgtccattgggaggtgcactattctcctacaagcttgagccaattacaccgtccctgaaactgccgcggacgggactacagcccctgacagataccatgacaagctcgagcctggcccagaccttagcaaggtgctag

SEQ ID NO: 9500 - DNA, 333 bp, synthetic construct
  misc_feature 1..333: note = source = /note="Description of Artificial Sequence: Synthetic coding sequence"
  source 1..333: mol_type = other DNA
ctgttcatgctgcacaagatcgtgcaggtgtacaacagcgacgtgatcgataagcaatcggccagtatgacgagtgataacgctgatgacaaggcggtcataatcctggtgcctgtacggctgggaggcgaacgcaccaatacagactatctggagttcgtgaaaggcattctgtcattagagtattgtgtgggaattatcggaggaaagcctaagcagagttattattttgcaggtttccaggatgacagccttatatatatggatccccattactgtcagtcttttgtggacgtgagcatcaaggacttccctctggaggtcattctgtag

SEQ ID NO: 9501 - DNA, 420 bp, synthetic construct
  misc_feature 1..420: note = source = /note="Description of Artificial Sequence: Synthetic coding sequence"
  source 1..420: mol_type = other DNA
atgggccccgaggccctgagcagcctgctgctgctgctgctggtggctagtggggatgccgatatgaagggccacttcgacccagcaaagtgcaggtacgccctgggtatgcaagatagaaccatccccgattcagacatctcagcttcatcgtcctggtcagacagtactgctgctcgccattcacgcttggagtcttcggatggggacggggcatggtgccccgccggttctgtgtttcccaaggaggaagaatatctgcaggtggatttgcagagactgcatctggtagccttggtcggaacacagggtagacatgccggtggcctcgggaaggagttctcacgatcatatcgcctgagatattctcgggacgggcgaaggtggatggggtggaaggaccggtggggccaagaatag

SEQ ID NO: 9502 - DNA, 570 bp, synthetic construct
  misc_feature 1..570: note = source = /note="Description of Artificial Sequence: Synthetic coding sequence"
  source 1..570: mol_type = other DNA
atgctgggcatcaccagctgcagcgaccagcaggccaaggagggcgaaggcctggaaggaagtagtaccggctctagcagcggtaatcatggcgggagcggaggcggcaacggacacaagcctgggtgtgaaaaacctggcaatgaggcgcgcgggtcaggcgaatccggcatccaaaattcggaaacttccccaggcatgtttaactttgataccttttggaaaaactttaagagcaagctgggcttcatcaactgggacgccataaataagaatcaagtgccgccaccatccacccgggccctactctattttagcagactgtgggaggactttaagcaaaacacccccttccttaactggaaagctattattgagggcgccgatgcaagcagcctgcagaagagagccggtcgtgatgaccaaaactataattacaaccagcatgcttaccccactgcttatggaggaaagtactctgtgaaaacccctgcaaaaggaggagtaagtcccagcagctctgcgtccagggtacaacccgggctgttgcagtgggtgaagttttggtag

SEQ ID NO: 9503 - DNA, 438 bp, synthetic construct
  misc_feature 1..438: note = source = /note="Description of Artificial Sequence: Synthetic coding sequence"
  source 1..438: mol_type = other DNA
atggccgacatgcagaacctggtggagcggctggagcgggccgtggggagactggaagccgtctcacataccagtgatatgcaccgaggctacgcggacagcccaagcaaagccggcgcagcaccttacgtgcaagcttacattaaggagttccacacaaccggcctcgcttggtccaaaaccggacctgtagcaaaagagcttagcggtctgccatcaggtccaagcgccggaagttgccctccccctccgccaccatgcccacctccccctcccgtgtctactatctcttgttcttatgaatctgcttcccgcagcagcttattcgcgcagattaatcagggagagagtataacacatgctttaaagcatgtcagcgatgatatgaagacccacaagaacccagcactcaaagcgcagtccggccccgttagatag

SEQ ID NO: 9504 - DNA, 264 bp, synthetic construct
  misc_feature 1..264: note = source = /note="Description of Artificial Sequence: Synthetic coding sequence"
  source 1..264: mol_type = other DNA
tgcaagcggaagccctacctgctgcccagcatccgggagggcgccaggctgggtatccaggagtgcggaagccagttccgccatgagcggtggaattgcatgataaccgctgcagccacgaccgccccgatgggtgcctcacctctttttggctatgaactgagctcaggatgtaggcaggtcgatgtgtctcgcttgccactgccgcggagttttcgattactatgctgcgagaacatgctcgagaatcatgtgtttttctag

SEQ ID NO: 9505 - DNA, 2535 bp, synthetic construct
  misc_feature 1..2535: note = source = /note="Description of Artificial Sequence: Synthetic coding sequence"
  source 1..2535: mol_type = other DNA
atgggccccggcgcccccttcgcccgggtgggctggcccctgcccctcttggtagtcatggcggctggggtggctcccgtgtgggcctcccattccccccacctgccgcggccccactcccgggtgcctccacatccctccagcgagcggcgtgccgtctacataggcgcgttgtttccgatgagcggcggctggcccggaggtcaggcatgccagcccgcggtggagatggccctggaggacgtgaatagtcgacgtgacatcctgcctgattatgagctcaagctgattcatcatgatagcaaatgtgacccaggtcaagccaccaaatacctgtatgaacttctatacaatgaccccataaagattatcctcatgcctggatgttcctcggtgtctaccctcgtcgcggaggctgccaggatgtggaatctgatcgtgctctcatatggttcatctagtccagccttgtccaacagacagagatttcccaccttcttccgcactcacccttcagccacgctccataacccaaccagggtgaaattgtttgagaaatgggggtggaagaagattgcaacaatccagcagaccaccgaagtgttcacttccactttggatgatctcgaggagagggtgaaggaagccggtattgaaataacttttcggcagagcttcttcagtgatcctgctgtaccagtgaagaacctaaagaggcaggatgccagaatcatcgtgggactgttttacgaaactgaagctcgcaaggtattctgcgaggtgtacaaggaaaggctatttggaaagaaatacgtgtggtttttgatcggctggtacgcagataattggttcaaaatctatgacccttcaattaactgtaccgtggatgaaatgactgaggctgtggagggccacattacaacagaaatagtgatgcttaatcccgcaaacactcgcagtattagcaacatgactagccaggaattcgtggaaaaactgacaaagagactcaaaaggcatcccgaggagaccggaggcttccaggaggccccattggcatatgacgccatctgggccctcgcattagctctgaacaagacctccgggggcggcggaaggtcgggtgttcgtctcgaggactttaattataataatcaaacaattacggatcaaatatacagggccatgaattcctcatcatttgagggggtgagtgggcatgtcgtgttcgacgcatcgggctcccgtatggcatggacgcttatagaacagttgcagggtggttcttacaagaagattggctattacgacagtaccaaggatgatctgtcttggtcaaagactgataagtggatcggggggtctccccccgctgaccagaccctagtgattaagacatttagatttctcagccaaaagctgttcatctcagtgtcggtgctttcttcactgggaattgtcctcgccgtggtctgtctgagctttaacatctacaattctcacgtccgatacatccagaactcccagcccaatcttaataacctgacagccgtcggatgttccctcgctctggcagcagtgtttcctttaggcctcgacggctatcatatcggacgcaatcaatttccttttgtgtgccaagcgcgtctctggctactgggtctggggttttctctcgggtacggcagcatgttcaccaagatttggtgggtgcacacggtctttacaaagaaggaggaaaagaaggagtggaggaaaacattggagccatggaaactgtacgctaccgtgggcctgctggtcggcatggatgttctgaccctggccatttggcagattgttgatcccctgcaccgcaccatcgagaccttcgctaaagaagagcccaaagaggacatagacgtgagtatccttccgcagctcgaacactgcagttcccggaaaatgaacacgtggctaggaattttctacggttacaagggcctgctgctgctactgggtattttcctggcatacgaaaccaagtctgtctcaactgagaagataaacgaccatagggccgtcggcatggcgatttataatgtggctgttctgtgtctcattacggcacctgttaccatgatcctctcttcccaacaggatgccgctttcgcctttgcctccctggccattgtgttctcctcttatattaccctggtggtactgtttgtacccaagatgcgccggctgataacaaggggggagtggcagagtgaggcccaagatactatgaagaccggctcttcgaccaacaataacgaagaggagaagtctcgactcctggaaaaagaaaatagagagctggaaaagattatagccgagaaggaggaacgggtctcagagcttagacaccaacttcaatctaggcaacagttgaggtctcggagacatccacccactccaccagagccgtctggaggcctgcccagaggacccccagaaccccccgacagactcagctgtgatggatcacgggtacatttactgtacaaatag

SEQ ID NO: 9506 - DNA, 2631 bp, synthetic construct
  misc_feature 1..2631: note = source = /note="Description of Artificial Sequence: Synthetic coding sequence"
  source 1..2631: mol_type = other DNA
atgggccccgaggccctgagcagcctgctgctgctgctgctggtggccagtggtgatgctgatatgaaggggcacttcgatccagccaaatgcagatatgcgttgggtatgcaggaccgaactattcctgacagcgacatttctgctagctcgtcatggtcagactcaaccgcagcacggcactccaggctggagagctctgatggagatggcgcctggtgtcctgctggaagcgtttttcctaaggaagaggagtatctgcaggtggatctacagagactccacctcgtggcactggttggaacccaaggcaggcacgcaggtggcctcgggaaggaattcagtcgaagctaccgcctcaggtattcgagagatgggcgcagatggatgggttggaaagacagatggggacaggaagtcatctcaggcaatgaagaccctgagggcgtcgttctaaaagatctgggacctccaatggttgctagactggtgcgcttctaccctagggctgatcgcgtcatgagcgtttgcttgagagttgaactgtacgggtgcctttggcgcgacggactgctcagttatacagcaccggtgggacagactatgtacctatccgaagccgtgtatctcaacgacagtacctacgacggccacacagtcggggggctgcagtatgggggactcggacagcttgctgatggggttgtgggcctggatgattttcgcaaatcccaggagctacgcgtgtggccaggatatgactacgtgggttggtccaatcacagttttagcagtggttacgtggaaatggaattcgaattcgacaggttacgggccttccaagctatgcaggttcattgtaataacatgcataccctgggagcgaggctgccaggcggagtggaatgccgctttcgacgcggccccgccatggcctgggaaggtgagcctatgcggcataatttgggtgggaacctgggtgatcctagagcccgcgcagtatcagttccacttggggggagagtggcgcgcttcctgcagtgtcgctttttgttcgcaggtccctggctgctcttcagcgagatcagcttcatttccgacgtggtcaataattcttcacctgcccttggtggtacgtttccaccggcgccctggtggcccccaggtccgccgcctactaacttttcttctctggagcttgagccaagaggtcaacagcccgtggctaaagccgaaggatccccgactgcaattctcatcggctgcctggtggctattatcctccttttgttattgatcatcgcacttatgttgtggcggctgcattggcgacgacttctatctaaggctgaaagaagggtcctcgaggaggaactgaccgtgcatctctccgtacccggcgatacaatcctcatcaacaaccgtcccggcccccgagagccccctccataccaggaacctcgtccgaggggcaaccctccacactcagctccatgtgtacccaacggtagtgcatactctggtgactacatggagccagagaagcccggcgcacccttgcttccacccccccctcaaaattcagtcccgcactatgcggaggcagatattgttacgttgcagggcgtcaccggaggcaacacctatgcagtgcctgcgttacctcccggcgccgtgggcgacgggcctccccgggtggatttcccacggtctcgcctccggttcaaggagaagctcggcgagggacagtttggagaagtgcacctttgcgaagttgattcgccacaggatctcgttagtctcgatttccctctaaatgttcgaaaagggcatccactcctcgtggcggtgaaaattttgcgaccagatgctacaaaaaacgcacggaacgactttctgaaggaagtgaaaatcatgtctcggttaaaggatccaaacattatccgtctgctcggggtttgcgtccaagacgaccccctctgcatgattaccgactatatggagaatggcgatctaaaccagttcctcagtgcacatcagctggaggataaggccgcagaaggagccccgggcgatggtcaagccgctcagggaccaacgatcagttatccaatgctgttgcacgtcgctgcacaaatcgcgagcggaatgcggtacctagccactttgaacttcgtccacagggacctggcaacgaggaactgcctggtgggcgaaaatttcacaatcaagattgcagactttgggatgtctagaaatctctatgcaggggattactacagagtacagggcagggccgtgctgccgattcgctggatggcgtgggagtgcatcctgatgggtaagttcacaactgcaagtgacgtttgggccttcggcgtcactctgtgggaggttctgatgttgtgtcgcgctcagccatttgggcagctgacggacgagcaggtgattgaaaacgctggagaattcttcagggatcagggccgccaggtttatctgtctcgcccaccggcctgtccacagggcttgtacgaacttatgctgagatgctggtctcgcgaaagcgaacagagacccccattttcccagcttcaccgattcctcgccgaagatgcacttaacaccgtatag

SEQ ID NO: 9507 - DNA, 942 bp, synthetic construct
  misc_feature 1..942: note = source = /note="Description of Artificial Sequence: Synthetic coding sequence"
  source 1..942: mol_type = other DNA
atgagcgacctgctgctgctgggcctgatcggcggcctgaccctgttactgctgttgacactcttagccttcgccggatattctgggttgctagcaggagtggaggtgtccgcaggcagcccgcctattaggaatgtgacagtggcttataaatttcacatgggactttacggagagacaggccggctgttcactgagtcgtgtagtatcagccccaaactgcgatcaatcgccgtctactacgacaacccgcacatggtccccccggacaagtgccggtgcgctgtgggtagcatcctgtctgaaggcgaggagtcgccttcccctgagttaattgacctgtaccaaaagttcggctttaaggtattttccttcccggcaccctctcatgtggttactgccacattcccgtataccaccatactttccatctggctcgcaacccgaagggtccacccggccctcgatacgtacattaaggaacggaaactctgtgcttatccccggctggaaatctatcaggaggaccagatccacttcatgtgtcccctggctaggcagggggacttctacgttccagagatgaaggaaactgaatggaagtggcgagggttggtggaggcgatagatacccaagtggatggcaccggggccgatacaatgtccgacacctcctctgtgtcattggaagtgtcgccaggatcccgcgaaacgtccgctgccactctctcgcctggagcaagttcaaggggatgggacgacggggacacccggtctgagcactcctactccgagtcaggggccagtggcagctctttcgaggagctcgatctggagggggagggccctctgggcgaatcaaggctcgaccctggtacagagccccttgggaccaccaagtggctgtgggagcccactgctccagagaagggaaaagagtag

SEQ ID NO: 9508 - DNA, 843 bp, synthetic construct
  misc_feature 1..843: note = source = /note="Description of Artificial Sequence: Synthetic coding sequence"
  source 1..843: mol_type = other DNA
atgaagaccttcacctggaccctgggcgtgctgttcttcctgctggtggatactggccattgtaggggtgggcaatttaagatcaagaaaattaaccagcgccgctatcctagaactattaaggatatgattactcgtatggatttggagaacttgaaggacgtgttgtctagacagaagagggaaattgacgttttgcagttagtggtagacgtggatggcaacatcgtgaatgaagtgaaactcctccgtaaagagagtcggaatatgaatagccgcgtgacgcagctctatatgcagctactgcacgaaatcatacgcaagagagataactctctggagttgagtcaactggagaacaagattctcaacgtgacgacagagatgctaaagatggctactagataccgggagctggaggtcaaatacgccagtctcactgatttggtgaataatcagagcgttatgattacacttctggaggagcaatgcctccggattttcagccggcaggacacccacgtgtcaccaccacttgtgcaggttgtcccccagcacattcccaacagtcagcaatatactcctggtctgttgggggggaatgagatccaaagggatccaggctaccctcgggatctgatgccgcctcctgatttggccacttcccccaccaagagcccgttcaagataccaccagtcacttttataaatgaaggacccttcaaggattgccagcaagccaaagaggccgggcacagcgtgaacggcattttttgggcagagtataggggtggtagttactcacttcgcgccgtgcagatgatgataaagcctatcgattag

SEQ ID NO: 9509 - DNA, 522 bp, synthetic construct
  misc_feature 1..522: note = source = /note="Description of Artificial Sequence: Synthetic coding sequence"
  source 1..522: mol_type = other DNA
atgcactggaagatgctgctgctgctgctgctgtactacaacgccgaggctagcatgtgtcaccgctggagcagggcagtgttgtttccggccgctcaccgacccaagagaagctcttctctgccactcaaccctgtgctacagacctccttggaagaggtcgaattgttgtatgaatttttgctagcagagctggagatttccccggatctccagatctcaatcaaagacgaagaactcgccagtctgcgtaaggcctctgatttcagaactgtctgcaacaacgtgattcctaagtcaatccctgacatccgtcggctgagcgccagcctgtcctcacatcccggtatactcaaaaaggaggacttcgagcgtaccgttctgacgctggcctataccgcgtaccgtaccgccctgagccacggccatcagaaggatatatgggcccagtcactggtcagcctgtttcaggccctccggcacgacctcatgcggagttctcagcccggagtgccaccgtag

SEQ ID NO: 9510 - DNA, 309 bp, synthetic construct
  misc_feature 1..309: note = source = /note="Description of Artificial Sequence: Synthetic coding sequence"
  source 1..309: mol_type = other DNA
atggagcggggcgccggcgccaagctgctgcccctgctgctgctgctccgcgccacagggtttacttgcgcgcagacggatggccggaatggctataccgcagtcatcgaggtgacaagcgggggcccctggggagattgggcctggcctgaaatgtgcccggacggcttcttcgcctccggcttcagcttgaaggttgagcctccgcagggtatccccggcgatgacaccgcgctgaatggcattaggctgcattgtgcccggggtaatgtcctaggcaatacccatgttctaggccgcatggagtag

SEQ ID NO: 9511 - DNA, 351 bp, synthetic construct
  misc_feature 1..351: note = source = /note="Description of Artificial Sequence: Synthetic coding sequence"
  source 1..351: mol_type = other DNA
atggccgccggcagcgcccccatgcagctgcacctgcgggccaccatccgcatgaaggatgggctgtgtgtgcctcgcaaatggatctatcacctgaccgagggctctactgatctgcgaacggaaggtcggccagacatgaagactgagctgttttcatcctcgtgccctggtggaatcatgctgaacgaaaccggccaagggtaccagcgcttcctcctatacaatcgctcaccacacccccccgagaaatgtgtggaagagtttaaatccctgaccagttgtttagactccaaagccttcttgcttacgccccgcaaccaggaggcctgtgagttgtcaaataattag

SEQ ID NO: 9512 - DNA, 1137 bp, synthetic construct
  misc_feature 1..1137: note = source = /note="Description of Artificial Sequence: Synthetic coding sequence"
  source 1..1137: mol_type = other DNA
tgatacagcggcgactacatggagcccgagaagcccggcgcccccctactgcccccccccccccagaacagcgtgcctcactatgcagaggctgacattgtgacgcttcaaggggtgacaggcggcaatacgtacgccgtaccagccctgcccccaggcgcagtgggggacgggcctcctagagttgactttccacgatctaggctgaggttcaaagagaaattgggagaggggcaattcggggaggtgcacctgtgtgaggtggattcacctcaggacttagtgtcacttgactttcctctgaacgtacgcaaaggacatcccttactcgtcgcggttaaaattctccgcccagacgccacgaagaatgcgtcattctccttattctctcggaatgacttcctcaaggaggtgaaaatcatgtctcgactgaaggaccccaacatcataaggttacttggcgtctgcgtgcaggatgaccctctgtgtatgatcacagattatatggaaaacggagacctgaaccagtttctctcggcacaccaactcgaggataaagctgcagagggtgctccgggggacggccaggccgctcaagggcctacaattagttacccaatgctgctgcacgtggccgctcagattgcatctgggatgcggtacctggctacgctcaattttgtccaccgcgaccttgcaacccgaaattgcctggtcggcgagaatttcacgattaagattgccgacttcggcatgagccggaatctgtacgctggagactactaccgggttcaggggcgtgcagtgctgcccatacgatggatggcgtgggagtgtattctgatgggaaagttcacgacagcaagcgacgtatgggcattcggtgtgaccttgtgggaagtgcttatgttgtgtagagcacaacccttcggccagttaactgacgagcaggttatagaaaacgctggcgagttcttccgggatcaggggaggcaggtgtacctgtctcgacctcccgcctgtccacaaggtctctacgaactgatgttgcgctgttggtctcgtgaaagcgagcagagaccaccatttagccaacttcatcggtttctcgctgaggacgctcttaatacggtgtag

SEQ ID NO: 9513 - DNA, 942 bp, synthetic construct
  misc_feature 1..942: note = source = /note="Description of Artificial Sequence: Synthetic coding sequence"
  source 1..942: mol_type = other DNA
atgagcgacctgctgctgctgggcctgatcggcggcctgaccctgctgctcttactgactcttcttgcctttgccggttactcaggcctcttggctggagtggaagtgagcgccggaagtcctcctattcgcaacgtgacagtggcatataaattccatatgggcctgtatggagaaacaggaagactttttacggagtcttgtagcataagtccaaagctgcgtagcattgcggtctactatgataacccccacatggtgccccctgataagtgcaggtgcgccgtgggcagtatcctgagtgaaggagaagagtcaccctctccggagctcattgatctttatcagaaattcggttttaaggtgttttccttcccagcacctagccatgttgtgactgcgacctttccttacaccacaattctgtcaatctggctggcgaccagacgcgtacatcccgctctcgacacttacattaaagagaggaaactgtgtgcataccctcggctcgaaatataccaggaagatcagatccactttatgtgtcctctcgcacgccaaggcgacttttacgtgccagaaatgaaggagacggaatggaagtggagaggcctggtggaggccatcgacactcaggtcgatggcacaggcgctgacaccatgtctgatacttcctctgtgtcactggaagtcagcccgggatcacgagagacatcagcagctacactctctccaggagcctctagcaggggctgggacgacggggacacaaggtctgaacactcttattctgaaagcggcgctagcggctcttcctttgaagaactagatctggaaggagagggccctctgggagagtccagactagacccgggcaccgaaccgcttggcactaccaagtggctgtgggagcctaccgcacctgaaaagggaaaggaatag

SEQ ID NO: 9514 - DNA, 420 bp, synthetic construct
  misc_feature 1..420: note = source = /note="Description of Artificial Sequence: Synthetic coding sequence"
  source 1..420: mol_type = other DNA
atgggccccgaggccctgagcagcctgctgctgctgctgctggtggcatctggagacgcagacatgaagggacattttgaccctgcgaagtgtcggtacgcactgggaatgcaagatagaactatcccggactccgacatttccgcatctagttcatggtccgattcaacagctgccagacactctcggctcgagagcagtgatggcgatggggcatggtgtcccgcaggcagtgtttttccaaaggaggaggagtacttacaggtggatttacagaggctacacttagtcgccttggtgggaacacagggaagacatgcaggcggtttgggaaaagaatttagccggtcttatcgattgcgatacagtcgcgatggacgtcgctggatgggctggaaagatagatgggggcaggaatag

SEQ ID NO: 9515 - DNA, 342 bp, synthetic construct
  misc_feature 1..342: note = source = /note="Description of Artificial Sequence: Synthetic coding sequence"
  source 1..342: mol_type = other DNA
atggacaacgtgcagcccaagatcaagcaccggcccttctgcttcagcgtcaaggggcacgtgaagatgctcagactggccctgaccgtaacgagtatgactttcttcatcatagcccaggcccctgaaccttacattgtcattaccggctttgaggtaactgtgattctgtttttcattctattgtacgtcttaaggctggaccgccttatgaagtggctattctggcctctcctggatattataaatagtctggttactacagtctttatgctcattgtgtctgtactggcactgattcccgagaccactacactaacggttggtggtggcctattttag

SEQ ID NO: 9516 - DNA, 465 bp, synthetic construct
  misc_feature 1..465: note = source = /note="Description of Artificial Sequence: Synthetic coding sequence"
  source 1..465: mol_type = other DNA
atgttcggctggggcgacttccacagcaacatcaagaccgtgaagcttaatctcttaatcacaggcaagattgttgatcacggaaatggaacattttctgtctattttcggcacaatagtacggggcaggggaacgtcagtgtgtccctggtcccccctacaaagattgtcgaattcgatttggcccagcaaaccgtgattgacgcgaaggatagtaaatcctttaattgcagaatcgagtacgaaaaggtggacaaggctactaagaacacactgtgtaactacgatccgtccaagacctgctaccaggagcaaacccaatctcatgtttcctggttatgtagtaagccttttaaggtgatatgcatctatatttctttctacagcactgactacaagctggtgcaaaaggtctgccccgactacaattaccatagcgacacaccatacttcccatcaggatag

SEQ ID NO: 9517 - DNA, 531 bp, synthetic construct
  misc_feature 1..531: note = source = /note="Description of Artificial Sequence: Synthetic coding sequence"
  source 1..531: mol_type = other DNA
atggccgacatgcagaacctggtggagcggctggagcgggccgtgggccgcctggaggctgtatctcacacctcagatatgcaccgcggttacgctgactcacctagcaaagcgggggccgctccctacgtgcaggcattcgattcactacttgctggtcctgtcgctgaatacctgaagatcagtaaggagattggcggcgatgtccagaaacatgcagagatggtgcacactggtcttaagctggagcgggcattgctcgtcacagcgagccaatgccaacagcccgccgagaataaactgagtgaccttctggcccctattagtgagcaaattaaggaagtgattacatttcgtgagaaaaaccgcggaagcaagctgttcaatcacctcagcgctgtgtctgagtctattcaggcactgggttgggtggctatggctccaaagcctgggccatacgtcaaagaaatgaatgacgctgccatgttttacacaaatagagtgctgaaggaatataaggacgtagactag

SEQ ID NO: 9518 - DNA, 2535 bp, synthetic construct
  misc_feature 1..2535: note = source = /note="Description of Artificial Sequence: Synthetic coding sequence"
  source 1..2535: mol_type = other DNA
atgggccccggcgcccccttcgcccgggtgggctggcccctgcccctgctcgtcgtgatggcggccggcgtggcaccggtgtgggcctctcacagtcctcatctcccacgaccccattcccgggtgccaccacacccttcatctgagaggcgagcagtttacatcggggccctcttccccatgtcaggtggttggcctggcggtcaagcctgtcaacccgccgtcgagatggcattggaggatgtgaacagccggcgcgacatcctgccggactatgagttgaagttgatacaccacgatagtaagtgcgaccctggtcaagccacaaaatatctgtatgagctgctgtacaacgatcctatcaaaattattttgatgcccggttgcagctccgtatcgactctggtggccgaggcagctaggatgtggaacctgattgtactgtcctatgggtcgtcatcccctgccctctcaaataggcagaggtttcccactttttttagaacgcacccgtcggcaaccctgcacaaccctacacgggtgaagctgtttgaaaagtggggatggaagaaaatcgcgactattcagcaaacaacagaagtctttacatccacactcgatgacttagaggaacgtgtgaaggaggccggtatcgaaattacgtttagacaatccttcttttctgatcctgctgttccagtgaagaatctcaagcgtcaggacgcccgcattatcgtaggacttttctacgagaccgaggcaagaaaagtcttttgcgaagtttacaaggagagactgttcgggaagaaatatgtttggttcctgatcggctggtatgccgataattggttcaaaatatacgatccaagtataaattgtactgttgatgagatgactgaggctgtagaggggcatatcaccacggagattgtgatgctgaatccggccaatactaggtccataagcaacatgaccagtcaggagttcgtggagaagctgacgaagaggctgaagcgtcaccccgaagaaaccggtggttttcaggaggctccattggcttatgacgcaatctgggcgctggcgcttgccctaaataagaccagtggaggcggcggccggagcggagtccgattagaggacttcaactacaataatcagaccattacggatcagatctaccgggctatgaactccagctcttttgagggcgtgagtggacacgttgtcttcgatgcatcggggagtcgcatggcgtggacgctcattgaacagctccagggcggttcctataaaaaaattgggtactacgactccacaaaagatgacctctcatggagcaagaccgataaatggattggcggctccccccccgccgatcaaacgttggttatcaagacttttcgcttcctctcgcagaagctctttatctcagtctctgttctatcttccctgggcatcgtactggcagtggtgtgcttaagcttcaacatttataattcgcatgtgaggtacatccagaattcacagccgaatctgaataacctcaccgccgttggctgttcattagccttggccgctgtgtttccgctagggttagacggctaccacatcgggcgcaaccagtttccattcgtgtgccaggctcgcctgtggctgctgggtctgggattctctttggggtacggcagcatgttcaccaaaatctggtgggtgcatacagtcttcacaaaaaaagaagagaaaaaggagtggcggaaaactttggaaccgtggaaactttacgccacagtgggcctcctggtggggatggatgtcctcaccttggctatctggcagatagtggacccactgcaccgaacgatagaaacatttgcaaaggaggagcctaaagaggatattgacgtatctattctgccacagctggagcactgtagctcacgaaagatgaacacttggttaggcatcttctacggatacaaaggactacttctgttacttgggatttttctagcatacgagactaagagcgtgtccactgagaaaatcaatgaccaccgagccgttggcatggccatatataatgtggctgtcctgtgcctgattacagcacccgtgacgatgattctctctagtcagcaagacgctgcgttcgctttcgcatccctggcgatagtgttcagctcatacataactctggtggtgctgttcgtcccgaagatgcgtaggctgatcacccgcggggaatggcagagtgaggctcaggatacaatgaagacaggctcttctaccaataacaatgaggaagagaagtctcgcctgctcgagaaggagaatcgggagcttgagaagatcattgctgaaaaagaggagagggtgtccgagctgcgacaccaactgcagtccaggcagcagctgaggtcaaggagacatccacccacacctccagagcccagtggcggattgccaagaggccctcccgagccacccgaccgcctgtcctgtgacgggtcaagggttcatctgttgtataaatag

SEQ ID NO: 9519 - DNA, 2055 bp, synthetic construct
  misc_feature 1..2055: note = source = /note="Description of Artificial Sequence: Synthetic coding sequence"
  source 1..2055: mol_type = other DNA
tgaccccggagcagcacccacgtgcccctggtgctgcccctgctggtgcttctgcttctcgcaccggcccgccaggcagctgctcagcggtgtcctcaggcttgcatctgtgataacagtcggagacatgttgcctgcaggtaccagaacctgacggaggtgccagatgctatccccgaacttacacagaggctcgatctccagggtaacttgctgaaagtgatacccgcagccgcattccaaggtgtccctcacctgactcaccttgacttgaggcattgtgaagttgaattggtcgcggagggcgccttcagggggttgggccgcctcctgctactgaatctggcttccaaccacctcagagaactgcctcaggaggcactggacggcctaggaagcctgcggagactagagcttgagggaaatgccctggaagaactgcgacccggtactttcggtgcactgggagcactggccaccttgaatctagctcacaacgctctcgtgtaccttccagccatggccttccagggactattgcgtgtgaggtggctgcgtctgagtcataacgcactgtccgtgctggctccggaggcacttgccggattgccagcactcaggcggttgagcctgcatcataatgagctccaggcactccctggacctgtactgtctcaggccagggggctggctcgcttggaattaggccataatccattaacctatgccggggaagaagatggcctggcgctccccggacttcgggagcttcttctggacggaggcgccctccaggccctgggtcccagggcctttgcccactgtcctcggctgcacacgctggatctgcgcggcaatcagcttgatactctgccccctctgcagggacccggacaactcagaaggctgagactgcagggaaaccctctctggtgtgggtgtcaggcacgacccctcctcgaatggctggcaagggcccgggttcggagcgacggcgcatgtcagggcccccggagactgcgcggggaagctctggatgccctccgtccctgggatttaagatgtcccggtgatgccgcgcaggaggaggaggaattggaggaacgcgctgttgctgggcccagggctccaccccgagggccacctcggggtcctggggaggaaagagcagtggccccttgcccccgggcgtgcgtgtgtgtgccagaaagccggcactccagctgcgaagggtgtggcctgcaagccgtgccccggggattcccctctgacacgcaattgctggaccttcgacgaaatcactttccgtcagttccacgtgcggccttccctggcttgggccatctggttagcctgcacctccaacattgtggaatcgcggagttggaagctggcgctctggccggtctgggccggctcatttatctgtatttatccgacaatcaactggccggactgagtgccgccgcccttgagggagcccccaggctgggttatctttatttggaacgcaatagattcctccaggtaccgggggctgctctgagggccctcccaagcctgttctccctccacctgcaagacaacgctgttgataggttggccccaggtgatctgggccgaacacgcgcgctgcggtgggtgtacctgagtggaaacagaattaccgaagtcagtttgggcgcacttggcccagcgcgagagttagagaaactgcaccttgatcgcaatcaactccgcgaggtgcccactggtgcactggaggggctgccagccctgctggagttacagctgtcgggaaaccccttacgtgcccttcgcgacggagcttttcaaccagttggacggtccctgcagcatctatttctgaacagcagtggactggagcagatttgtcctggagccttcagcggcttgggacccgggctccagagcttacacctccagaagaatcaactgcgtgctctgccggccctgccatctgcacgaagaacaccaattaaaggccgacaatgcggcgccgataaagttggcaaggagaaagggaggctctag

SEQ ID NO: 9520 - DNA, 2259 bp, synthetic construct
  misc_feature 1..2259: note = source = /note="Description of Artificial Sequence: Synthetic coding sequence"
  source 1..2259: mol_type = other DNA
atggcccggcacctgctgctgcccctggtgatgctggtgatcagcccaatcccgggcgccttccaagactccgccctgtcccccacccaggaagaaccggaggacttggattgcggcagaccagaacccagcgctcgaatagtcggcgggtcaaacgcgcagcccggaacttggccatggcaggtgagcctccatcacggcgggggtcacatatgcggtggttcactgattgctccctcgtgggttctgtctgccgcccattgtttcatgactaatgggacccttgaacctgcggctgaatggtctgtcctgctgggagtgcacagtcaggatggccctttggacggggctcacactagggccgtagccgctatcgttgtacctgccaattattcccaggttgagttgggcgccgatctggcattactgcgcctagcttcgccagctagcttaggacccgctgtctggcccgtgtgcctcccccgcgcttctcaccgcttcgttcacggcacagcatgttgggctacaggctggggcgatgttcaagaagcagacccgctgcctctgccctgggttctccaagaggtggagctgcgcctgctcggcgaagcaacctgccagtgcctctacagccaacctggtcccttcaatctgaccctgcaaattctgcccggcatgctgtgtgccggttatccagaagggcggagggacacctgccaaggggatagtggggggcccctggtatgcgaagagggagggcgctggttccaagcaggcatcacatccttcggatttggatgcgggcgcagaaatcgaccaggggtcttcactgccgtggctacttacgaagcatggatacgagagcaagtgatgggatccgaaccgggcccggcctttccaacccaaccccagaagactcagagcgatcctcaagaacctagggaggaaaactgcacaatcgctttgcctgagtgtggcaaagcccctcggcccggcgcctggccctgggaggctcaggtaatggtgcctggcagcagaccctgccacggcgcactggtcagcgagtcatgggttctggctcctgcatcttgctttctggatcctaattcctcagactctccacctcgtgatttggatgcctggagagtgctgttgcctagcagacccagggctgagcgagtcgcgagacttgtacagcatgagaacgcctcttgggacaatgcaagcgacttggctctgctgcagctgagaactcccgtgaacttgtccgccgcgagcaggccagtgtgcttgcctcatccggagcactactttctgcccggcagtcggtgccgactggcacgctggggcagaggcgagccagccttgggtcctggggccttgctagaggcagaactcttgggcggttggtggtgtcattgcctctatggccgccagggcgcagcggtcccattgcctggggatccaccccacgcactgtgtccggcataccaggaaaaagaagaggtcggcagctgctggaacgatagcaggtggagtctactttgtcaggaagagggaacttggttcctcgcgggaatcagagacttcccctcggggtgcctcaggccacgcgcattctttcccctgcaaacgcatggcccttggatttctcacgtgacaagaggcgcttatcttgaggatcagctggcttgggattggggaccagatggcgaagagactgaaactcagacttgcccaccacacaccgaacacggcgcctgtgggctgcgcctggaagcagctcccgtgggcgtgctttggccctggctcgctgaggtgcatgttgccggcgatcgggtttgtaccgggatcttactggctccaggatgggtgctggcagccacccactgcgtcctcagaccgggctccactactgtgccctatatcgaagtgtacctgggtcgggccggcgcttccagtttaccacagggtcaccaaatgacatctgcccctcccctgctctgccagatgactgaaggcagctggattctagtgggcatggcagtccagggctctagagaactgttcgcagcaatcggtcccgaggaggcttggatttcccaaaccgtgggggaagccaactttctacctccgagcggatcgccccattggcctactggcggcagtaacctctgcccccccgagctggccaaagctagcggctcccctcatgcagtctacttcctcctccttctgacattattgattcagtcatag

SEQ ID NO: 9521 - DNA, 453 bp, synthetic construct
  misc_feature 1..453: note = source = /note="Description of Artificial Sequence: Synthetic coding sequence"
  source 1..453: mol_type = other DNA
atgcggttcatggccggccccgccggcagccagagcctgggccccctctgtttccacagtagcccccaggcactgtatacagtcctgctaatcgttttagtaatgatgtctctggtctttggaaagttcgtgccagtgaactgggagccacctcagccactaccttttcctaagtatctccgatgctatcgctgcctgctggagactaaggagctcggctgtcttttgggcagtgacatctgcttaaccccagccggatcttcttgtatcacacttcacaagaaaaattcttccggaagcgacgtgatggtgtctgactgtcgctccaaagagcaaatgtctgactgttctaatacccggacttcgccagtctccgggttttggatcttctctcagtactgctttctggacttctgtaatgacccccagaacagggggctctacactccctag

SEQ ID NO: 9522 - DNA, 1161 bp, synthetic construct
  misc_feature 1..1161: note = source = /note="Description of Artificial Sequence: Synthetic coding sequence"
  source 1..1161: mol_type = other DNA
atgaagttccagggccccctggcctgcctgctgctggccctgtgcctcggaagtggagaagcaggaccgctgcagagtggcgaagagagcaccgggacaaatattggcgaggcattaggacatggactcggagatgctttgagtgaaggtgttgggaaggccatcggcaaagaggccggcggcgccgctggcagcaaagtctctgaggcactgggccagggtacccgcgaggcagtcgggacaggagtgagacaggtacctgggtttggcgtggctgacgccttgggcaatagagtaggcgaggccgcccatgccttaggcaatactggccatgagataggcaggcaggctgaggacgtcatacgtcacggtgccgacgctgttagaggatcttggcagggggtccccggccataatggggcatgggaaacttcagggggtcacggtatttttgggagtcaggggggcctaggcggccaggggcagggcaacccaggggggttaggcacaccatgggtgcacggatatcccggcaatagcgccggtagttttggaatgaaccctcagggtgcgccttggggtcagggcggcaacggcggacctccaaactttggtacgaatacgcagggtgccgtggctcagcccgggtatggaagcgtgcgagctagcaatcaaaacgaaggctgcactaacccacctccttcagggtctggcgggggctccagcaactcaggtggaggcagcgggtctcagagcggcagcagcggtagtggcagcaacggagataacaataatggcagttcatcagggggtagttcctctggctcgtcatcgggcggttcatccggcggaagctctggaggctcatccggtaattccggcggctcacggggcgacagcggatccgaatctagctggggctcctccactggttcgagctctggtaaccatggggggagtggaggaggcaacgggcacaaacccggctgtgaaaagccaggaaacgaggcccggggctcaggagagtcaggcatacagaacagtgagaccagtcccggaatgttcaattttgataccttttggaagaattttaagagtaaactgggcttcataaactgggatgcgataaataaggaccaacgctcctccaggattccttag

SEQ ID NO: 9523 - DNA, 1995 bp, synthetic construct
  misc_feature 1..1995: note = source = /note="Description of Artificial Sequence: Synthetic coding sequence"
  source 1..1995: mol_type = other DNA
atgaagaccggcctgttcttcctgtgcctgctgggcaccgccgccgccatccccaccaatgcacgattgcttagcgaccattcaaaacctacagcagaaaccgtggccccagacaataccgctatccctagccttcgcgctgaagccgaggaaaacgaaaaggaaactgcagtgtctaccgaagacgactcccatcacaaggctgaaaaatcctccgtgctgaagtccaaggaggagtcccacgagcagtctgccgagcaggggaaatcctccagccaagaactgggcctcaaggaccaggaggacagcgatggccatctgagtgtgaaccttgaatacgccccaacggagggcactctggatatcaaggaggacatgtctgaaccacaggagaagaagctaagcgaaaacacagactttctagctcctggagtctctagtttcactgattccaatcaacaggagtccattactaagcgcgaggaaaatcaggaacagccccgaaattattctcaccatcaactgaatagatcatctaagcacagccaaggccttcgcgaccagggtaaccaggagcaagacccaaatatctctaatggagaggaggaggaggagaaggaacccggagaggtcggtacccataacgacaatcaggaaaggaaaacggagctgccccgagaacacgccaactccaaacaagaagaggacaatacccagtctgacgacattttagaggaatccgatcaaccgacgcaggtttccaagatgcaggaagatgaattcgaccaggggaatcaggaacaggaggataattcaaacgctgagatggaggaggaaaatgccagtaatgtgaacaagcacatccaggaaaccgagtggcagagtcaggaaggtaagacaggcttggaggcaattagtaatcataaagagacagaagaaaagactgtgagcgaggccctccttatggaacctacggacgatgggaacactacccctagaaatcatggagtggatgatgatggggacgatgacggggacgacggcggtacagacggacctcgacactccgcctcagatgactactttattccctcgcaagcttttctggaggccgaaagagcacagagcatagcctatcatctcaaaatagaagaacagagggagaaggtgcatgagaatgagaatatcggaaccaccgagccaggagagcatcaggaggctaagaaagctgaaaactctagtaatgaagaagaaacatctagcgagggcaacatgcgcgtccatgccgtagactcttgcatgagctttcagtgtaagcgcggtcacatctgtaaagctgaccagcagggaaagcctcattgcgtgtgtcaggaccccgtgacatgcccgccaactaagcctcttgatcaagtctgtggtacagataaccagacgtatgccagtagctgccatctgttcgccactaagtgccgcctggaggggaccaagaaagggcaccagttgcaattggactatttcggcgcttgcaaatcgatccccacctgtactgattttgaagtcattcagtttccgttgaggatgcgagactggctgaagaacatcctcatgcaactctatgaagccaacagcgaacacgctggatacctgaatgagaagcagcgtaacaaggtgaaaaaaatttatctggacgaaaagcgccttctggcaggggaccaccccattgaccttctcctgagggactttaaaaaaaattaccatatgtatgtgtatcctgtgcactggcaattcagcgagctagatcaacatccaatggaccgtgtcctgacacacagcgagctggccccgctcagggctagcctcgtcccaatggagcattgcatcactcgatttttcgaagagtgtgacccaaacaaagataagcacattactctgaaggaatggggtcactgtttcggtataaaggaggaggacattgacgaaaacttattgttctag

SEQ ID NO: 9524 - DNA, 420 bp, synthetic construct
  misc_feature 1..420: note = source = /note="Description of Artificial Sequence: Synthetic coding sequence"
  source 1..420: mol_type = other DNA
atgggccccgaggccctgagcagcctgctgctgctgctgctggtggcgagtggcgatgcagacatgaagggccactttgaccctgcgaaatgcaggtatgcgttaggcatgcaagaccgcaccatccccgactctgacatctctgcttcctcaagctggtccgacagcactgccgctcgtcattcccgtttggagagtagcgatggggacggcgcgtggtgccccgctggaagcgtgtttcctaaggaggaagaatacctccaggtggacctacagcgcttacacctggtagcactggtggggacacaggggcgccacgccgggggccttgggaaggagttctcccggtcttacaggctgcgctactcccgggacgggaggcggtggatggggtggaaggacagatgggggcaggagtag

SEQ ID NO: 9525 - DNA, 285 bp, synthetic construct
  misc_feature 1..285: note = source = /note="Description of Artificial Sequence: Synthetic coding sequence"
  source 1..285: mol_type = other DNA
atgcagcacagcctggtgttcttcttcgccgtgatcctgcacctgagccacctgctgcacctcgatgcgtctattcacccttttcgacttcctttctcatcaaagccgtttctgttgatacccatgagtaatactaccctgcctcacaccgcctggccactcagctttctgcaccagaccgtcagcacactcaaggcggtcgccgtgacacattccctgtggcatctgcagatcccggtcgattgccaagcttgtaatagaaagagtaagaagatttattgctag

SEQ ID NO: 9526 - DNA, 699 bp, synthetic construct
  misc_feature 1..699: note = source = /note="Description of Artificial Sequence: Synthetic coding sequence"
  source 1..699: mol_type = other DNA
atgctgcccaagagccggcgggccctgaccatccaggagatcgccgccctggcccggtcttccctgcatggcatatcgcaagtagtgaaggaccatgtaactaaaccaactgctatggcccagggccgggtggcacacctaattgaatggaaaggttggtccaagccttccgattcccctgcagccctcgagagtgcattcagcagctatagtgatctatcagaaggggaacaggaagcgcggtttgccgccggcgtggccgagcaatttgcaatcgcagaagccaaactgcgggcctggtcttcggtggatggtgaagacagtacagacgattcctatgatgaagatttcgctggtggtatggatacggatatggccgggcaactgcccttggggccccatctgcaggaccttttcacagggcacagattttcacggccagtacggcaagggtctgtggaacccgaatctgattgttcccagacagtgtccccagatacattgtgctcctccctctgtagcctcgaggacggactgctgggcagtccagccagacttgcctctcaacttttgggcgatgagctacttctggccaaactcccaccaagccgagagagcgccttccgcagcctcgggccactcgaagcccaggactcactgtataactcaccccttactgaatcttgtctctccccctag

SEQ ID NO: 9527 - DNA, 2631 bp, synthetic construct
  misc_feature 1..2631: note = source = /note="Description of Artificial Sequence: Synthetic coding sequence"
  source 1..2631: mol_type = other DNA
atgggccccgaggccctgagcagcctgctgctgctgctgctggtggccagtggggatgctgatatgaagggacacttcgatccagccaagtgccgctatgctctagggatgcaggataggaccattccagactcagacatttccgcgtcttcctcttggtctgactcaaccgccgcccgacactctcgactggaatcctcggatggcgatggtgcatggtgtcctgcaggcagcgtcttccctaaggaggaagagtatctgcaggtcgatcttcaaagactgcacttggttgcgctggtcggaacacagggcaggcacgctggcgggctggggaaagaattttctaggagttatagactgcggtacagtagagacggccgccgctggatgggttggaaagacagatggggccaggaggtaatctccgggaacgaagatcccgagggggtggttctgaaggacttgggcccccccatggtagccagattggtccgcttttacccccgcgcggacagggtgatgtctgtttgcctgagagtcgagttgtacggatgtctttggagggatgggcttctgagctacactgccccagtaggacagacgatgtatctgagcgaagcggtgtatttgaacgactccacctacgatggtcacactgtagggggcttgcagtacggtggcctcgggcaactggccgatggagttgtcggcctggacgacttccgtaaaagtcaggaactgcgcgtgtggcctggatacgattacgtcggatggtccaaccatagcttctcatcagggtatgtggagatggaattcgaattcgatcggttaagggcattccaggctatgcaggttcactgtaacaacatgcatacactaggcgccaggttacccggcggtgtggagtgtagattccgacggggtccagctatggcctgggaaggagaacctatgcggcacaatctgggcggaaatctcggggacccacgagcccgggctgtgagcgtgccgctgggcggacgtgtggcccgttttctccagtgtcggtttcttttcgccggcccgtggctcctgttctcagaaatttcgtttatatcagatgtcgtgaataacagctctcccgccctgggcggaactttcccacctgcaccttggtggccaccgggccccccgccgactaacttttcctccctggagctggagcctcgtggacagcaacctgtcgcaaaagccgaggggtccccaactgccattctgatcgggtgcctggtcgctatcattctgttgttgcttcttattattgcactgatgttgtggaggctgcactggcgtagacttttgtccaaggcggagcgccgcgtcctcgaggaggaactgacagtgcatctttccgttcccggggacactatacttatcaacaatcggccagggcctcgcgagcccccaccctaccaagaaccaagaccaagaggtaaccccccccactcggcgccatgcgtgcctaacggatcagcctacagcggtgattacatggaacccgagaagcccggtgccccactgctgccacctcccccacagaactccgtgcctcattacgcagaagcagacatagtcacactccagggggtgacaggaggcaacacttatgccgtgccagctctccctccaggagccgtgggagacggcccccctcgggtggatttcccccgttctaggctgaggttcaaagaaaagctgggcgagggacagtttggggaagtgcacctgtgtgaagtcgactcacctcaggatctggtttctcttgactttccacttaacgtaaggaaaggccaccccctgcttgtggcagttaaaatcctgcgtcctgacgctacgaagaatgctcgcaatgacttcttgaaggaggtgaagatcatgagtcgcctgaaggatcctaacattattagactcttgggggtctgtgtacaggatgaccctctgtgcatgattaccgactacatggaaaatggggatctgaatcagtttctttctgcccaccagctcgaagacaaggccgccgaaggcgcgcctggggacggccaggccgcccaaggaccaactataagctatcccatgctgctgcacgtggccgcccagatcgcaagtggaatgagatacttggctacactgaattttgtgcaccgtgatcttgctacgagaaattgcctggtaggcgaaaacttcaccatcaagattgctgacttcggcatgtcacggaatctttacgcgggagattattacagagtacaggggcgggctgtgttgcctattcggtggatggcttgggagtgcatcctgatggggaagttcacgaccgcttctgacgtctgggccttcggtgtcaccctttgggaagtcctcatgctgtgcagagcccaaccctttggtcaactcactgatgagcaggtgattgaaaacgcgggggagttttttagagatcaggggcgtcaggtctacctcagccggccacctgcctgcccgcagggtctctacgagttgatgctgcgatgttggtccagggagtcagagcagcgaccccccttttcacagttgcatcgattcctggcagaggatgccctcaatactgtgtag

SEQ ID NO: 9528 - DNA, 165 bp, synthetic construct
  misc_feature 1..165: note = source = /note="Description of Artificial Sequence: Synthetic coding sequence"
  source 1..165: mol_type = other DNA
atgtgccgggagaccgccggctacggctggctgctggccagcaccgagttgctaagcctgctcgagccattgagccctcagctgctaaaggagcacatctcctgtacgtctcaagtggctgccggtgccaaggtgactcccgactccgccgtctgggccccgtag

SEQ ID NO: 9529 - DNA, 2256 bp, synthetic construct
  misc_feature 1..2256: note = source = /note="Description of Artificial Sequence: Synthetic coding sequence"
  source 1..2256: mol_type = other DNA
atggccttccggaccatctgcgtgctggtgggcgtgttcatctgctccatttgcgtgaaaggctccagccaaccacaggcaagagtctacctgactttcgatgagctccgggagactaagacttccgagtattttagcttaagccaccacccgctggactacagaattctactgatggatgaggatcaagacagaatctacgtgggcagcaaagaccatattctgagcctgaatattaataacatctctcaagaggcattgtccgtgttttggcctgcatccaccataaaggtagaggagtgtaaaatggccggcaaggacccaactcacggctgcggcaacttcgtgcgtgttatccagacatttaacagaactcacttatatgtctgcggatccggggcattctcgcccgtgtgcacttacttgaaccgtggccgaaggagcgaggatcaagtgtttatgatcgacagcaagtgcgagtccggcaagggccggtgtagctttaatcccaatgttaataccgtttctgtgatgatcaacgaggaactgttttccggaatgtacattgattttatgggaacggatgccgcgatttttcgttctctgaccaagcgcaatgcggtccggacagatcagcacaattcaaagtggttgtcagaaccgatgtttgtcgacgctcacgtgattcctgacggcaccgatcctaatgatgccaaggtatacttttttttcaaggaaaaactgacggataataatcggtccacaaagcaaatccattcgatgatcgcacgaatttgccccaacgacaccggtggtcttaggtccctcgtgaacaagtggactacgtttctgaaggcccggcttgtgtgtagtgtgaccgatgaggatggaccggagacccatttcgacgagcttgaggacgtattcctgcttgagaccgacaacccaagaactaccctcgtctacggtatcttcaccacatccagttctgttttcaagggatctgccgtgtgcgtgtaccatctgtctgatattcaaaccgtgtttaacggtccgttcgcccacaaggaaggccccaaccaccagctgattagttaccagggacgaattccgtatccccggcccggcacatgcccaggaggcgcctttactcctaatatgaggaccaccaaagagtttccagacgacgtagtgacattcatccgaaaccacccccttatgtacaactcaatctacccaatccacaaacgcccccttatcgttaggatcggcactgattacaagtataccaaaattgccgtcgaccgtgtgaacgccgctgacggccgctaccacgtgctctttctgggtactgataggggaaccgtgcagaaggtggtagtactccctacaaataacagtgtttccggggaactgatactggaggagctggaagtcttcaaaaaccatgcaccgatcacaacaatgaaaatcagctcaaaaaagcagcagctgtatgttagctccaacgaaggggtgtcacaggtgtccctccatcgctgccacatttacggcaccgcctgcgcggactgttgtctggcccgagacccttattgtgcctgggacggacatagttgttctagattctaccccactggcaaacgaaggtcgcggagacaggacgttcggcacgggaatcccctaactcagtgcaggggcttcaatttgaaggcttataggaatgccgcggagatcgttcagtacggcgtcaagaataacactacttttcttgagtgtgcacccaagagtcctcaggcatctatcaaatggttgcttcagaaagacaaagaccgaaggaaagaagttaagctgaacgagagaatcattgcaacgtctcaagggcttctgattcggagtgtgcagggatcggaccagggtctctatcactgcatcgccacagaaaatagctttaaacagaccattgctaagatcaattttaaagtgctggacagcgagatggtggctgtagtcacagacaagtggtctccgtggacgtgggcatccagtgtcagggctctgcctttccacccaaaggacatcatgggagcctttagccactcagagatgcaaatgattaaccaatactgcaaagacactagacagcagcaccaacagggcgatgagagccagaaaatgcgcggggattatggaaaactcaaggcgctcattaacagtcgcaaaagtcgaaatcgccgtaatcagttgcctgaatcttag

SEQ ID NO: 9530 - DNA, 630 bp, synthetic construct
  misc_feature 1..630: note = source = /note="Description of Artificial Sequence: Synthetic coding sequence"
  source 1..630: mol_type = other DNA
atgggccccgaggccctgagcagcctgctgctgctgctgctggtggccagtggcgacgctgatatgaaaggccacttcgatccggcaaagtgcagatatgctctgggtatgcaggacaggaccatcccagattctgatatctcggcctcatcatcctggagcgacagcacggccgcccgtcactcacgcctggaatcatctgatggggatggagcctggtgtccagccggaagcgtattccccaaagaggaggagtacttacaggtggatctgcaacgccttcatctcgtcgccctcgtcggcacgcagggtcgtcatgcaggagggctgggaaaagagttttctcggtcgtacaggctgagatattcccgagatggaaggaggtggatgggctggaaggaccgatggggccaggaggtcattagtggtaatgaagaccctgagggggtcgtgctgaaagacctgggtccacctatggtagcgaggttagtgagattctatcctagggcagaccgagtaatgtcagtttgtttacgagtggaactctatggctgtctgtggcgagacggactattaagctacaccgccccagtgggtcaaacaatgtacctgagcgaagcagtgtattag

SEQ ID NO: 9531 - DNA, 315 bp, synthetic construct
  misc_feature 1..315: note = source = /note="Description of Artificial Sequence: Synthetic coding sequence"
  source 1..315: mol_type = other DNA
atgagcgacctgctgctgctgggcctgatcggcggcctgaccctgctgctgctgctgacacttctggccttcgctggatactccggactgctggctggggttgaagtcagtgcagggtctccccccatcagaaatgtgaccgtcgcttataagtttcacatgggtctgtatggcgagaccgggcgacttttcactgaatcatgcagcatcagccccaaattgcgctctatcgccgtatattatgataacccccacatggtgcctcccgacaagtgtcggtgcgctgtgggctcaatcttgtcggagggcgaatag

SEQ ID NO: 9532 - DNA, 2631 bp, synthetic construct
  misc_feature 1..2631: note = source = /note="Description of Artificial Sequence: Synthetic coding sequence"
  source 1..2631: mol_type = other DNA
atgggccccgaggccctgagcagcctgctgctgctgctgctggtggcctcgggcgacgctgacatgaaagggcacttcgacccggcaaagtgtcgatacgcacttggcatgcaggaccggaccatccctgattcagatattagtgctagttcttcatggtccgattcaactgccgctcgtcacagcagacttgaatcttcggacggcgacggggcctggtgtcccgctggatccgtgttcccaaaggaggaagagtatctgcaggtcgacctgcaacgtttacacttggtggctctggtggggactcagggaaggcacgctggtgggctcggtaaagagttcagccggagctatcggctgcgatactctcgggatggcagaaggtggatgggttggaaggatcgatgggggcaggaggtgatttccggcaacgaagatcccgaaggagtggtattgaaagacctaggacccccaatggttgcacgtcttgttcggttttacccccgggctgatcgcgtgatgtccgtttgcttgcgagtggagttgtatggttgtctttggcgtgacggattgttgtcctataccgccccggtgggacaaacaatgtatctgtcggaggcagtgtacctcaacgactcgacgtacgacggccataccgtgggaggccttcagtacggcgggctgggacagcttgccgacggggtggtgggtctcgatgacttcaggaagtcccaggagttgagagtgtggccaggatatgactacgtggggtggagcaaccactcctttagtagcggatacgtggagatggagttcgagtttgacaggctgagggcctttcaggccatgcaggtgcactgcaacaatatgcatactttgggggctagattaccaggaggagtcgaatgtcggttcaggcgcgggccagcaatggcttgggagggggagcccatgcggcacaatctgggcgggaatttgggcgacccacgcgctcgtgcggtgagtgtgcctttagggggccgcgttgctagatttttacaatgtagatttctctttgctgggccctggcttctatttagcgagatatccttcataagcgatgtggtgaataattcctccccggcgctgggcggcactttcccgccggcgccctggtggccccctgggcctcctcctactaacttctcatcactggaacttgagcctcggggacagcaacctgttgctaaggcggagggaagccctactgccattctaattggctgtcttgtggcgatcatccttctcttactactgataatagccctgatgctatggcgcttgcattggcgccgattacttagcaaagccgagcgtcgtgtgctggaggaagagttgactgtgcatctatccgtacctggtgatacaatcttgattaacaataggcccggaccacgggagcccccgccttatcaggaacctaggcctcggggaaatcccccccatagcgctccctgcgtcccaaatggcagcgcatactctggtgactatatggaacccgaaaaaccaggggcaccactgctgccaccccctccccagaattcggtgcctcactatgcagaggcagatatcgttaccctgcaaggggtaaccggggggaacacatatgccgtgcccgccctcccaccgggcgcagtgggcgacgggcctcctcgtgttgactttccacgatcgcgattgaggtttaaggaaaaactaggggagggtcagttcggcgaggtccatctctgcgaggtcgattctccccaagacttggtttctttggattttcctttgaatgtcagaaaaggccatccacttcttgtcgcagttaagatcttgcgacccgatgctacgaagaatgctcgtaacgactttttgaaggaagtcaaaatcatgtcgcgactcaaagaccctaatatcattcgactgctgggcgtctgtgttcaggacgatcctctctgcatgattacggattacatggagaacggcgacctgaaccagttcttgtctgcgcaccagttagaggacaaggctgcagagggcgcaccaggtgacggccaggccgcacaaggccccaccattagttatcccatgctactgcacgtcgcagcccagatcgcctcaggcatgagatatttggccacactgaactttgtgcatcgtgatctcgctactagaaactgtctggtgggcgagaactttacaattaagatagcagacttcggcatgtcgcgaaacctttatgctggtgattactacagggtgcagggccgcgctgtactgccgattcggtggatggcttgggaatgtattctaatgggcaagtttacgacagcatccgatgtgtgggcattcggcgtcacgttgtgggaagtcctgatgctatgcagagcacagccgtttggccaactcacggatgagcaggtgatagaaaacgctggtgaattttttcgtgaccagggaaggcaggtttacctaagccgcccccctgcttgcccccagggcctgtatgagctgatgctgcgctgctggtctcgggagagtgaacaaaggcctccgtttagccaactccatcgctttctggctgaagacgctctgaacactgtctag

SEQ ID NO: 9533 - DNA, 1053 bp, synthetic construct
  misc_feature 1..1053: note = source = /note="Description of Artificial Sequence: Synthetic coding sequence"
  source 1..1053: mol_type = other DNA
atggaggccttcgccctgggccccgcccggcggggccggcggcggacaagggctgcggggtctctactttcgagggccgccatcctgctgtttatcagtgccttcctagtgcgagttccaagcagtgtggggcatcttgttcggctaccacgcgcattccgcctaacaaaggattcggtcaagattgtcggttccaccagtttcccggtgaaagcgtatgtgatgttgcaccagaaatctccacacgtgttgtgtgttacacagcagctgcggaatgccgagctgatagacccatcattccagtggtacgggcctaaaggaaaagtcgtctccgaaaaccgcaccgctcagatcacctctaccggctctttggtcttccagaattttgaagaaagtatgagcggtatttacacctgcttcctggagtacaaaccaacggtggaagagatcgtcaaacgcctgcagttaaaatacgctatctatgcctatcgggagccgcactattactatcagtttacagctcgttatcacgcggccccttgcaactcaatctataatatctcctttgaaaagaaattgttgcagatcctatcaaaattactcctggacctgtcttgtgagatttcactgttgaagtcagaatgtcatcgagtgaaaatgcagagagctggtttacagaatgaactgttcttcgcattctcagtaagctctttggacaccgagaagggccccaagcgctgtacagatcacaattgtgagccgtataagaggctctttaaggccaaaaacctgattgagcgcttcttcaatcagcaggttgaaattttagggaggagggccgagcagctgcctcagatctactacattgagggaacactacagatggtttggattaaccggtgctttcccggatatggcatgaatgtccagcaacacccaaaatgccctgagtgctgcgtcatatgctcccctggaagctataatcctcgggatggcattcattgtctgcagtgcaattcctccttggtgtacggtgctaaaacgtgcctgtag

SEQ ID NO: 9534 - DNA, 1392 bp, synthetic construct
  misc_feature 1..1392: note = source = /note="Description of Artificial Sequence: Synthetic coding sequence"
  source 1..1392: mol_type = other DNA
tgactggccctggtgctgtgcaccgtggacagccggccccccgcccagctggctctttcacacgccggcagactgttggcctcttccacggctgccagcgtgccaaacacacttcgtcttgagttgaggggccctcaaccacgggacgaagggttctactcctgctcagctcggtccccgcttggccaggccaatacttctctggagttgcgcttggagggggtcagagtaattcttgcacctgaggcggctgtgcccgagggcgctccaatcaccgtgacctgcgctgatccagctgcccacgccccgaccctctacacgtggtaccacaatgggcgttggttgcaggagggtcctgccgcgagcctctcttttctggtcgctacgagggcccatgctggcgcttactcctgtcaagcccaggacgcccagggcaccaggtcctcaagacccgctgcccttcaagtgctatatgccccccaagacgcagttttgtcgagttttcgagactcacgcgctcggagcatggccgtgatacagtgtactgtggactctgagccgcccgctgagttggccttgtcccatgacggcaaggttctggcaacctcgtcaggcgtgcacagcctggcaagcggaaccggccatgtgcaggtcgcccggaatgctctgcgcttacaggtacaggacgtgccagcaggtgacgatacctacgtgtgtaccgcccagaatcttctgggaagtataagcactatcggacgtctgcaagtggagggagctagggtggtagctgagcccggcctcgatgttcccgagggagcggctctcaacttatcttgcagattgttgggtggcccaggtcccgtggggaacagcacgttcgcttggttctggaacgataggcgacttcacgccgagccagtgccaacccttgcctttactcacgtcgcacgcgcacaggcaggcatgtatcattgtctcgctgagctgccgacaggagcggcagccagtgctccggtgatgttaagagttctctacccacccaaaacacccacgatgatggtgtttgtggagccagagggggggctacgaggaatcctcgactgtcgggtcgacagcgagcctctggcgtccttgacactccatctcggatctcgtctcgtcgcctcctctcagccacaaggcgcccccgccgagccccacattcacgtcttagcttcacctaacgctctccgtgtggacatcgaggccctaagaccctcagatcaaggcgaatacatatgttccgcaagtaacgttctggggtcagcctccactagcacctatttcggggtgcggggagaagggcgcggcttacacctcccaggacactcagcacagaagccgtcatcgtag

SEQ ID NO: 9535 - DNA, 1398 bp, synthetic construct
  misc_feature 1..1398: note = source = /note="Description of Artificial Sequence: Synthetic coding sequence"
  source 1..1398: mol_type = other DNA
atgaagttccagggccccctggcctgcctgctgctggccctgtgcctcggatccggagaggcaggaccactgcagtctggtgaagagtctacagggacaaatatcggggaagccctgggtcatggattgggcgatgcattgtccgaaggggtagggaaggcaattggcaaagaagctggcggtgcggcaggctctaaagtgagcgaggcactggggcaaggcaccagggaagccgtggggacgggcgtgcggcaggtcccaggattcggcgtggccgacgccttgggcaacagggtaggagaggccgcccatgccctcggcaacacgggtcacgagatcggaagacaggctgaggatgtgattagacatggggcggatgctgtccgaggaagctggcagggcgtgccggggcacaatggggcatgggagacatcgggaggacatggcatttttggcagccaaggcggcctgggtggacagggtcagggaaacccaggaggactaggtaccccgtgggtgcacggttacccgggcaacagcgcaggtagcttcggaatgaaccctcagggagccccatggggccagggtgggaacggtggacctccaaactttggtaccaacactcaaggtgcggtggcccaacccggctacgggagtgtccgagcctccaatcagaacgaaggctgcacaaatcccccaccctccggttctgggggcgggtcttctaattccggcgggagcagcacagggagcagctctgggaaccatggggggagtggaggtggcaacggccacaagcctggctgcgagaaaccaggcaacgaggctcggggtagtggagagagtgggattcaggggttccgcggacagggggtgtcatcaaatatgcgagagatttccaaagagggcaacagattgctgggcggatcaggagataactatagaggccagggaagttcttggggctccggcggcggcgacgctgtgggcggggtgaacacggtgaactcagaaacctcccccgggatgtttaattttgacactttttggaagaattttaaaagtaagctaggttttataaactgggacgcaattaataaaaaccaggtgcctccgcctagcacacgcgctctgctgtatttcagccggctgtgggaggatttcaagcagaacacaccctttctgaattggaaagccatcattgaaggcgctgatgccagttccctgcaaaagagagccgggcgcgacgaccagaactacaattataatcagcatgcgtaccccactgcctatggaggcaaatattctgtcaaaaccccggcaaagggcggtgtgagcccatcttccagcgccagccgagtacagcccggacttttacaatgggttaaattttggtag

SEQ ID NO: 9536 - DNA, 2700 bp, synthetic construct
  misc_feature 1..2700: note = source = /note="Description of Artificial Sequence: Synthetic coding sequence"
  source 1..2700: mol_type = other DNA
atgctgctgctgctgctgctggcccccctgttcctgcggccccccggagcgggtggagcccagactcccaatgctacgtcagagggctgccagataattcacccaccctgggagggaggcataagataccggggcctgacacgggatcaggtgaaagcaatcaacttcctgccagtggactacgaaatcgaatacgtttgcagaggagaaagagaagttgtcggcccaaaggtccggaagtgtttggccaatggcagctggacagatatggacactcctagtcgctgtgtgaatcgtacccctcacagtgagcgacgtgctgtctacattggagccctgttccctatgtccggaggctggccggggggtcaggcctgccaaccagccgttgaaatggccctcgaggatgtaaactcccgtagagatatcctcccggactatgaactgaaattaatccaccatgactcaaagtgcgatccgggacaggctaccaaatacctctatgaacttctgtataacgatcccataaagataatcctcatgcctgggtgttcctctgtaagtacactcgttgcagaagcagctagaatgtggaatctcatcgttctgagctatgggtcatcctccccagccctgtcgaaccgtcagagattccccaccttctttaggactcacccctctgctacgctgcacaaccctactagggtgaaactctttgaaaagtgggggtggaagaagatcgcaacaattcaacagaccaccgaagtgtttacttcgaccctcgatgatttggaagaaagggtgaaggaggcaggaatcgagatcacttttcgtcaatctttcttctctgaccccgccgtccccgtgaagaatctgaagaggcaggacgccagaattattgttggcctattctatgaaacagaagctaggaaggtgttttgtgaggtttacaaggagcgtttgtttggcaaaaagtatgtctggtttctgatcggctggtacgcggacaactggttcaaaatctacgacccgagcatcaattgtacagtagacgaaatgaccgaggccgtggaaggacacatcaccaccgagatagtaatgctgaatcccgctaatacccgctcaatcagtaatatgacatctcaggaatttgtcgagaaactgacaaagcggctcaaacggcatccagaggagacaggggggtttcaggaggctccgctggcttatgatgcaatttgggctctcgccttggcacttaacaaaacatccggagggggcggtcgtagcggcgttagattagaggatttcaattataataatcaaacgatcactgaccagatctatagggctatgaactcttcctcattcgaaggggtaagcggacatgtagtttttgacgcctccggaagccgaatggcctggaccctcattgagcagctgcaggggggctcttacaaaaaaatcggctactatgattcaacaaaagatgacttgagctggtctaagaccgataaatggattggtggtagccctcctgccgaccaaaccttggtgataaaaacctttaggtttctcagccagaagctgttcatctccgtgtctgtactgtcaagtcttggcatagtgttggcagttgtgtgtctatcatttaatatttacaatagccatgtcagatacatccagaacagtcagccgaaccttaataatctcacagcggtgggatgttctctggccctcgcagcggtcttccctctgggtctcgacggttatcacattgggaggaatcagttcccattcgtgtgtcaggcccggctgtggctactaggactaggattttcacttggctatgggtcgatgtttacaaaaatttggtgggtccacaccgttttcactaagaaggaagaaaaaaaggagtggcggaaaaccctggagccctggaaactatatgccaccgtaggcctactggtgggaatggacgtgttaaccctggcaatatggcaaatcgtggacccactgcatagaaccattgaaacatttgccaaagaagagcctaaggaagatatcgacgtgtccatacttccacagcttgagcactgctcttcacggaaaatgaacacctggctcggtatcttttacggctataaaggtctgctgttgctcttggggatttttcttgcctatgaaaccaagtcagtcagcacagaaaaaattaacgatcacagggctgtgggcatggccatctacaatgtggctgtcctgtgtttgatcaccgcccctgtcactatgattctgtcaagccagcaggacgccgccttcgctttcgcctctttagccatcgtctttagttcctacattacactcgttgtcctgttcgtacccaagatgcgccgtctcattaccaggggcgaatggcagtccgaagcccaagacacaatgaaaacgggctcaagtaccaataacaacgaggaagagaagtctaggctcctcgagaaagagaaccgcgagttagaaaagatcatcgccgagaaggaagaacgcgtcagcgagcttagacatcagctccagagtcgccaacagttaagaagcagaaggcacccccctacaccccccgagccaagtggcggcctaccaaggggaccacctgaaccaccagaccggctgtcttgcgacggtagcagagtgcacttactatacaagtag

SEQ ID NO: 9537 - DNA, 381 bp, synthetic construct
  misc_feature 1..381: note = source = /note="Description of Artificial Sequence: Synthetic coding sequence"
  source 1..381: mol_type = other DNA
atgtggtacgtgagcacccggggcgtggccccccgggtgaacttcgaaggagccttgttttccggctacgcacccgacggcgggctttttatgcctgaagaactgcctcagctggatcgcggcactctgtgtcagtggtccaccctgtcctacccagggctggttaaggaactctgtgctctgttcatagggtctgaacttctgcccaaggacgagctaaacgacttaatcgaccgagccttcagcaggtttcgccacagggaggtggttcacctgtcccgactccggaatgggctgaacgtgttggagctgtggcacggcgtcacatacgccttcaaagacttgagcttgtcttgtactacccagttcctccaatattag

SEQ ID NO: 9538 - DNA, 147 bp, synthetic construct
  misc_feature 1..147: note = source = /note="Description of Artificial Sequence: Synthetic coding sequence"
  source 1..147: mol_type = other DNA
atgccccccttcctgatcaccctgttcctgttccacagctgctgcctccgcgccaacggacatctgcgggaaggaatgactttgctgaaaacagaattcgctctccacctttaccagagcgtggccgcttgtagaaacgagacctag

SEQ ID NO: 9539 - DNA, 390 bp, synthetic construct
  misc_feature 1..390: note = source = /note="Description of Artificial Sequence: Synthetic coding sequence"
  source 1..390: mol_type = other DNA
atggccgccggcagcgcccccatgcagctgcacctgcgggccaccatccgcatgaaggatggactgtgcgttccaaggaagtggatttatcacttaacagaggggtccacagatttacgtactgaagggaggcccgatatgaagactgaattattttcttctagttgtcctggagggataatgttgaacgagaccggccagggttaccagcgattcctgctgtacaatcggtctccccacccaccggaaaaatgcgtggaggaattcaagtcattgacatcttgtctcgattcgaaagcttttttgctgacaccgcggaaccagggaaaaggactcaagtcccacaagacaggccttgggctcacaaaaagctcgggagtgacagggtag

SEQ ID NO: 9540 - DNA, 462 bp, synthetic construct
  misc_feature 1..462: note = source = /note="Description of Artificial Sequence: Synthetic coding sequence"
  source 1..462: mol_type = other DNA
atgaccatccacatcctgatcctgctgctgctgctggccttcagcgcccagggcgacttggatacggccgcccgacgggggcagcaccaggttccccagcacagaggccatgtgtgctatctgggggtttgtagaacgcaccggttggccgaaatcatttactggatcaggtgtctgcatcagggggctctcggggagggccagcctcgggcacctgggccgctacagttgtgggctccacctgtggccagggggggatcgcctgctcggttccctgggttccggcccgccgcccggggactggcccagtgccctgctaggtgggtgactagcggaacagcaaggccattactcggcttttcacttcccatatgtatgctagagctgctgttgcacatcagcagtcccctgacacctgctccagaaaccgtgtttccaagtcccagtcccgggtgcgactag

SEQ ID NO: 9541 - DNA, 450 bp, synthetic construct
  misc_feature 1..450: note = source = /note="Description of Artificial Sequence: Synthetic coding sequence"
  source 1..450: mol_type = other DNA
atgggctggctgacccggatcgtgtgcctgttctggggcgtgctgctgactgcccgagccaactatcagaacggcaagaacaacgtgccccgcctcaaactgagttacaaagaaatgctggaaagcaacaatgtgattactttcaacggcctcgctaattctagctcatatcatacttttctgctcgatgaggagcgatcccgcctctacgtgggcgcaaaggaccacatattcagcttcgaccttgtgaatatcaaagatttccagaagatcgtgtggccggtttcatatactaggcgggatgaatgtaagtgggccggaaaagacattctgaaagagtgcgctaactttatcaaggttcttaaagcttacaaccagactcacttatacgcctgcgggacaggggcgttccaccctatctgcacctacattgagatagggcaccactag

SEQ ID NO: 9542 - DNA, 543 bp, synthetic construct
  misc_feature 1..543: note = source = /note="Description of Artificial Sequence: Synthetic coding sequence"
  source 1..543: mol_type = other DNA
atggccgacatgcagaacctggtggagcggctggagcgggccgtggggcggcttgaagctgtatcacacacgagcgatatgcatcgaggttacgccgacagcccttcaaaagccggcgcggccccatacgtgcaggcctttgattcacttttggctggacctgtggctgaatatttgaagattagcaaggagatcgggggggacgtacaaaaacacgctgagatggttcacaccggcttgaaactcgaaagagccctcttagtgaccgcttcacagtgtcagcaacccgcggaaaacaaactatcagatttgctggcacctatctcagaacaaatcaaagaggtgattacctttagggagaagaaccgaggcagtaagctcttcaatcatctctctgccgtgagcgagagtatacaggctcttggctgggtggccatggcgcccaagcctggcccttatgttaaggaaatgaatgacgccgctatgttttacaccaatagagtgctcaaagaatacaaggacgtggacaaaaagcatgtgtag

SEQ ID NO: 9543 - DNA, 630 bp, synthetic construct
  misc_feature 1..630: note = source = /note="Description of Artificial Sequence: Synthetic coding sequence"
  source 1..630: mol_type = other DNA
atgggccccgaggccctgagcagcctgctgctgctgctgctggtggcctcaggtgatgcagacatgaagggtcattttgatcctgctaagtgtagatatgccctgggtatgcaggatagaacaataccagattctgacatttctgctagctcttcttggtctgattctaccgccgcaagacacagcagattggagtcctcagacggcgacggagcgtggtgccccgcaggttcggtcttccctaaggaggaggagtatctgcaagtcgacttgcagaggcttcacctggtcgcactcgtcgggacccagggacggcacgccgggggattagggaaggagttcagccggtcatatcgcctccgctactctagggatggaaggcggtggatgggctggaaagaccggtggggccaggaagtgatttcgggcaatgaagaccctgaaggggtcgtcttaaaggacttggggccccccatggtcgctcgactggttcgattttatccccgagcggaccgggttatgagtgtgtgccttcgtgtcgagttatacggatgtctgtggagggacggtctgctgagctacaccgccccagttgggcagaccatgtatctttctgaggcggtgtattag

SEQ ID NO: 9544 - DNA, 630 bp, synthetic construct
  misc_feature 1..630: note = source = /note="Description of Artificial Sequence: Synthetic coding sequence"
  source 1..630: mol_type = other DNA
atgggccccgaggccctgagcagcctgctgctgctgctgctggtggccagcggagacgcagacatgaaaggacatttcgaccctgctaagtgccgatatgccctggggatgcaggacaggaccattcctgactcagacatcagcgcatcctcaagttggtcggacagtaccgcagctcgtcactcaaggcttgagtctagtgatggagatggggcatggtgcccggcagggtccgtgtttcccaaggaggaggagtacctgcaggtcgatcttcagaggctgcacctggttgctctggtcgggactcagggcaggcacgccggcggcctcgggaaagaatttagcagatcttaccgactgaggtattctagggatggccgacgctggatggggtggaaggatcggtggggacaggaggtcattagtggcaacgaagatccagaaggggtcgttctgaaagatttaggaccgcccatggttgctagactagtgcgcttctacccgcgggctgaccgtgtgatgtctgtttgcctgcgtgttgaactctacggctgtttatggagggacggtctgctttcttacacggctccggtcggccaaacaatgtatctttcggaagccgtgtactag

SEQ ID NO: 9545 - DNA, 2631 bp, synthetic construct
  misc_feature 1..2631: note = source = /note="Description of Artificial Sequence: Synthetic coding sequence"
  source 1..2631: mol_type = other DNA
atgggccccgaggccctgagcagcctgctgctgctgctgctggtggccagcggcgacgccgatatgaaaggccacttcgatcccgctaaatgtaggtatgcactaggtatgcaagaccgcactattcccgacagtgacatctccgcctcttcctcatggtcagatagcaccgctgcaaggcactcccgcttggagtcatctgatggagatggagcctggtgccctgccggaagtgtgttcccaaaagaagaggagtacctgcaggttgacctgcagcgtctgcatcttgtggcactggttggtacacaagggaggcacgctgggggcctcggcaaggagttcagtaggagctaccgcctgcggtattcccgcgatggtagaagatggatgggatggaaagataggtggggtcaggaagtcatctccggaaatgaggacccagaaggagtggtgctcaaggatctgggtcctcccatggtcgcccgcctggtccgattctaccctcgagcagacagggtaatgtctgtgtgtctgcgggtggagctgtacggttgcttgtggagggatggactgttgtcctacactgccccagttggacaaacaatgtatcttagtgaggccgtctatctgaatgactctacatatgatggccacaccgtggggggtttgcagtacgggggcctggggcaactcgccgatggtgtcgtggggctggatgacttcagaaagagtcaagagctccgggtgtggccagggtatgattacgtcggatggtccaaccacagcttttctagtggctatgtagagatggaatttgagttcgatcgcctgagagccttccaagctatgcaggtgcattgcaacaacatgcacaccctcggagccagactacctggaggggtcgagtgcagattccggcgaggccccgcaatggcctgggaaggggagcccatgaggcataaccttgggggcaatctgggtgacccccgtgcacgtgcagtttcagtaccactgggtgggagggtggcaaggtttctgcagtgtaggtttctctttgctggtccctggttattgtttagcgaaatctcgtttatcagtgacgttgtgaataacagctctcctgcgttgggcggcactttccccccagctccatggtggccaccgggcccgccaccaacaaactttagtagtctcgagcttgagcccagagggcagcagcctgtcgccaaggccgagggcagccctactgccatcctgattggctgtttagtggcaatcatcctcctgctgctactgattattgcactcatgctgtggagactgcactggcgcagattgctaagtaaggctgaacggcgcgtcttggaggaagagcttaccgtgcacctaagtgtccccggcgatacaatcttgataaataatcgacctggcccccgtgaaccaccaccatatcaggaacccagaccccggggtaaccccccgcactctgccccttgtgtaccaaacggctcagcctattccggcgattacatggaacccgaaaagcctggggctcccctactgcctccaccaccacagaacagtgtccctcactacgcagaagccgacattgtgacactccagggagtgacagggggaaacacatatgccgttcccgcgctccctcctggggcggtgggggacggcccccctcgggtagattttcccaggtcccggctgcgctttaaagaaaagctgggcgagggccagtttggcgaagtccacctgtgcgaagtcgatagcccccaggacctggtttcactcgatttccctctgaacgtgaggaaggggcatccgctactcgtagctgtgaagatcctgcgcccagacgcgacaaaaaacgctcgcaacgatttcctgaaagaagtcaaaattatgagtcgtctcaaggatcctaatattatacggttgcttggggtttgtgtacaagacgatcctctttgcatgattactgactacatggagaacggcgacctcaatcagttcttgtcggcacatcagctggaggacaaagctgccgagggagcaccaggtgatgggcaggccgcacagggccccaccatctcttaccccatgctgctccacgtcgccgcacagatcgccagtggaatgcggtacctcgctaccttaaatttcgtccaccgggatcttgcaacgaggaactgtctggtgggcgaaaactttaccataaaaatagccgatttcggtatgtcccgcaacctttacgccggagattactatagggtacagggacgcgccgttctccccatcagatggatggcttgggagtgcatcttgatgggtaaatttactaccgcaagtgacgtctgggccttcggagtgactctatgggaggtcttaatgttatgccgcgcacaaccctttggccagctgacagacgaacaggtgatcgagaacgcaggcgagttctttcgggatcaaggccggcaagtgtatcttagccggcccccagcatgccctcaggggctgtatgaattgatgcttaggtgctggagccgagaaagcgagcagaggccccccttcagccagctccatcgctttcttgccgaagacgctttaaataccgtctag

SEQ ID NO: 9546 - DNA, 2103 bp, synthetic construct
  misc_feature 1..2103: note = source = /note="Description of Artificial Sequence: Synthetic coding sequence"
  source 1..2103: mol_type = other DNA
atgctggcccccttcctgctgctgctgacccacagccggagccccctgtcgtttcgaccttgttcccatgtacccggagctctgattgcccagaaaccaatggggtcctctcgtctggctgccctgcttcttcccttgctgctcatagtcatcgatctatcggactcagccgggattggctttcgccacttgccccactggaacaccagatgtcctttagcaagtcacactgacgacagtttcactggcagttcagcttacatcccttgtagaacctggtgggccttgttcagcactaaaccctggtgcgttcgcgtgtggcactgctcgcggtgtttgtgccagcatctactctccggtggttccggcctgcagcgcggattatttcacctgcttgtgcagaaatctaaaaaaagctccactttcaagttttacagacggcacaagatgccggccccagcgcaaagaaaacttctgccaaggcggcatctcagcgagaagagtcaccacatctccatcccaagtcccgatatctcacataaggggctgcgatcaaaacggactcagccttctgatcccgaaacatgggagtcgcttcctcgactggacagccagcggcatggcggtcccgagttctcctttgacctactgccagaggctcgggctatcagagttacgatctcctcggggccggaagtgtcagttcgactgtgtcaccagtgggctctggagtgcgaggagctgtccagcccctacgacgtccagaaaattgtgtccggaggccatactgttgaacttccatacgaatttttactgccctgcctctgtattgaagccagctatcttcaagaggacaccgtgagaaggaaaaagtgccctttccagtcctggccagaggcctatgggtctgacttctggaagagcgtgcatttcactgattactcacagcacacacagatggtgatggcgctgaccctgaggtgccctctaaaactcgaagctgcactctgccagcgccacgattggcacacgctgtgcaaggatctaccaaatgccacagctcgggaaagcgatggatggtatgttctggagaaagtcgacctgcacccacagctgtgtttcaaattctcattcggcaatagttctcacgtggagtgtccacaccagaccggtagcctgacttcatggaatgtttctatggatactcaggcgcagcagctcattcttcattttagtagcagaatgcacgccacattctctgcagcctggtcactccccggtttgggccaggatacacttgtgccccccgtctacactgtctcccaggctcgggggagctctcccgtgagcctcgatctcataatcccatttctgcgccctggttgttgtgttctagtgtggcgctcggatgtgcagtttgcctggaaacatctgttgtgccccgacgttagttatagacacctgggattactcattctggccttacttgctctgcttaccctgctgggtgtggtgttagcactcacatgtcgtagacctcagagtgggcccgggcccgcccgccctgtgctcttacttcatgcagctgactcagaggcccaacggaggcttgttggagcccttgctgagcttctcagagcggctctgggcggggggcgcgatgtaatcgttgacctctgggagggtcgccacgtagccagggtgggacctctgccttggctgtgggctgcacgtactcgggtggctagggagcaagggacagtgttgctgctctggtccggcgcggatctgcggcctgttagtggcccggatccccgcgcggctccactgctcgccctgctacacgcagctccacggcccctgcttctcctggcttacttttcgagattgtgtgccaaaggggatatccccccacctctccgcgctctccctaggtatcgtctattgcgcgacctgccacgactcctacgcgcgcttgacgctcgtccgtttgcagaggctactagctggggacgattgggggccagacagcggcgtcaatcaaggctcgagttgtgctcgcggcttgagcgagaggcagccaggcttgctgatctgggatag

SEQ ID NO: 9547 - DNA, 1194 bp, synthetic construct
  misc_feature 1..1194: note = source = /note="Description of Artificial Sequence: Synthetic coding sequence"
  source 1..1194: mol_type = other DNA
atgcggagcctgctgctgctgagcgccttctgcctgctggaggccgccctggctgccgaggtcaagaagccagcagccgccgcagcccctgggacagcggagaagctgtctcctaaagccgcgaccctagccgagcggtctgccgggttggcttttagtttatatcaggcaatggcaaaagatcaggccgtcgagaacatcctggtatctcccgtggttgtagcgtcgtcactggggctcgtgagcctgggaggaaaggccactacagcctcacaggctaaggcggtcctatctgccgagcagctccgcaacgtgacatggaagcttggcagccgtctgtacggtccctcctcagtttcttttgccgatgacttcgtccgcagctcaaaacagcattacaactgcgaacactccaagataaattttcgagacaagaggtctgccttgcaaagtataaacgaatgggcggcccagactacagatgggaaactgcccgaagtcaccaaggatgtggaaaggacagacggggctctgttagtaaacgctatgttcttcaaacctcactgggatgaaaagttccaccataaaatggtagacaatcgaggtttcatggtcactcgcagttacactgttggcgttatgatgatgcacagaaccggcctgtacaactattatgacgacgaaaaggagaaactacagatcgttgagatgcccctggctcataaactctcctctcttatcattctgatgcctcatcatgtggaaccgctggagcggctagagaagttgcttacaaaggagcaactaaaaatctggatgggcaaaatgcaaaagaaggctgtagccatcagtctgccaaaaggcgtggtcgaggtaacccatgacttacagaaacaccttgccggactagggctgacagaggctatcgataagaacaaggctgacctatccagaatgtcagggaaaaaggacttgtatctagcgagtgtattccatgctactgccttcgagctggataccgacggaaacccgttcgaccaggacatctatggccgtgaagaactccggagtcctaaactcttttatgcggatcacccattcatttttctggtgcgcgatacacagagcggctccctgctgtttatcggcaggctcgtgcggccaaagggcgacaaaatgcgcgacgagctctag

SEQ ID NO: 9548 - DNA, 612 bp, synthetic construct
  misc_feature 1..612: note = source = /note="Description of Artificial Sequence: Synthetic coding sequence"
  source 1..612: mol_type = other DNA
atggccgacatgcagaacctggtggagcggctggagcgggccgtgggacggctggaagccgtgtctcacacctcagacatgcatcggggttatgctgactcccccagtaaggcaggtgctgccccgtacgtccaggcttttgattccctgttagcgggccccgtggccgagtatctcaaaatctccaaggagatcggaggggatgtacaaaagcacgccgagatggttcatacaggtctgaaactggagagggctttgttggtcactgcttcacagtgtcagcagcctgccgaaaacaaactatctgacttattggcccccattagtgagcagatcaaagaagtaattacattcagggagaagaaccggggtagcaagcttttcaatcatctcagcgcggtgtcggagtcaatccaggccctggggtgggttgctatggctccgaagccggggccctatgttaaagagatgaatgatgccgccatgttctacaccaatcgagttttaaaggaatacaaggacgtggacaagaagcacgtggactgggttaaggcatacctaagcatctggacagagctccaggcatatattaaagaattccatactacctag

SEQ ID NO: 9549 - DNA, 1293 bp, synthetic construct
  misc_feature 1..1293: note = source = /note="Description of Artificial Sequence: Synthetic coding sequence"
  source 1..1293: mol_type = other DNA
atgcggaagctgatgaagcaggtgcaggagcagtgccccaacatcactagaatttatagtattggcaaatcatatcaaggactgaagctttacgtgatggagatgtccgacaaacccggcgaacacgagctgggggagcccgaggttaggtacgtggcgggtatgcacggtaatgaagcgctaggcagagagctgctactcctactgatgcagtttctgtgccacgagttcctgcgaggtaatcctagagtgacgaggctgctgagtgagatgcgcatccacctcctccccagcatgaatccagacggctacgagattgcttatcaccgtggtagtgagctggtgggctgggccgaaggtaggtggaataaccagagcattgacctcaatcataacttcgctgatttaaatactcctctgtgggaggcacaagacgatgggaaggtgccccatatcgtccccaaccatcacttacccctgcccacctactataccctgccaaatgcaacagtggctccagagactcgcgcagtcattaaatggatgaagcgaattccttttgtcctatcagcaaatttacacggaggcgagttggtggtttcctatcccttcgacatgacacgaaccccgtgggccgcaagagaactaacccctacacccgacgatgctgtcttcaggtggctgtcgactgtctacgcaggatccaacctcgccatgcaagacacctcaaggcgcccctgtcattcccaggatttttctgtgcatggaaacatcattaacggcgctgactggcatactgtaccaggcagtatgaacgacttctcatatctgcacacaaattgcttcgaggttaccgtcgagctcagctgtgataagttcccgcacgaaaacgaattgccccaggaatgggaaaacaataaagacgccctgctgacgtacctagagcaagtcagaatgggcatcgcgggcgttgttagagataaagacaccgagctggggattgcagatgccgtgattgcggtggacggaatcaaccacgacgtcactactgcctgggggggtgactattggcgactgctaactccgggcgactacatggtgacagcttctgcggagggctaccactcggtgacgcgcaattgcagagtgaccttcgaggagggcccatttccttgcaacttcgttctgacaaagactccgaagcagagattacgtgagcttctggccgccggagccaaagtgccacccgacctgagacgtcggctggaacggctgagaggtcagaaggactag

SEQ ID NO: 9550 - DNA, 1680 bp, synthetic construct
  misc_feature 1..1680: note = source = /note="Description of Artificial Sequence: Synthetic coding sequence"
  source 1..1680: mol_type = other DNA
atgtggaccaacttcttcaagctgcggctgttctgctgcctgctggcagttttaatggtcgttgtccttgtcatcaatgtgacccaggtggaatatctcgatcatgagaccgtttctgcaacatttatcgactcatctggacagtttgtgagttcccaggtcaccggaattagtaggaacccgtactgcggatatgatcagcaaactctctcctcacaggaaaggatggaggaggatagtttacttgccgccctccacaggcaggtacctgatgtgggaccagtgccctttgttaaatctaccgatccatcatcctcctacttcgtgatcctcaattccgcggcatttttcaaagtgggtagccagttggaggtgctcgtccacgtgcaggattttcagagaaagcccaagaagtatgggggggactatctccaggctcggatccatagcctgaaattgcaagctggcgccgttggccgggttgtcgactatcagaatggcttttataaggtgtttttcacactcctatggcctggaaaagttaaagttagtgtgtctctggtccacccatccgaaggtatccgtgtgctgcaacggctccaggaggacaaaccagaccgtgtctattttaaatccctgttcaggagcggtaggatttccgaaaccacagagtgcaatgtgtgtctaccaggtaacctgcccctctgcaatttcaccgacttatacacaggagagccctggttttgttttaagcctaaaaagcttccctgctcatctcgcatcacccatttcaaaggaggttatttgaaaggcctcttgacggccgcggagagtgcattcttccagagtggggtcaacattaagatgcccgtcaattcttcaggcccagattgggtgacagtgattcccagaagaataaaggaaaccaatagcctagagctgagtcagggctccggaacgtttccttcaggatactattacaaggaccagtggcgccccaggaaattcaagatgcgacagttcaacgacccagataacataactgagtgcctacagcggaaggtcgtgcacctatttggcgattcgactatccgacagtggttcgaatatctgacgacatttgtacccgatctggtagaattcaaccttggttcccccaaaaatgtaggaccttttttggctgtggatcagaagcataatattctgctaaagtatagatgccatgggccaccaattagatttacaaccgtgttttccaatgaattacattacgtggccaacgagctcaacggtattgttggcggaaagaataccgtggttgccatcgcagtgtggagccacttctctactttccctttagaggtttacatccggcgtctcagaaatatcagacgagcagtggttcgcctgctagacaggagcccaaagacagtggtggtcatcagaaccgcgaacgctcaggagcttggtcctgaggtgagtctgttcaacagcgattggtacaatttccagctggacaccatcctacggcgcatgttctctggagtgggtgtgtatctggtggacgcatgggagatgaccctggcccattatctgccccataagttacacccggatgaagtcatcgtcaagaatcagctggacatgtttttatcatttgtttgccccctggagacgtag

SEQ ID NO: 9551 - DNA, 8199 bp, synthetic construct
  misc_feature 1..8199: note = source = /note="Description of Artificial Sequence: Synthetic coding sequence"
  source 1..8199: mol_type = other DNA
atggagcagaccgactgcaagccctaccagcccctgcccaaggtgaagcacgagatggatctagcctatacctctagttcagatgaatccgaagacggcaggaagccacgacagagctataactcccgggagactcttcacgaatataatcaggagctgcggatgaactacaactcccagtctaggaagagaaaggaggtagaaaagagcacgcaagagatggagttctgcgagacgtctcatacgctgtgttccggctatcagaccgatatgcatagcgtcagtcggcacgggtatcaacttgaaatgggaagcgacgtggacacagagacggagggtgccgcatcccccgatcacgctctgagaatgtggataagggggatgaaatcagaacatagtagctgcctgagttctcgtgccaactcggcactctccctgactgataccgaccatgagcgcaagagcgatggagagaacggttttaaattctctcctgtttgttgcgatatggaggcacaggccgggtccacccaggacgtgcaaagttcaccccacaaccagtttacattcagacctttaccaccgccccctccacctccccatgcttgtacctgtgcaagaaaaccccctccggctgcggattccctgcagcgtaggagcatgactacccgctcgcagccgtctcctgccgcccccgcacccccaacgtctacccaggacagtgttcatctgcacaacagctgggtcctgaattctaacatcccactggagacgaggcatttcctgttcaaacatggctctggctccagcgctatcttttctgcagcaagccaaaactaccctttgacgagcaacactgtgtattctcctccacccagacctctcccaaggagtacatttagtagacctgcctttacgtttaataagccatatagatgctgcaattggaaatgtaccgcactgtccgcaaccgctatcacagttacccttgccctgctgctagcgtacgtgattgccgtgcacctgtttggactgacctggcagctacagcctgtagaaggtgaactgtacgccaatggcgtgagtaagggaaacaggggaaccgagtctatggacaccacatattctcccattggtgggaaggtgtcagacaagagcgagaaaaaggtctttcagaagggccgtgctatcgatacaggcgaggtagatattggagcccaggtgatgcagacaattcctccagggctgttttggcgttttcaaattactattcaccaccctatctacttaaaatttaatatctcactcgccaaggatagcctgctggggatctatgggaggcgtaacatccctccaactcacacacaattcgacttcgtcaaacttatggatggcaagcagctggttaagcaggatagtaagggatctgatgacacacagcacagcccacgaaatctcattcttactagcttgcaagagaccggctttattgagtatatggatcaagggccatggtatttggcattttataatgatgggaagaaaatggagcaagtgttcgtactgactacagctatcgagattatggatgactgctccactaattgtaatggaaatggggaatgcatttcagggcactgtcactgcttccccggcttcctgggtcctgactgtgctcgagattcttgcccagtgctctgtggaggaaacggcgaatatgaaaaaggacactgtgtctgtaggcacgggtggaagggtcccgagtgtgacgtgccagaagagcaatgcatcgaccctacctgcttcgggcacggcacttgcattatgggggtttgtatctgtgttccaggatataaaggcgagatttgtgaagaggaagattgccttgatcccatgtgcagtaaccatggtatttgcgtcaagggagagtgtcactgttccaccggatggggaggtgtcaactgcgaaaccccattgccagtctgccaggaacagtgctctggtcacggtacttttcttctcgacgctggcgtgtgctcctgtgatcccaagtggactggatccgactgttctacagaactgtgtactatggaatgtgggtcccacggagtctgcagtagagggatttgccagtgcgaggaagggtgggtggggcctacctgcgaggagcggagttgtcactctcattgcactgaacacgggcagtgtaaagacgggaaatgcgaatgcagtccaggatgggagggcgaccactgtacgatcgcccactacctagatgctgtgcgtgatgggtgtcccgggctgtgcttcggaaacgggagatgtactctagatcagaatggatggcactgcgtctgccaggtgggatggtctggaaccggctgtaatgtcgtcatggaaatgctgtgtggcgataacctcgataatgacggggacgggctgacagattgtgtggatccagattgctgtcaacaatcaaattgctacatctcccctctgtgccagggttctcccgatccactggacttaatccaacaaagccagacccttttttcccagcatacctccaggctgttctacgaccgaattaaattcttaataggcaaggactctacacatgtcatacctcccgaggtgtcctttgactccaggagggcgtgtgttattagaggccaggtggtcgcaatcgatggtactcctttggtgggtgtgaacgtgtcattcctccaccatagcgattatggatttacgatatcccgacaggacggctccttcgatctggtggccatcggcggcatctctgtcattctgattttcgaccggtccccattcctcccggaaaagcgtacattgtggctgccatggaaccagtttatcgtggtggagaaagtcaccatgcaaagagtcgtaagcgacccgccaagttgtgatatttctaactttatttccccgaatccgattgtgttgccatcccctctcactagctttggaggctcttgcccggagaggggcacaattgtgcccgagcttcaggttgtgcaggaggagattccaatccccagcagcttcgttcgcttgagctacctgagttccaggactcccggttacaagacactactacgcatcctcctgactcattccaccatccccgtgggaatgattaaggtgcatctaacagtggccgtagaagggaggttgacccagaaatggttccccgccgctatcaacttggtctacactttcgcctggaacaagaccgacatatatggccagaaggtttggggattggcggaagccctggtctccgtcggttacgagtacgaaacctgtcctgactttattctgtgggaacagcgaaccgtggtattacaaggttttgagatggacgcctctaacctcggaggatggtctctgaataaacaccatatattgaacccacaatcagggatcatccacaaaggcaacggcgagaacatgttcatttcccaacagcctcctgtcatctccactatcatgggtaacgggcatcagcgtagcgttgcatgcactaattgtaatggccccgcacataataacaaactgtttgccccagtcgccttggctagtggcccggacgggagcgtgtacgttggcgatttcaactttgtgagacggattttcccctccgggaacagcgtgtctatactggagttgcggaatcgagatacccggcactcaacctctcctgcccacaaatattaccttgccatggaccctgtctctgaaagcctatatctgagtgacaccaatacacgtaaggtctacaagctgaagagcctggtggagaccaaagatctgtccaaaaatttcgaggtggtcgccggaactggcgatcaatgtttgccctttgatcagtcccactgtggcgatggtggtagggcaagtgaagcctcgttgaactcacctagaggaatcaccgtcgatcgccatggatttatttattttgtcgatggaaccatgatcagaaagatcgacgaaaacgctgtaattacaacagtgatcggctcaaacgggctgacctccacccagcccctttcttgtgatagtggtatggatatcacgcaggtaaggctggagtggccaacggatctcgccgttaacccaatggacaactctttatacgtgctggataacaatattgtgctccagatttctgaaaataggagggttcgcataatcgcaggacgacctattcactgccaggttccggggatagatcatttcctggtctctaaggtcgccatccacagcactctcgagtcagctagggcaatctccgtctctcattcaggtttactcttcattgccgaaacggatgagaggaaagttaataggatccagcaagtgaccacgaacggagaaatctatataattgcgggcgcccctacagattgtgattgcaagatagaccctaattgcgactgcttctccggcgatggaggctacgcaaaggatgcaaagatgaaggcgcccagtagtttggccgtatcacccgacggaaccctgtacgtggccgatcttggtaacgtgagaatacgcaccattagcagaaaccaggctcacctgaacgatatgaacatctacgagatcgcctcccctgcagaccaggagttatatcagtttactgtgaacggaactcacctgcatactcttaacctgattactcgcgattacgtgtacaactttacctataactcagagggggaccttggcgcaattacatcgagtaacggcaattctgtgcacatcagaagagatgccggcggaatgcccctatggctcgttgtgcctggggggcaggtctactggctcacaatcagcagcaacggcgtactgaaacgagtttctgcacagggctacaatcttgccttgatgacatatccaggcaacactggattgctggctacaaagagtaatgaaaacggatggactacagtgtatgaatatgatcccgagggccatctcacaaacgccactttccccacaggcgaggtgtctagcttccacagcgacctcgagaagctaaccaaagtagaactggatactagtaaccgagagaatgtgctaatgtccaccaacttaacggctactagcacgatttacattctcaaacaagaaaacacccaaagtacgtaccgagtgaaccccgacggaagccttcgggttaccttcgcttccgggatggagatcgggctgtcttcagaaccgcacatcctggcaggtgccgtgaaccctacacttggcaagtgtaacatttctcttcccggagagcacaatgctaatctgatcgagtggagacaacgcaaggagcaaaataaggggaacgtgagcgcgtttgagaggcgattaagagcgcataaccggaatctgttgtcgatcgactttgatcatatcacccgaactggaaagatatatgacgaccatcgcaaatttactcttcgcatcctctatgaccagacgggcaggcccattctgtggagtccggtgtcccgctataacgaggttaatatcacctactctccctctgggctagttacttttattcagcgcgggacttggaacgaaaagatggagtatgatcagagtggtaagatcatcagccgaacttgggctgacgggaagatctggagttatacctacctggagaagagtgtgatgctcctgctgcacagccagcgaaggtacatctttgaatacgaccaacccgattgcctcctctctgttacgatgccgtctatggtacggcactccctgcagacgatgctgtctgtcggatattaccggaacatatatactcctcccgacagcagtacctccttcattcaggactacagccgcgacggccgactgttgcaaaccttgcatctcggcaccggacggagggtgctttacaagtacactaaacaggctaggctctcagaggtgctgtatgatacaacccaggtgacattaacttatgaagaaagctccggtgttattaagactatccacctaatgcatgacggatttatctgtaccataagatataggcagaccgggcccctgattggcaggcagatcttccgatttagcgaagagggcctcgtaaatgcccgattcgactattcctacaataacttccgagtgacgagcatgcaggctgtgattaacgagactcctttgccaattgatctataccgatatgtcgacgtctccggaaggaccgaacagttcggcaagtttagtgtgatcaactatgacctcaaccaagtgataactactactgttatgaaacacacgaagattttttcggctaatggtcaggttatcgaagtgcagtatgaaatattgaaagccattgcttattggatgacaatccagtacgacaatgtgggacggatggttatttgtgatatccgtgtgggtgttgatgccaatattactcgatacttttacgagtatgacgccgatggtcagctgcaaacagtttctgttaacgacaagacccagtggcggtactcttacgacctcaatgggaatatcaatctgcttagccacggtaaatcagcacgactcacgcccctgcgatatgacttaagagatagaatcactagactgggggaaattcaatataagatggacgaagatggctttcttcgccaacgggggaatgacatattcgaatataattcaaacggactgttgcagaaggcatataataaagcgagtgggtggactgtgcagtattattatgatggcctcgggaggcgcgtggctagtaagagcagtttaggccagcacctgcagtttttctacgctgatttgaccaaccccatcagggtgacacacctctacaatcacactagcagcgagatcacttcattatattacgacttacaagggcacctcattgccatggaactgagttcaggagaagaatattacgtggcctgcgataatacaggcacacctttggcggtattttcgagcagaggacaagtgatcaaagaaatcttgtacactccctatggagacatataccacgacacttatccggatttccaagttattatcggatttcatggggggctgtacgacttcctgactaaactggttcaccttggacagagggattacgacgttgttgctggtaggtggacaacacccaaccatcacatctggaagcagctcaatcttttgccaaagccttttaatctttactctttcgagaacaattatccggttggtaagatacaagacgtggcaaagtacacaacagatattcgaagttggttagagctcttcggtttccagctgcacaatgtgctgcctggcttccctaaacctgaactggagaatctggagctgacttacgagctactgagattgcaaaccaaaactcaggagtgggacccgggcaagacaattctaggcatccagtgtgaactccagaaacagctgcgaaattttatcagcctcgaccagttgcctatgacacctcgttacaacgatggaaggtgcttggagggcggcaaacagccacgatttgcggccgtgccaagcgtgttcgggaaaggcattaagtttgcaattaaagatggaatcgtgactgccgacatcattggcgtggcaaatgaggattcccggcggcttgccgcgatcctaaacaacgcccactaccttgagaacctgcacttcaccattgagggtagggatacacactatttcatcaagttggggtcgctggaggaagacctggtccttatcgggaataccggaggccgtagaatcctggagaatggagtcaacgtgactgtatcacagatgacatcggtacttaatggtcgaacaagacgctttgctgacattcaactgcagcacggggcgctgtgctttaacatcaggtacggaaccacagtggaagaagagaagaaccacgttttggagattgctcgccagcgagctgtcgcacaggcctggacaaaagaacagagacgcctccaggaaggcgaggaagggatccgcgcctggacagaaggtgaaaagcagcagttacttagtacaggcagagtgcaaggctacgacggctatttcgtgctgtccgtggaacagtatctggagctctctgattctgctaataatatccacttcatgcggcagagcgagattgggcgccgctag

SEQ ID NO: 9552 - DNA, 264 bp, synthetic construct
  misc_feature 1..264: note = source = /note="Description of Artificial Sequence: Synthetic coding sequence"
  source 1..264: mol_type = other DNA
atgaaggtgctgctgctgaccggcctgggcgccctgttcttcgcctattattgggacgataattttgatccagctagcctccagggggcccgcgttctcctgaccggcgcaaacgcaggggtgggggaggagcttgcgtaccattatgcacggctgggctcacatctggtgctgacggcccataccgaggcgctgttacagaaggcacggtggttgaccctggttgtaagcaccctcggaggccgtggcaagtggataacctag

SEQ ID NO: 9553 - DNA, 1233 bp, synthetic construct
  misc_feature 1..1233: note = source = /note="Description of Artificial Sequence: Synthetic coding sequence"
  source 1..1233: mol_type = other DNA
atgcgggcctgcatcagcctggtgctggccgtgctgtgcggcctggcttgggcaggcaaaatcgaatcatgcgcatctaggtgtaacgagaagttcaaccgggacgccgcatgccagtgcgatcgccgctgcctatggcatggcaattgttgtgaggactatgagcacctttgtaccgaggaccacaaagaaagtgaacctctgccccaactggaagaggagacggaagaagccttagcaagcaacctgtacagcgcacctacttcatgccaggggagatgttatgaagccttcgataagcaccatcaatgccattgcaacgccagatgccaagagttcggcaattgctgtaaggatttcgagagcctgtgctcagaccacgaagtctctcactcatcagacgccatcaccaaagaagagattcagagcatctctgaaaagatttatcgagctgacaccaacaaagcccagaaagaggacatcgttctgaatagccagaattgtatcagccccagcgagactcgtaatcaagtcgaccgctgtcccaagcccttgtttacttatgttaacgagaagctgttctccaagcccacatatgccgccttcatcaatctcctgaacaactaccagcgtgcaactggccatggggagcacttcagcgctcaggagctcgcagagcaggacgcttttttacgggagattatgaaaacagctgtgatgaaagagctgtatagctttttgcatcaccagaatagatatggaagcgagcaggaatttgtggatgatctgaagaacatgtggttcggattgtattctaggggaaacgaagagggggatagcagtgggttcgagcacgtcttttctggcgaagtaaaaaagggtaaggttacaggcttccataattggatcaggttctacctcgaagaaaaggagggcctcgtggattactattcccatatttacgatggcccctgggatagctatcccgatgttctcgctatgcagtttaattgggacggttattataaagaagtaggcagtgcatttattggctctagtccggagtttgagttcgccttgtatagcctgtgtttcattgctagacccggaaaagtgtgtcagctctcccttggaggctaccccctcgccgtgaggacgtacacttgggataagtcgacctatggcaacgggaaaaagtacatcgcgaccgcatacatcgtgtcaagcacctag

SEQ ID NO: 9554 - DNA, 351 bp, synthetic construct
  misc_feature 1..351: note = source = /note="Description of Artificial Sequence: Synthetic coding sequence"
  source 1..351: mol_type = other DNA
atggccgccggcagcgcccccatgcagctgcacctgcgggccaccatcagaatgaaagacggactgtgcgtgcctcgcaagtggatttaccacctcactgagggctcaacagatctgcgcacagaaggtcgtcccgatatgaagactgaactcttctcatcctcttgccctgggggtataatgctgaacgaaacaggtcagggttaccagcgatttctgctctacaacagatcacctcacccacccgagaagtgcgtggaggagttcaaaagtctgacttcatgtctagactcgaaggccttcctccttaccccaagaaaccaggaggcgtgtgagctgtcaaacaattag

SEQ ID NO: 9555 - DNA, 1200 bp, synthetic construct
  misc_feature 1..1200: note = source = /note="Description of Artificial Sequence: Synthetic coding sequence"
  source 1..1200: mol_type = other DNA
atgagcgcccggggccggtgggagggcggcggccggcgggcctgccggggatccctgggactggctagagcgcagggtgctgaaagggttaccagtagcgagcagcgtccagccatggcatctctgggcctcctccttctgctcttactgactgccctgcccccgctctggtccagtagcctgcctggactagacactgccgaaagcaaggctaccattgcggacctgatcctatcagccctcgagcgcgccactgtgttcctagaacagagactgcctgagattaatctggacggcatggtcggtgtccgagtactggaggaacagctcaagtccgtaagggagaagtgggcccaggagcccctcttgcagccactaagtctcagggtcggcatgctgggagaaaagcttgaggcagccatccagcggtccctgcactaccttaagttgagcgatcccaaatacctccgggaattccagctgaccctccagcccggtttctggaagctgccccatgcctggatacacacagatgccagccttgtgtacccaaccttcggaccacaggattctttcagtgaagagagatcagacgtgtgtcttgtgcagctgctggggacaggtacagattcaagtgagccatgcggtctctcagacttgtgtcgcagcctcatgaccaagccaggctgcagcggctactgcctcagccatcaactactctttttcctctgggctcgcatgcgaggttgtacccaaggccccttgcagcagagccaggattatatcaacctcttctgcgctaacatgatggatctgaaccgtagggctgaagccataggatatgcataccctacgagagatatcttcatggaaaatataatgttttgtggaatgggcggcttctcagacttctacaaactgaggtggttggaagccatcctctcttggcagaagcagcaggaaggttgtttcggggaacctgacgcggaggatgaggaactgagcaaggctatccagtaccaacagcacttctcccgtcgggtgaagcggcgtgaaaaacagtttcctgatggatgcagttcgcacaacacggcaaccgccgtggctgcccttgggggctttctgtatatcctggcagagtacccgcctgctaacagagagccgcatccaagcactcctcctccacccagtagtaggtag

SEQ ID NO: 9556 - DNA, 510 bp, synthetic construct
  misc_feature 1..510: note = source = /note="Description of Artificial Sequence: Synthetic coding sequence"
  source 1..510: mol_type = other DNA
atgctgagcagcgtggtgttctggggcctgatcgccctgatcggcacttctcgaggttcctacccattttctcattcaatgaaacctcacctgcatccgaggctgtatcacggctgttatggagatatcatgaccatgaaaacatctggcgccacttgcgatgccaacagtgtgatgaattgcggaatccgaggatctgagatgttcgctgaaatggatctgcgggcgatcaaaccttatcagacactgatcaaggaggtggggcagcgccattgcgttgatcctgccgtgattgccgccattatctcccgggaatctcatggtggtagtgtgctgcaggacggctgggaccaccgggggttgaagtttggtcttatgcaactggacaaacagacttaccacccagtcggcgcgtgggactctaaagagcatctgtcccaggctaccgggattctaactgaacggatcaaggctattcagaaaaagttcccgacctggagtgtcgcctag

SEQ ID NO: 9557 - DNA, 300 bp, synthetic construct
  misc_feature 1..300: note = source = /note="Description of Artificial Sequence: Synthetic coding sequence"
  source 1..300: mol_type = other DNA
atggagcggatcagcgccttcttcagcagcatctgggacaccatccttaccaaacatcaggaaggcatctataatacgatttgcctgggagtcctcctggggcttcccttgttagtgataattacccttctgtttatctgttgtcattgctgctggtcccccccaggcaagcgagggcagcagcccgaaaagaacaagaagaagaaaaaaaagaagaagaaaaaagatgaggaggacctgtggatctctgcccagcccaagttgttgcagatggagaaaaggccctctctgccggtgtag

SEQ ID NO: 9558 - DNA, 468 bp, synthetic construct
  misc_feature 1..468: note = source = /note="Description of Artificial Sequence: Synthetic coding sequence"
  source 1..468: mol_type = other DNA
atgaccagcctgaagtgcggcgagaacctgtacatgagcagcgcctccagcagctggtcgcaggctatacagtcttggtttgatgagtacaacgacttcgacttcggcgtgggcccaaaaacacccaatgctgtcgttgggcattacacacaggtcgtttggtactcctcctatctggtgggttgcgggaacgcctactgccccaaccagaaagtgcttaaatattactacgtgtgccagtactgcccggctgggaattgggccaatcggctgtatgtgccctacgagcagggagcaccttgcgctagttgcccagacaactgtgatgacggtctgtgtacgaacggttgcaaatatgaagatttgtattccaattgcaagtccctgaaactgactctgacttgcaaacaccaattagtgcgggactcttgcaaggctagctgtaactgttctaactcaatatattag

SEQ ID NO: 9559 - DNA, 2886 bp, synthetic construct
  misc_feature 1..2886: note = source = /note="Description of Artificial Sequence: Synthetic coding sequence"
  source 1..2886: mol_type = other DNA
atgctgctgctgctgctgctggcccccctgttcctgcggccccccggcgccggcggggcacaaaccccaaacgccaccagtgagggctgccaaattatccatcccccctgggagggcggtattagataccgcggtctaacaagagatcaggtgaaagcaataaattttttgcctgtggactacgaaattgagtatgtgtgtagaggggagcgtgaggtggtgggacccaaggtgcggaagtgtctggcaaacggttcctggacagacatggatactcccagccgttgcgtccggatatgtagtaaatcatacttaacactcgaaaacgggaaagtgtttctcactgggggggaccttccagcactcgacggcgctcgcgtcgacttccgctgtgatccggacttccatctggtaggatcatcacgctccatttgttcacagggccagtggagcactccaaaacctcactgccaggtgaaccggacgccccactcagagcgtagagccgtttacatcggagcgctattccctatgtccggcggatggcccggcggtcaggcctgtcagccagctgtagagatggcattggaagatgtgaactcgcggcgagacatcttgccggattatgagctgaagcttattcatcacgactcaaaatgcgatcccgggcaggcgaccaaatatctctatgagctcctctataacgacccaattaagatcattcttatgccaggatgttcctctgtgtctaccttggtggccgaagcggcccggatgtggaacctgatcgtgctgtcttatggctccagtagccctgccctgagcaaccgacaacgattccccacatttttccgaacacaccccagcgcaacccttcacaacccaacccgagttaagctctttgaaaagtggggatggaagaagatcgccaccatccagcagaccaccgaggtattcacctccacgcttgacgacctggaagagcgggtaaaggaagccgggatcgagattaccttccgtcagagcttcttctcagacccggccgttccagtgaagaatctgaaaaggcaagacgctaggatcatcgtgggcctgttttatgaaactgaagcaagaaaagtgttctgtgaggtctataaagaacgtctgttcggcaagaagtatgtttggtttttaatcggttggtacgctgataactggttcaagatctatgatccatccatcaactgtaccgtcgatgaaatgaccgaagctgtcgagggccacatcacaaccgagattgtgatgctaaacccagctaatacaagaagcattagtaatatgacctctcaagaattcgtcgaaaaactcacaaaaagactgaaaagacatccggaggagacggggggatttcaggaggcacccctggcgtatgatgccatctgggccttagccttagctctgaataagacgagcgggggaggcggacggagtggggtgagactggaggattttaactacaacaatcaaactattacagaccagatataccgggccatgaactcgtccagttttgaaggtgtcagcggacatgttgtttttgacgcctctggctcaagaatggcctggactctaatagagcagttgcagggagggtcttataagaagatcgggtattatgattcgaccaaggacgacttgagctggagcaaaactgataagtggattggaggaagcccccctgcagaccaaacactggttatcaagacctttaggttcctcagtcagaaactgttcatatctgtcagtgtgttaagctccttgggaatagtgctggcagttgtctgcttatccttcaatatttacaattcccatgtgagatatatccagaacagccaacctaatctcaataacctaaccgctgtcgggtgttcccttgccttggctgcggtattccctctgggcttggatgggtatcatatcggtcggaaccaattccctttcgtttgtcaggccaggctctggttacttggtctgggcttttccctgggctatgggagcatgtttacaaaaatttggtgggtacacactgtgttcaccaagaaggaggaaaagaaggagtggcggaaaacattagaaccttggaagctgtatgctacagttggacttctagtcgggatggatgtgctgaccctggccatctggcagatcgtcgatcccctccacagaaccatcgagacctttgccaaggaggagcccaaagaggacatagatgtgagcattctccctcagctcgaacactgctcaagtcggaaaatgaatacatggttaggaatattttatgggtataaaggactgttgctcttgcttggcatttttttagcttatgagactaaaagtgtgagcacagagaagatcaacgatcatcgggctgtcggcatggccatatacaatgtcgcggtactctgtctcatcaccgcccctgtaaccatgatcctttcgagccagcaggatgcggcattcgcatttgccagcttggctatcgtgttttcttcctatataaccctggtcgtgctgttcgtgcctaagatgcgcaggctcataacaagaggagaatggcagtccgaagctcaagatacgatgaagactggctcatcaaccaacaacaatgaggaggagaagtctcggttactggagaaagaaaatagggaactggaaaagatcatcgctgagaaagaggagcgagtatctgagctgcggcatcaactacagagcagacagcagttaagaagcagacggcatccccctacgccccctgaaccttccggtgggctgccccgcgggccgcccgagccacccgataggcttagctgtgatgggtctcgtgtgcacttgctttacaagtag

SEQ ID NO: 9560 - DNA, 444 bp, synthetic construct
  misc_feature 1..444: note = source = /note="Description of Artificial Sequence: Synthetic coding sequence"
  source 1..444: mol_type = other DNA
atggccggcccctggaccttcaccctgctgtgcggcctgctggccgccacattaatccaggcaactttatcccctacggctgtgctgatcctggggcctaaggtcataaaggagaagttgacccaggagcttaaagaccacaatgcaacaagcatcctgcaacagcttcctctgctgagcgcaatgagggagaagcccgcaggcgggatccccgtcctgggcagtctagtgaacaccgtactgaaacacataatttggctaaaagtgattacggctaacatcctgcaattgcaggtaaaaccaagcgctaacgaccaggagcttttggttaagatccctctggacatggtcgctggattcaatacccccctcgtgaagaccatagtggagttccatatgaccactgaggcccaggcgaccattagaatggacacgagtgcatag

SEQ ID NO: 9561 - DNA, 948 bp, synthetic construct
  misc_feature 1..948: note = source = /note="Description of Artificial Sequence: Synthetic coding sequence"
  source 1..948: mol_type = other DNA
atgaaggtgctgctgctgaccggcctgggcgccctgttcttcgcctactattgggacgataacttcgatcccgcttcattgcaaggagcccgcgtgctgctgacaggcgctaacgccggcgtgggagaggagctcgcttaccactatgcccggttggggtctcacctggtgttgactgcccacacggaagcccttctgcaaaaggtggtggggaattgtcgtaagcttggagctcctaaggtcttttacatagcggcagatatggccagtcccgaggcccccgaaagcgttgtgcagtttgccttagacaagctcggaggcctggactatctcgtccttaaccacatcggaggagcccctgcagggacaagggctaggagtccacaggccaccagatggctcatgcaagtgaattttgtgtcatacgtccagttgacgagtagagctctacccagtctcacggattcgaaagggtccctagtcgtggttagcagtttgctgggacgagttccaactagtttctccactccttatagtgcagcgaagtttgcactcgacgggtttttcgggagcctgaggcgcgaactggatgtccaggatgtcaacgttgctatcactatgtgcgtgcttggattgagggaccgcgctagcgctgcagaggcagtgcgtagctctactagccgcccaaggcaacccgaacatcgaggcgtgccactgcaaagtcagacggccatgttcctgcctcctaccgtgcccggagctcggacactgacagaaacacctctccgggggtggcctcagccaaagatgaagagctctaggcagaaaagcaagacagagaagaacgatggacacctggaacccgtcacggcatgggaagtgcaggtgcctagggtgagacgtctttgccgcggtttggcccgaccgcatctctttggccatgactag

SEQ ID NO: 9562 - DNA, 285 bp, synthetic construct
  misc_feature 1..285: note = source = /note="Description of Artificial Sequence: Synthetic coding sequence"
  source 1..285: mol_type = other DNA
atgcagcacagcctggtgttcttcttcgccgtgatcctgcacctgtcccacttgctgcacttggacgcctcaatccatcccttccgacttcccttcagcagcaaaccgtttctgcttattccaatgtcaaacaccactttgccgcacaccgcatggccattgagcttcctgcatcaaacggtgtctacactgaaggccgtggccgtgacccactctttgtggcacctccaaataccagtagattgccaggcgtgcaatagaaagtctaaaaaaatctactgttag

SEQ ID NO: 9563 - DNA, 783 bp, synthetic construct
  misc_feature 1..783: note = source = /note="Description of Artificial Sequence: Synthetic coding sequence"
  source 1..783: mol_type = other DNA
atggagaagttcaacaccatcagcgtgagcaagtgcaacaaggagactgtcgccatgaaagagaagtgtaagttcggcatgacctccactattccaagcggccatgtgtggcgcaacacatggaacccagtgtcttgcagcctggcaacagtgaagatgaaggagtgtctgcgcgggaaactgatttacttgatgggggactccactatccgtcaatggatggaatactttaaggcttccatcaacactctaaaaagtgtagatctgcacgagtccggaaaattacagcaccaactggcggtcgatctggatcggaatatcaacattcagtggcagaaatattgctacccattgattggctctatgacctatagtgtgaaagagatggagtacctgacacgggctatagacaggacgggcggagaaaagaacaccgtaatcgtgatctccctcgggcagcattttagaccctttccaatcgatgtctttattcgtcgtgctctgaacgtgcataaggcgattcagcacttactgctccgctcccctgataccatggtgatcatcaagaccgaaaacattagggaaatgtacaacgacgctgagagattttctgactttcatggctatattcagtacctgataattaaggatatcttccaagatctatctgttagcatcattgacgcatgggatatcacaattgcctacggaacgaacaatgtgcatccgccacagcatgtggtaggcaaccagattaacatcttgcttaattacatctgctag

SEQ ID NO: 9564 - DNA, 1644 bp, synthetic construct
  misc_feature 1..1644: note = source = /note="Description of Artificial Sequence: Synthetic coding sequence"
  source 1..1644: mol_type = other DNA
atgagcagcaacaccatgctgcagaagaccctgctgatcctgatctcttttagcgttgtgacatggatgatttttatcatcagtcagaactttaccaagttgtggagtgctctaaacctgagcatttcagtccattattggaataattctgctaaatctctctttcccaagacctccttaatccccctgaagccactgaccgagacagaactgaggattaaagagatcatcgaaaaacttgatcagcagatccccccaagaccatttactcacgtgaacacgacgacatcagccactcactctacagccactatcctcaacccgcgcgacacttactgcagaggcgaccagctggatatactgctggaggttcgagatcatttgggacaaaggaagcagtacggcggtgatttcctacgggcccgaatgtcctccccagcactcaccgctggcgcctccgggaaagtcatggattttaataacggaacttacctggtgtcattcacactcttctgggaaggacaagtaagcctgagcctgctcttgatacacccaagtgagggagcatctgccctttggcgtgcccgcaatcagggctacgataagatcattttcaaagggaagtttgtgaatgggacctctcatgtatttacggagtgtggcctgaccctcaacagcaatgctgaactttgcgagtatctcgacgatagagatcaggaggccttctactgcatgaaaccacagcacatgccctgcgaagcactgacgtacatgaccacacgaaatcgagaggttagttacctgacagataaagagaactcgctgtttcacaggagcaaggtgggtgtggaaatgatgaaagaccgaaagcacatcgacgtgaccaattgtaacaaacgcgaaaagattgaagaaacatgtcaggtgggtatgaagccacccgttccgggcgggtacaccctccagggaaaatggatcacaaccttctgcaatcaagtgcaattggataccataaaaattaatggctgcctgaaggggaagctcatctaccttctcggtgatagtacacttcggcagtggatttattatttccccaaggtggtcaaaacattgaagttctttgacctgcacgagaccggcatctttaagaaacacctgctcctagacgctgagcgacatactcagatccagtggaaaaaacattcataccctttcgtaaccttccagctgtactctctgattgatcacgactatattccgagagagatagatcgtctgtcgggagacaaaaacactgccatagttatcacttttggccagcactttaggccatttcctatcgatatattcattcggcgcgccataggtgttcagaaagctatcgaacggctatttctgagaagtcctgccacaaaggttattataaagaccgagaatattcgggaaatgcacattgagacggagcgatttggcgattttcatggatacatccattacctgatcatgaaggacatctttaaagacctaaatgtcggtatcatcgacgcatgggacatgaccatcgcatacgggaccgacacgatccatccgccagaccatgtgatcggcaaccagattaatatgtttctcaattacatctgctag

SEQ ID NO: 9565 - DNA, 399 bp, synthetic construct
  misc_feature 1..399: note = source = /note="Description of Artificial Sequence: Synthetic coding sequence"
  source 1..399: mol_type = other DNA
atgctgatgctgttcgtgttcggcgtgctgctgcacgaggtgagcctgagcgggcagaacgaggccccacccaacactcattctatccctggagaacctctttacaattacgcatccattcgactacctgaggagcacatcccattctttttacacaataatcggcacattgccacagtttgtcgcaaggacagcctttgtccttacaaaaaacatttggagaagctgaagtactgctggggttacgaaaagagctgtaaaccggagtttcggtttggatacccggtttgtagttacgtcgacatgggctggactgacactctggaaagcgctgaagacattttttggaagcaggcggattttgggtacgcgcgcgagcgacttgaggagatgcactag

SEQ ID NO: 9566 - DNA, 861 bp, synthetic construct
  misc_feature 1..861: note = source = /note="Description of Artificial Sequence: Synthetic coding sequence"
  source 1..861: mol_type = other DNA
atgggcagcgccctgttcgtgaagaaggagctgcagctgcaggccaatttcctcggaaacgttaaaagactgtacgaagccgaggtattttcaactgattttagtaatccttccatagcccaggctcggatcaatagccatgtaaagaagaagacacagggcaaagtcgttgatattattcagggcctggacctgcttactgctatggtgctggttaaccatatcttttttaaagctaaatgggagaagccattccaccctgagtacaccagaaagaatttccctttcctggttggtgagcaggttacagtccacgtgcccatgatgcatcaaaaagagcagttcgccttcggagttgacaccgaactgaactgcttcgtcctgcagatggattataaaggcgacgctgttgcgttttttgtgctcccgagtaaaggcaagatgaggcaactggagcaggccctctcggccaggaccttgcgcaagtggtcccacagtctgcagaaacgatggatcgaggtcttcatcccccggttctcgatttccgcatcttacaatctagagacgatccttcctaaaatgggcatccagaacgtgttcgataagaacgctgacttctctgggattgcgaaaagagattctctccaggtgtccaaagccacccacaaggctgtcttagacgtgagcgaggaagggaccgaggctacagcagcaactactactaagtttatagtccgcagtaaggacggtcctagttatttcacagtcagcttcaaccggacatttctgatgatgatcaccaacaaagcaacagacgggattctctttctggggaaggtcgagaaccccactaaatcatag

SEQ ID NO: 9567 - DNA, 60 bp, synthetic construct
  misc_feature 1..60: note = source = /note="Description of Artificial Sequence: Synthetic coding sequence"
  source 1..60: mol_type = other DNA
atgggctggctgacccggatcgtgtgcctgttctggggcgtgctgctgaccgccaggtag

SEQ ID NO: 9568 - DNA, 1197 bp, synthetic construct
  misc_feature 1..1197: note = source = /note="Description of Artificial Sequence: Synthetic coding sequence"
  source 1..1197: mol_type = other DNA
atgaagttccagggccccctggcctgcctgctgctggccctgtgcctgggctccggcgaggccgggccactacagtctggcgaagaatccaccgggaccaacatcggtgaggcactagggcacggtctgggggacgccctctctgagggtgtcggcaaagcaattgggaaagaggcgggaggagctgctggtagtaaagtgtccgaggcgcttggtcaggggactagagaggcagtgggaacaggcgttcgccaggttcctgggttcggggtcgcagatgcactggggaatcgtgtcggcgaagccgcccacgcattaggaaacacaggccatgaaatcgggaggcaagctgaagatgtgatccgccacggcgccgacgccgtgcgcggttcctggcagggagttccgggccacaacggcgcatgggagaccagcggcggccatggtatctttgggtcccagggcggactgggtggacagggtcagggcaaccccggcggcctggggaccccttgggtgcatgggtaccctggtaacagcgcgggtagctttggcatgaatcctcaaggcgcaccatggggccaggggggtaatgggggcccaccaaacttcggtactaatacccagggtgcagtggcacaacccggttatggctctgtgcgggctagcaaccagaacgaaggatgtaccaatcccccccctagcgggagcggcgggggttcaagtaactctggcggggggagcggcagccagagcgggagtagcggctcaggatcaaatggcgataacaacaacggatcatcaagtggcgggagtagttccggctcaagctcaggtgggtcttcaggaggcagtagtgggggaagctctggcaacagcggcggcagtcgaggcgattccgggtccgagagctcgtggggaagcagcacaggttcatcatctgggaatcacggcggtagcggcggtggtaacggacacaagcccgggtgtgagaagccaggcaatgaagcacgcgggtcaggggagtctggcatccaagggttccgaggccaaggcgtttcctctaacatgcgtaactccgagacttcccccgggatgttcaattttgatacattctggaaaaacttcaagtctaagctgggcttcatcaactgggacgcaatcaacaaggaccagaggagctctcgaataccctag

SEQ ID NO: 9569 - DNA, 81 bp, synthetic construct
  misc_feature 1..81: note = source = /note="Description of Artificial Sequence: Synthetic coding sequence"
  source 1..81: mol_type = other DNA
atggcccccaagaagctgagctgcctgcggagcctgctgctgcccctctccttgaccctgttgctcccccaggccgattag

SEQ ID NO: 9570 - DNA, 696 bp, synthetic construct
  misc_feature 1..696: note = source = /note="Description of Artificial Sequence: Synthetic coding sequence"
  source 1..696: mol_type = other DNA
atggcccagctgttcctgcccctgctggccgccctggtgctggcccaggcgccagccgccctggccgatgtcttagagggggattccagtggcatctataggtgcgaagtgcaacacggcatcgacgatagctccgacgccgtggaggtcaaggttaaaggggtcgtcttcctgtatagagagggaagcgctcggtatgcattttctttctccggcgcccaagaggcatgcgcccggataggggcacatattgcaacccccgagcaactgtacgccgcgtacttgggcggttacgagcagtgcgacgcaggctggctgagcgaccagacggtgaggtatcctatccagacacctagggaggcttgttacggagatatggatgggttcccaggggtgagaaactacggggtggtcgatcccgacgacctgtatgatgtatactgctatgccgaggacctgaatggcgaactgttcctcggtgatcctccagagaagctgaccctcgaagaggctcgggcatattgccaggagcggggagctgagatcgctacaacaggacaactgtatgcagcctgggacggtggccttgaccattgcagtcctggctggctggctgacgggagcgtacggtatccaatcgtcactcccagccagagatgcggcggaggattaccaggcgtgaaaactctgttttag

SEQ ID NO: 9571 - DNA, 600 bp, synthetic construct
  misc_feature 1..600: note = source = /note="Description of Artificial Sequence: Synthetic coding sequence"
  source 1..600: mol_type = other DNA
atggacgagctgctgcccctgatccccgtgctggagcagtacaagacagatgctaagcttatcacccagtttaaggaagaaattcggaacttatccgcggtgctgaccggaattcaggaggaaattggtgcttacgattatgaggagctgcaccagcgagtactgtccctcgaaactcgccttagggattgtatgaagaagctgacttgtggaaagttaatgaagattacaggccccgtgaccgtcaagactagcgggacaaggttcggcgcctggatgacagatcccctggcttcagagaagaataacagagtttggtatatggacagttacaccaacaacaaaattgttcgggaatacaaaagcatagcagactttgtttcaggcgcggagtccagaacctacaacctgccatttaaatgggccggaaccaatcatgtggtctacaacggctccctctatttcaataaataccagtcaaatatcattatcaaatactctttcgatatgggtagggtgttggcccagcggtcattggaatacgcagggtttcataatgtcaccccaacccacggagtggacagcttaacaagtacatag

SEQ ID NO: 9572 - DNA, 609 bp, synthetic construct
  misc_feature 1..609: note = source = /note="Description of Artificial Sequence: Synthetic coding sequence"
  source 1..609: mol_type = other DNA
atggccgacatgcagaacctggtggagcggctggagcgggccgtggggcggctagaagccgtgtctcacacctcggatatgcacagaggttatgccgactctcccagtaaggcaggagcggccccctatgtccaggccttcgactccctattggctggacccgtcgccgagtatctgaagatatccaaggaaattggtggcgacgtgcagaagcacgctgagatggtccatacgggactgaagctcgagcgggcgctcctggtgactgcttcacagtgccagcagcctgcggagaataagctgtccgatctgctcgcgcccatatcagaacagatcaaggaagtaatcacctttagagagaagaaccgcggctctaaactgtttaatcacctctctgctgtaagtgaaagtattcaggccctgggctgggtggccatggccccaaagccgggtccgtatgttaaagagatgaatgacgccgccatgttctacaccaatagagttctcaaggaatataaggatgtggacaaaaaacacgtcgattgggtgaaggcatacttaagtatttggacagagcttcaggcatacattaaagaattccatacatag

SEQ ID NO: 9573 - DNA, 2886 bp, synthetic construct
  misc_feature 1..2886: note = source = /note="Description of Artificial Sequence: Synthetic coding sequence"
  source 1..2886: mol_type = other DNA
atgctgctgctgctgctgctggcccccctgttcctgcggccccccggcgccgggggggcccagactcctaatgctaccagcgagggatgccagatcattcatccgccttgggaagggggcattcgatatcgaggtctgacaagagaccaggtaaaagctattaacttcctccctgtggactatgaaatcgagtacgtttgtaggggtgagcgcgaggtggtgggaccgaaagtccggaaatgcctcgccaacggctcctggactgatatggataccccctccagatgtgtccggatttgttccaagtcttacctcacactggagaatggcaaagtcttcttgacaggaggcgacctgcctgccctggacggagcccgagtggacttccgatgtgatccagactttcatctggtaggcagtagccgttccatttgttcccaggggcagtggagcacgcctaagccacactgccaggtcaatcggaccccacattctgagcgaagggccgtctacataggtgccttattcccgatgagtggtggctggcctggcggacaggcgtgccagcccgctgtggaaatggctcttgaggacgtgaattcccggcgcgatattttacctgactatgagcttaaattaatacaccacgatagcaaatgcgatcccgggcaggccactaaatacctttacgaactactgtataatgatcccatcaagattatccttatgcctgggtgtagctctgtttctacccttgtggcagaagccgctagaatgtggaacctgatcgtgctgagctatggcagctctagccctgcgctatctaatcgacagcgtttccccactttttttagaactcatccctcagccacactgcacaaccctacacgcgtgaaattattcgagaagtggggatggaaaaaaattgcaaccatccagcaaactacagaagtgttcacatctactttggatgacttggaggaaagggtgaaagaagccggaattgagattacctttcggcaatcttttttttccgacccggcggtgccggtcaaaaaccttaaacggcaagatgccagaattattgtgggcctcttttacgagactgaggcccgaaaagtattctgcgaggtttataaggaacgactgttcggcaagaagtacgtgtggttcttgattgggtggtatgctgacaactggtttaaaatctatgatccatctattaattgcaccgttgatgaaatgacggaagctgtggagggccatatcactacagagattgtgatgctgaatcccgctaatacacggtcaattagtaatatgacatctcaggaattcgtcgaaaagctgacaaaaagattgaaaagacacccagaggagacaggcggcttccaggaggccccacttgcttacgatgccatttgggctctggccttggcactgaataagaccagtggtggaggcggccgaagcggcgtgcggctggaagacttcaactataataaccaaacaattactgaccagatttacagggcgatgaatagttcctccttcgagggagtgtccggacatgtggttttcgacgcgagcggttctcggatggcatggactttgatcgagcagctgcaaggaggcagctacaaaaaaattggatactatgatagtaccaaggacgacctctcctggtcaaaaaccgataagtggatcggaggatcgccccctgccgatcagaccctggtgatcaagaccttcagattcctcagtcaaaagctgtttatctccgttagtgtgctgagtagcctgggcatagtactcgccgtggtgtgtctgagtttcaacatctacaattctcacgtgcggtatattcagaactcacagccaaacctaaataacctgactgctgtaggctgttccctcgcgctggccgcggtgtttccactcggcctagacggataccacatcggcagaaatcaatttccgttcgtctgccaagcccggttatggctacttgggctgggattctccttaggatacggctccatgttcaccaagatttggtgggttcacaccgtattcaccaaaaaagaggagaagaaggaatggaggaagaccctggagccgtggaagttgtacgccacagtgggactgctggtaggaatggacgtgctgactctggcaatatggcagattgtcgatccccttcacagaacaatcgagacctttgccaaagaggagccaaaagaggatatcgacgtgagtatcctcccccagctggaacactgttccagccggaaaatgaatacgtggctcggtattttctatggatacaagggcttacttctcctgctgggcatatttttggcgtacgaaactaagtctgtgtcgaccgaaaagattaatgatcacagggccgtgggaatggccatatacaatgtggccgtgctatgcctgatcactgccccggtcactatgatcctgtctagccagcaggatgcggcatttgccttcgcatccttagctatcgtgtttagctcttatataacactggtagtcctcttcgtgcccaaaatgaggagactcataactagaggcgaatggcagtctgaggcccaggacactatgaaaacaggttccagtaccaacaacaacgaggaggaaaagtcccggctgctggagaaggaaaatagagaactggagaagatcatagctgaaaaggaggaacgcgtttctgagctccgccaccagctgcaatcccggcagcagttgcgctctcggcgtcacccaccgaccccacccgagccctcaggcggcctcccaaggggcccaccagagcctccggatcgtctctcttgtgatggcagtagagtgcacttgttgtacaaatag

SEQ ID NO: 9574 - DNA, 351 bp, synthetic construct
  misc_feature 1..351: note = source = /note="Description of Artificial Sequence: Synthetic coding sequence"
  source 1..351: mol_type = other DNA
atggccgccggcagcgcccccatgcagctgcacctgcgggccaccatccgcatgaaagacggtttatgcgtccctcgcaagtggatctatcatctcacagaaggatctacagatttgcgcaccgaagggaggcccgacatgaagaccgaactgtttagctcttcttgtcctggagggattatgctgaatgagacagggcaggggtaccaacgctttctgctatataaccggtctccccacccgcctgaaaagtgtgtcgaggaatttaagagcttgacatcttgcctggacagcaaggccttcttattgactcctagaaaccaagaagcatgtgaactgtcaaataactag

SEQ ID NO: 9575 - DNA, 2334 bp, synthetic construct
  misc_feature 1..2334: note = source = /note="Description of Artificial Sequence: Synthetic coding sequence"
  source 1..2334: mol_type = other DNA
atggccgccgccggcctggtggccgtggccgccgccgccgagtactcgggcaccgtggcctctggaggcaatctgcccggtgtgcattgtggtccatcctccggggccggccctggcttcggaccgggcagctggtccaggagtctggaccgggcccttgaggaggcagccgtaacaggggttctgtccctcagcgggcgaaagctgcgcgagttcccgcggggagctgcgaatcatgacctgaccgataccactcgcgctgatctgtcccggaataggctgagtgaaattcctatcgaggcctgccactttgtgtctcttgagaaccttaatctttaccagaattgtatccggtatattcccgaggccatcctgaatctacaggctctgacattcctgaatataagccggaatcagctgagcacattaccagtgcacctgtgtaaccttcccttgaaggtgctcattgccagtaacaataagctggtatctctgccagaagagattggacacctgcgccacctgatggagctggatgtttcttgcaacgagatccagaccatcccgagccagatcgggaacttagaggccctgcgtgatctcaacgtgcgaaggaatcacctggttcacttacctgaagagctcgccgagttgcccctaatcagactcgatttttcttgcaacaagatcactaccatcccggtttgctacaggaacttgcgccaccttcagaccatcaccctcgacaacaatccccttcagtccccaccggcccaaatctgtattaagggaaaggttcatattttcaaatacttgaacatccaggcttgcaaaatcgcccctgatctaccagattatgaccggagaccgctggggttcggatcatgccatgaagaattgtactcatctcgaccttatggagccctggacagtgggtttaactctgttgattccggggataaacgctggtctggcaacgagcccacagatgaattttccgatttgccactcagggtcgccgagatcaccaaggagcagagactccgccgggaatcacagtaccaggaaaaccggggttccttggtcgttacgaatgggggcgtggaacatgacctggaccaaatcgactatatcgattcatgtaccgcagaagaagaggaagctgaggtaaggcagccaaaaggccccgaccctgactcactgtcctcgcaattcatggcttacatcgaacagaggagaatcagtcatgagggatccccagttaaaccagtggccatcagggaatttcagaaaacggaggatatgcggcggtatctccatcagaatcgcgttccagcagaacccagtagcctcctgtctctttctgctagtcacaaccagctgtctcataccgatctggagctgcatcagcgacgagagcagctcgtcgaacgcacacgcagggaagcacagttggctgccttgcagtacgaggaagagaagattcgcacaaagcagatccaacgggacgccgtgctcgacttcgtgaagcagaaagccagccagagcccccagaaacagcacccattgcttgacggtgtagacggtgaatgtccattcccctccagacggtcccagcacactgacgactcagccttgtgcatgagcctatccggcttaaatcaagttggctgcgctgctactcttcctcacagttctgccttcacaccactgaaaagcgacgacagaccaaatgccttactctcctcacccgccactgagactgtgcaccactctccggcttactctttccctgccgctatccagcgcaatcagcctcagagaccagaaagcttcctgttcagagctggggtgcgggccgaaacaaacaaggggcatgcctctccactacctccgagtgccgctcccaccacagactccactgatagcattactggtcagaacagtcggcagcgggaggaggagttggaacttatcgaccagctacgtaagcatattgagtatcggctgaaagtttctctgccttgcgaccttggagccgccctcactgatggcgtggtgttgtgccacctggccaaccatgtacggccccggtcagtgccttcaatccatgtgccttcccccgcggtgccaaaactgactatggccaaatgcagaagaaacgtggaaaactttttagaggcctgtaggaaaataggagtgcctcaggagcagttatgcttacctttacacatcttagaggagaaagggctatctcaggtagccgtgaccgtgcaggctctcttagagctcgcccctcccaagcagcaacagcaccagttgtcagctgtttag

SEQ ID NO: 9576 - DNA, 834 bp, synthetic construct
  misc_feature 1..834: note = source = /note="Description of Artificial Sequence: Synthetic coding sequence"
  source 1..834: mol_type = other DNA
atgctgcaccccgagaccagccccggccggggccacctgctggccgttctgctggcgctgctgggcaccacttgggctgaagtgtggcctccccaactccaggagcaagctccaatggctggcgcgttgaatcgcaaagaaagcttcctgcttctaagcttacataatcgtttacgatcatgggtgcaaccgcctgcagccgacatgcggcgtttattggtatgggccacttcctctcagctgggctgtggacgccatctttgctcagccggccagactgcgattgaagccttcgtgtgcgcttattctccggggggcaactgggaagtcaatggcaagaccatcatcccttataaaaaaggggcctggtgctccctttgcacggcatccgtttccggatgctttaaagcctgggaccatgcaggcgggctctgtgaagttcccagaaacccatgcagaatgtcctgccagaatcacggcagattaaatataagcacatgccactgtcattgtccccccgggtacaccggtaggtactgccaaggccacctgcccaatagtaacatgccccattccgccatgggaaccaagcctaagacgccaggcgtgcccgcgataggctccctcgtgcgctgctcactccaatgcgtccacggcagattccgggaagaagaatgctcctgtgtctgcgacatcggctatggcggagctcagtgcgcgagtgaatcttgccccagagccccgaaagaaccagctcccctcaaaacccccttgcagtggggaatatctagtcaagagcccgctgtctgtctctccttccagctaattcagtag

SEQ ID NO: 9577 - DNA, 456 bp, synthetic construct
  misc_feature 1..456: note = source = /note="Description of Artificial Sequence: Synthetic coding sequence"
  source 1..456: mol_type = other DNA
atgagcgacctgctgctgctgggcctgatcggcggcctgaccctgctgctgcttctcacgctcctcgcattcgccgggtattccgggctcctcgccggcgtcgaagtgtctgctggtagcccacctatccgcaatgttacagtcgcatacaaattccatatgggtctctatggagagaccggcagattattcacggaatcatgctccatttcacctaagctccggtctatcgctgtgtactatgataacccgcatatggtgccccccgacaaatgccgctgtgccgttggcagtattctgagtgaaggcgaagagtcgccgtcccctgagctgatcgacctgtaccagaagtttggtttcaaggtattttcgtttcctgccccatctcatgttgtgacagccaccttcccctacactaccattctcagcatttggttggccactagacgtgtgtag

SEQ ID NO: 9578 - DNA, 390 bp, synthetic construct
  misc_feature 1..390: note = source = /note="Description of Artificial Sequence: Synthetic coding sequence"
  source 1..390: mol_type = other DNA
atggccgccggcagcgcccccatgcagctgcacctgcgggccaccattagaatgaaggacggtctgtgcgtgccccgtaaatggatataccacttgacggagggctccacagatctgcggacggagggacggcccgacatgaagacagagttgttcagcagcagctgtcctggcgggattatgctgaatgaaaccggtcaaggatatcagcgattcttactgtacaatcggtctccacacccacctgagaaatgtgtggaggaattcaaaagcctaaccagttgcttggattcgaaggccttcctgctgacccctcggaatcagggaaagggcttaaagagccataagacagggctcggcctgacgaaatcttccggcgtgactggttag

SEQ ID NO: 9579 - DNA, 390 bp, synthetic construct
  misc_feature 1..390: note = source = /note="Description of Artificial Sequence: Synthetic coding sequence"
  source 1..390: mol_type = other DNA
atggccgccggcagcgcccccatgcagctgcacctgcgggccaccattaggatgaaggatggcctatgtgtcccacgcaagtggatctatcacttgaccgaaggatcaacggacctcagaaccgaaggtagacccgacatgaagaccgaattgttcagcagttcttgccccggaggcatcatgctaaatgagacaggacaggggtatcagcgcttcctgctctataacaggtctccacatcctcctgaaaaatgcgtcgaggagttcaaatctctgacgtcatgcctcgactccaaagctttcctcctgactcccaggaatcaggggaagggacttaagtcacacaagacaggcctggggctcacaaagtctagtggagtaacaggttag

SEQ ID NO: 9580 - DNA, 891 bp, synthetic construct
  misc_feature 1..891: note = source = /note="Description of Artificial Sequence: Synthetic coding sequence"
  source 1..891: mol_type = other DNA
atggaggccctgctgctgggcgccggcctgctgctgggcgcctacgtgttagtttactacaatctcgtgaaggcacctccgtgcggaggcatggggaacctgagggggagaacagccgtcgtcaccggtatttccagctgtggcaggacaagagaagcgttcaatctgctgctgcgagtcaaccacattggaccttttttactaactcatttactgctgccgtgtcttaaagcctgcgccccctcacgcgtggtggtcgtggctagcgctgctcattgtagggggagactggactttaaaagattagaccggcctgtcgtgggctggcgccaggagctgcgcgcgtacgcagacactaagctggccaacgtattgtttgcacgcgaattggccaaccagctggaagctaccggagtaacttgttacgctgcgcaccctggcccggtgaactcagagctgttcctacggcacgtgcctggatggcttaggcccctcctgcgacctctggcatggcttgtgctgcgagccccccgcggcggagcccaaacgcctctctactgcgcattgcaagaaggcatcgaacccttatcaggcagatacttcgccaattgccacgtggaagaagtgccccctgcggccagggacgatcgggccgcacatcggctgtgggaggcttccaagcggttggccggcctcggcccaggagaggatgccgagcctgacgaagacccccagagtgaagacagcgaagctcccagctctctgagtacccctcaccctgaggaaccgacggtttctcagccttacccatcaccgcagtcaagtcctgatctgtcgaagatgacacatcggatccaggcaaaggtcgagcccgaaattcagttgagctag

SEQ ID NO: 9581 - DNA, 567 bp, synthetic construct
  misc_feature 1..567: note = source = /note="Description of Artificial Sequence: Synthetic coding sequence"
  source 1..567: mol_type = other DNA
atgttccaccagatctgggccgccctgctgtacttctacggcatcattctgaattcaatctatcagtgccctgagcactctcaactcacaacgcttggcgttgatggcaaagagtttcctgaggtccatctcggacagtggtacttcattgctggggccgctcccactaaggaggaattggcaacattcgatccagtcgacaacatcgttttcaacatggcagcagggagcgcaccaatgcaattgcacctgagagccactatccgcatgaaggatggtctctgcgttccaaggaagtggatctatcatttgacagaaggttccaccgatttgcggacggagggcagaccagatatgaagacagagctgtttagctcgtcatgccccggcggcatcatgttgaatgagacaggccaggggtaccagaggtttctcctgtacaacaggagccctcacccacctgagaaatgtgtggaggagtttaagtctcttacatcgtgtcttgatagcaaagctttcttacttaccccaagaaaccaggaggcctgcgagctgagcaacaactag

SEQ ID NO: 9582 - DNA, 978 bp, synthetic construct
  misc_feature 1..978: note = source = /note="Description of Artificial Sequence: Synthetic coding sequence"
  source 1..978: mol_type = other DNA
atgcagggccgggtggccggcagctgcgcccccctgggcctgctgctcgtctgcctacatttgcctggactatttgcgagatccataggggtcgtggaagagaaagtgagccagaacctcgggacaaacctcccccaactggggcagccgagtagtactggaccatccaacagtgagcatcctcagccagccctggatccacgttcgaatgatctggcaagagtgccgctgaagttaagtgtccctgccagtgatgggtttcctcccgccgggggtagtgcagtgcaacggtggcctccatcttggggcctacctgccatggactcatggcctccagaggacccctggcagatgatggccgctgcagcagaggacaggctgggagaggcgctgcctgaagaactgagctatctcagttcggcagccgctcttgccccagggtctggtccactgcctggcgagagctcaccggacgcaacaggcctgtcccccaaggcgtcgcttctccaccaggattcagaatctcgtcgcctccccagaagcaattctctgggcgcggggggcaagatactgagccagcggcccccctggagtcttatacatcgggtcctgcctgaccacccctggggaaccctaaacccttcggtgtcatggggaggtgggggcccaggcacgggttggggaaccaggcctatgcctcatccagagggcatttggggcatcaataatcagcccccgggcacaagctgggggaacattaacagataccccggaggaagttggggaaacattaatcgatacccgggaggttcctggggaaatataaatcggtatccaggtgggtcatggggaaacatccatttataccccggcattaacaatcccttccctcccggcgttctgcggcctccagggtcctcatggaatatccccgccgggttcccgaatcccccttcaccgagactgcagtgggggtag

SEQ ID NO: 9583 - DNA, 2631 bp, synthetic construct
  misc_feature 1..2631: note = source = /note="Description of Artificial Sequence: Synthetic coding sequence"
  source 1..2631: mol_type = other DNA
atgggccccgaggccctgagcagcctgctgctgctgctgctggtggccagcggagatgctgacatgaagggtcacttcgacccggccaagtgtagatacgctctcggtatgcaagaccgaactatcccagactctgacatctcagcttcaagctcctggtcagacagtacagccgcccggcactccaggttggagagttcggacggcgacggcgcctggtgcccagccggtagtgttttcccgaaagaggaagagtatctgcaagtcgatctccagagactgcatctagtcgctctggtgggcacccagggacggcatgccggaggactgggcaaagagttcagccggagttatcggctgcgctacagccgggatgggagacgatggatgggatggaaagaccggtgggggcaagaagtgatcagcggtaatgaggatccagaaggggtggtcttaaaagacctgggacccccgatggttgcacgcctggtgcgcttttatcccagggccgaccgggtgatgtctgtttgcttgagggttgagctctatggatgtttgtggagggacggattgctatcctacacggcccccgtagggcagactatgtatctctctgaggcagtctacttaaatgattccacttatgacggacacactgtgggtggccttcagtatggagggctggggcagctcgccgatggcgtcgtggggcttgatgacttccggaaaagccaggagttaagagtgtggcccggctacgactacgttggctggagcaatcacagcttctccagcgggtatgtcgaaatggagtttgaattcgaccggttacgagccttccaagcaatgcaggttcactgcaacaacatgcacacgctgggcgctcgccttcccgggggcgtggagtgcagattcaggcgcggcccggctatggcctgggagggcgagccaatgcggcacaatcttggcggcaaccttggagaccccagggctagagccgtaagcgtcccattgggcggccgggtagctaggtttctacagtgccggtttttattcgctgggccatggctactctttagcgaaatttcctttatctcagatgtggtgaacaacagttcccccgccctgggtggaactttcccgcctgctccttggtggccaccggggccaccgcctacaaacttcagcagtctggagcttgagccccgaggccagcagccagttgctaaagcagaggggtctcccactgcgatcctgattgggtgtctcgtggccataattcttctgcttcttttaattatcgctttaatgctgtggcggctgcactggaggcggctcctgagtaaagcagagagacgagtgctggaggaggagttaacagtgcatctgagtgtaccaggcgacaccattttgattaacaaccggcccggaccacgtgagcccccaccctaccaggaaccaaggccgaggggaaatccccctcacagtgccccatgcgtccccaacggtagtgcctatagtggcgattatatggagcctgagaagcctggagcgcctctgcttcctccgcctcctcagaactccgttccccactatgctgaggccgatatcgtcactctccaaggtgtgaccggcggcaacacatacgcagttcccgctttaccgccgggagccgtgggggatggcccgccacgggtggacttcccaagaagcagactgcgatttaaggaaaagttaggcgaggggcaatttggcgaggtgcatctgtgcgaggtggattcaccacaggatctcgtcagtctggactttcctctcaacgtgcgcaaggggcaccccctgttggtggccgtcaaaattcttcgcccagacgctacgaagaatgccagaaatgactttctgaaggaggtcaagatcatgagccgtctcaaggaccccaacattattcggctgctcggcgtgtgcgtccaagacgaccccctctgtatgatcacagactacatggaaaacggtgatctaaatcagtttttatcagcccaccaactggaggacaaagctgcggagggagcgccaggagacggacaggccgctcagggacccaccatatcttaccctatgctcttacacgttgctgcccaaatcgcctcggggatgcgatacctggctactttaaactttgtacacagggatctggccacacgtaactgcctcgtgggcgaaaacttcacgataaagatagctgatttcggcatgtcgcgtaacttgtacgctggagactactaccgcgttcagggaagggccgtactgcccattcggtggatggcatgggagtgtatccttatgggaaaattcaccaccgccagtgatgtgtgggctttcggagttacactgtgggaggtcttgatgctgtgccgggcacaaccctttgggcaactcactgatgagcaggtgatcgagaatgccggcgagttcttcagggatcagggacgacaggtttatctcagccgcccacccgcctgtccccagggcttgtatgaactcatgctgcgatgctggtctcgggagagcgaacagcgaccccccttttctcaattacacaggttcttggccgaagacgccttaaacactgtgtag

SEQ ID NO: 9584 - DNA, 1482 bp, synthetic construct
  misc_feature 1..1482: note = source = /note="Description of Artificial Sequence: Synthetic coding sequence"
  source 1..1482: mol_type = other DNA
atggccctgctggccggcggcctgagccggggcctgggcagccaccctgcggccgctggccgagatgccgtcgttttcgtatggttactgttgagtacttggtgcactgcccccgctcgggctatccaggtcactgtgagcaacccctaccacgtggtgatactttttcagcccgtgactcttccttgcacatatcaaatgacctctacccccacacagcctatcgtgatttggaagtacaagagcttctgtcgcgaccgaattgccgatgcattttcccctgcatcagtggacaatcagttaaatgcccaactggcggccgggaatcctggctacaacccctatgtcgagtgccaagattccgtaaggacagtaagggtggtggccaccaagcaagggaatgccgtgacactgggtgactattaccagggcagaaggatcaccatcactgggatgtacgcagctggaaaggcagcaacatccggagtgccttctatttacgccccttccacatacgcccatctttctccagctaaaacacctccccctcccgcaatgatccccatgggccctgcctacaatggttaccctgggggctatcctggcgacgtggatcgaagctctagcgctggggggcaagggtcatacgtccccttactgagggacacggattctagcgtggcatcagaggtgagaagcggctatcggatccaggcctcccagcaggacgattccatgcgggttctctattacatggaaaaggagttggccaattttgaccccagccgtccgggccccccttctgggcgggtcgaacgggccatgtcagaagtgacttccctccacgaagatgactggagatccagaccttccagagggccggctctgacacctatccgggatgaagagtggggtgggcactctccccgatctcctagggggtgggaccaggagccggcacgtgagcaagcagggggcgggtggcgagctcgccgcccaagggccaggagcgtggacgctctggacgatctgactccaccatccacagctgagtccggaagtagaagcccgaccagcaacggcggcagatcacgtgcctacatgcccccacgcagccgctctcgagacgatctgtatgaccaggatgacagtagggactttccaagaagtcgcgaccctcactatgacgacttccgctccagagagagaccccctgcggaccccagatcccatcaccatagaacccgagacccacgcgataatggatcccgcagcggagacttgccgtatgatggccgcctcctcgaggaggccgtgagaaaaaagggctcagaggagaggcggcggccccataaggaggaagaggaagaggcgtactacccacccgcaccccctccctacagtgagaccgactctcaagcctcccgcgaacggcgcctgaaaaaaaatttggcacttagtagggagagtctggtggtctag

SEQ ID NO: 9585 - DNA, 1788 bp, synthetic construct
  misc_feature 1..1788: note = source = /note="Description of Artificial Sequence: Synthetic coding sequence"
  source 1..1788: mol_type = other DNA
atggacttcctgctggccctggtgctggtgagcagcctgtacctgcaggctgccgcagagtttgacggcagatggccaagacagatcgtttcttccattggcctgtgccggtatgggggaagaatcgattgttgttgggggtgggcacgacagtcttggggacagtgccagcctgtctgccagccccgttgtaagcatggggagtgcatcgggccaaacaaatgtaaatgccatccaggctatgccggtaaaacctgcaatcaggacgaacacattcctgcacccctcgaccagggctcagagcagccactttttcagcctctggatcaccaggcaacatctctgccgtctagggacctgaatgagtgtggtctcaagccgcgaccctgcaaacatcgttgtatgaatacctacggatcatacaaatgttattgtttgaatggctatatgctcatgccagacgggtcctgctcatccgcccttacgtgcagcatggcaaactgccagtacggttgcgatgttgtgaagggccagatacggtgtcagtgtcctagtcccggccttcagctagccccagatggaagaacttgcgtagacgttgatgagtgcgcaaccggacgggctagctgtcctcgcttccggcaatgcgtgaatacgttcggttcttatatttgtaagtgtcacaagggctttgacctgatgtacatcggcggcaagtaccagtgccatgacatagatgaatgctctctgggacagtatcagtgcagcagtttcgcgcggtgctacaatatacgcgggagttataagtgcaagtgtaaggaggggtaccaaggggacggcctgacatgcgtgtatattcccaaggttatgatagaaccatctgggcccattcatgttcccaagggcaacgggacaattctgaagggtgatactggaaacaacaattggatcccagacgtgggcagcacatggtggccccccaaaacaccttacatacctccaatcatcaccaaccgccctaccagcaaaccaaccacccggccgacccccaagcccactccaataccaactcccccacccccccccccgcttccaacggaacttcgaacacctctgccccctacaactcctgaacgtcccacaacaggactgacaaccatcgcccctgcagcgagcacgcctcctggcgggatcaccgtcgacaacagggtgcagactgatccccagaagcccaggggagatgttttcattccacggcaaccgtcaaacgatctgttcgagatctttgagatcgagcggggagtgagcgctgatgacgaggccaaggacgacccgggggtgcttgttcactcttgtaacttcgaccacggactgtgcgggtggatcagagagaaagataacgacctgcactgggagccgattcgagatcctgcgggcgggcagtacctcaccgtgtctgctgccaaggctccaggtggcaaggctgccaggctggtcctccccctcggccgactgatgcactcaggcgatttatgcttatctttcaggcacaaggttacaggcttacactcagggaccctccaggttttcgtgcggaagcacggcgcacacggcgcggccctttgggggcgcaatggagggcatggctggcgacagactcaaattacattgcgtggggccgatatcaagagtgtggttttcaaaggcgagaaaagacgcggacatactggcgaaatagggctcgatgacgtctccctcaaaaaaggtcattgtagcgaagagcgatag

SEQ ID NO: 9586 - DNA, 210 bp, synthetic construct
  misc_feature 1..210: note = source = /note="Description of Artificial Sequence: Synthetic coding sequence"
  source 1..210: mol_type = other DNA
atgaagaaccaggacaagaagaacggcgccgccaagcagagcaaccccaagtcctcccccggccaaccagaagctggatcattcgattcactggacctggagaaagtgtccctggggagagcactggcaggtaggtctgagctcgggatcagctgcctggaacaaggcacgtggcgcatgttcctgaggggtatgatgtgctggtcctag

SEQ ID NO: 9587 - DNA, 483 bp, synthetic construct
  misc_feature 1..483: note = source = /note="Description of Artificial Sequence: Synthetic coding sequence"
  source 1..483: mol_type = other DNA
atggcccgggactacgaccacctgttcaagctgctgatcatcggcgactcaggagtcggcaagtctagtctgcttctccgattcgctgacaacacctttagcggctcttacatcacaacaataggagttgatttcaagatccggactgtagagatcaacggagagaaagtgaaactgcagatctgggacaccgccggccaagagcgatttagaaccattacctctacagccgagaccgccctgcgatccctgccccagcccgaagcgcacggaggaagctccggagactcattgtcatttgtccccctctttaaggagtttagcccgtgtttctgtatcggtcgatgccacaggcacttcctgcctcgtccacctcgcgtcccacgacggtgttggactagccctccatttccgactggcgcccctagctcgcccgccaaggcgcccggtcctggggaggacgccgccagacgcgcagattag

SEQ ID NO: 9588 - DNA, 360 bp, synthetic construct
  misc_feature 1..360: note = source = /note="Description of Artificial Sequence: Synthetic coding sequence"
  source 1..360: mol_type = other DNA
atgaacaagatcctgagcagcaccgtgtgcttcggcctgctgaccctgctatccgtgctgtcttttttacagtccgtgcatgggcgcccatatctaacacaggggaatgagatcttcccggacaagaaatatacaaatcgtgaggaactgctcctagctctgctgaacaaaaatttcgacttccagcggccattcaacaccgatctcgccctgcccaacaaactggaggaactgaaccagctggaaaagctgaaggaacagctggtcgaagagaaggacagtgagactagttatgccgtggacggtttgttcagctctcatccctccaaacgggcttgcttttggaagtactgtgtatag

SEQ ID NO: 9589 - DNA, 2514 bp, synthetic construct
  misc_feature 1..2514: note = source = /note="Description of Artificial Sequence: Synthetic coding sequence"
  source 1..2514: mol_type = other DNA
atgttcaagtgctggagcgtggtgctggtgctgggcttcatcttcctggaaagcgagggaagacccacaaaggagggcggatatgggcttaaaagttatcagcctctcatgcgactgcggcataaagagaaaaaccaggagagctcacgcgtaaagggttttatgatccaagacggaccatttggtagctgcgaaaataagtattgtgggctgggccggcattgcgtgacctctcgcgagactggccaagccgaatgtgcctgtatggatctatgtaagaggcactataagccagtgtgtgggtcggatggcgagttctacgaaaaccactgcgaggtccaccgggccgcctgtctgaagaagcagaagatcactatcgttcataacgaggactgtttcttcaaaggggataagtgcaagactacagaatattcaaagatgaaaaatatgcttctggacctacagaaccaaaagtatatcatgcaggagaatgaaaatccgaacggagacgacattagcaggaaaaagctcttagtagatcagatgttcaaatatttcgatgccgacagcaatggcctggtagatatcaatgaattgacgcaggttatcaaacaggaagagctgggaaaggacctttttgactgcaccctatatgttttactcaaatacgacgacttcaatgccgacaaacatctggcgctggaggagttttaccgcgctttccaggtcatccaactgtccctcccagaagaccagaagttatctattactgctgccacagtaggacaatctgccgtgctcagttgtgcgatccaggggactctcaggccacccattatatggaagagaaacaatattattctcaacaatctggatttggaagacattaacgactttggggacgatggctctctgtacattactaaggtcaccaccacccacgtaggcaactatacctgctatgccgacggatacgaacaagtctaccagactcatatatttcaagtcaatgtgcctccggtaatacgcgtctacccagaaagccaggcacgcgaacccggtgtcactgcctcactccggtgtcatgcagaaggtataccaaaaccgcagcttggatggttaaagaatggaattgacatcaccccgaaactgtcgaagcagctaacactacaggcaaatggtagcgaggttcacatttcaaacgtcagatatgaagacacaggggcgtatacatgtatcgccaagaatgaggccggcgtggatgaggatatctcctcactctttgttgaagatagcgcgcgaaagacaagactgggaatcggcaatatgttttatgtattttatgaagatggaattaaagtaatccagccgattgagtgcgagtttcagagacacatcaagccctcagaaaaattactcgggtttcaagatgaggtgtgcccaaaggccgaaggagacgaggtgcaacggtgcgtctgggcctctgctgtgaacgttaaggacaaatttatttacgtggctcagcccaccctcgatcgcgtgctgatcgttgacgttcaatctcagaaggtggtgcaagccgtaagcaccgatccagtgccagttaagttgcattatgataaatctcatgatcaggtttgggtgttgtcttggggaactctcgagaagacttcccctacactgcaagttattacccttgccagcgggaatgtgcctcaccacacaattcatacgcagccggtgggcaaacagttcgaccgcgttgacgactttttcattcccacgacgacattaatcatcactcatatgcggttcggctttattttacacaaagacgaagccgccctccaaaagatagatctcgaaaccatgagctacatcaaaactatcaaccttaaagactataagtgtgtaccccagagccttgcatacacccatctcgggggatattattttataggatgcaagccggacagcaccggagccgtgagtccgcaggtcatggttgatggggtcacagattctgtcatcgggttcaattcagacgtgaccgggaccccctatgtgtcccccgacggacactacctggtttccataaacgatgtgaagggccttgtccgcgtgcagtacattaccatccggggcgagattcaggaggcctttgatatctacacaaatcttcacatctcagatcttgcctttcagcctagcttcactgaggcccaccagtacaatatctacggctctagcagtacccagacagacgtcttgtttgtggaactctcaagcggtaaagttaagatgattaaaagcctgaaagaacctttgaaggccgaagagtggccatggaatcggaaaaaccggcagatccaggattcaggactattcggtcagtatctcatgacgccatccaaggactcactttttattctggatggacgtctgaataaactgaattgcgaaatcacggaagtcgaaaaaggaaatacagtcatttgggtgggggacgcgtag

SEQ ID NO: 9590 - DNA, 648 bp, synthetic construct
  misc_feature 1..648: note = source = /note="Description of Artificial Sequence: Synthetic coding sequence"
  source 1..648: mol_type = other DNA
atggccgacatgcagaacctggtggagcggctggagcgggccgtgggtcggctggaggcagtttctcacacctccgacatgcatagaggttacgccgattcgccctcaaaagctggtgccgcgccctacgtgcaagcttttgatagtttattggctgggcctgtggcagagtatctgaaaatcagcaaggagattggtggcgacgttcaaaaacatgcggagatggtgcacaccggactgaaactggagcgggcactcctagttactgccagccaatgtcagcagcctgccgagaacaaactgagtgacttgctcgctcccatcagcgaacagatcaaggaagtgataacgttcagggagaagaatcgtggctccaaattattcaaccatttgtctgcagtcagtgaatccatccaagccctggggtgggttgctatggctcctaaacctggaccatacgtgaaggagatgaatgacgctgccatgttctatacaaacagagtgttgaaggaatacaaagatgttgacaaaaagcacgttgactgggttaaggcctatctctctatttggaccgaactccaggcatacatcaaggagttccacacaaccggactcgcatggtcaaagacaggccctgtggccaagtag

SEQ ID NO: 9591 - DNA, 3837 bp, synthetic construct
  misc_feature 1..3837: note = source = /note="Description of Artificial Sequence: Synthetic coding sequence"
  source 1..3837: mol_type = other DNA
atgcggctgctgctgctggtgcccctgctgctggcccccgcccccggaagtagcgcccctaaagtgcgccggcagagcgacacatggggaccgtggagtcagtggtctccatgttctcgaacttgcggaggaggtgttagtttcagagaacgaccttgctacagccaaaggagagatggggggtcatcttgcgttggcccggctcgtagccataggagctgcaggaccgagtcttgtcccgacggggccagggactttagagcggaacagtgtgccgagttcgatggcgccgaatttcagggccggcgttaccgttggctgccctattacagtgcaccaaacaaatgtgaattgaattgtatcccaaaaggggaaaatttttattataaacaccgagaagccgtcgtggacggaactccatgtgagccaggcaaacgcgacgtctgcgtggacggtagttgcagagtagtcggctgcgaccatgagcttgatagctcaaagcaggaggacaaatgcctgcgctgtggcggggatggaacaacatgttacccagtggcagggacctttgatgccaatgatctctcacggggctacaaccaaattttgatcgtgccaatgggcgccacctccatccttattgatgaggccgccgctagtagaaacttccttgcagtgaaaaatgtgagaggagagtactatctcaacgggcattggacaattgaagctgccagagccctgccagcggcatccactatcctccattatgaacggggagcagagggggacctggcccccgagaggctacacgcaagagggcccacctctgaacccttagtaattgaactgatatcacaagagcccaaccccggcgtgcattatgagtatcacctgcccctgcgacgcccatcacccggtttttcttggtcccacgggagttggtctgactgctccgctgagtgcgggggaggtcaccaatctcgcttagtcttctgcaccattgaccatgaagcctacccagatcacatgtgccagcggcaacctcgacccgctgaccgccgctcctgtaacctgcacccttgtcccgaaacaaaaaggtggaaagccggcccctgggctccctgtagcgcttcctgcggtggaggatctcagtcccggagcgtctactgcatcagcagcgacggtgctggaatccaggaggctgtggaagaagccgaatgtgccgggctgcccggcaaaccacctgccatccaggcctgtaatcttcagcgatgcgcagcttggtcccccgagccatggggggagtgctccgtgtcttgcggtgtgggggtgcgtaaaagatccgtgacctgcagaggtgaaagggggagcctcctgcataccgctgcctgctctttggaggaccggcccccgcttacagagccctgtgtccatgaagattgtccactcctttccgaccaggcttggcatgtcggaacgtgggggctgtgctccaaatcctgcagcagtgggacccgtcggcggcaggtgatctgtgcgatcggacctcctagtcactgcgggagtctgcagcacagcaaacctgttgatgtcgagccctgtaatacacagccctgccacctgccacaggaggttccctccatgcaggatgtgcacacacctgcatccaatccctggatgccactgggacctcaggagtcccccgcctcagacagcagaggtcagtggtgggccgcgcaggaacacccttctgctaggggcgatcacaggggcgaacgtggcgacccccggggggatcaaggcacccatttgagcgcccttggcccagcaccatcattgcaacagcctccataccaacaacccctccgttctggttctggcccccatgattgtcggcactctccacacgggtgctgccccgatggccacacagcgtcgctgggcccacaatggcagggatgcccaggtgccccctgtcagcagtcccggtacggatgttgtcccgaccgggtttctgtggcagaaggcccacaccacgctggctgcaccaagagttatggtggagacagtactggaggtatgccacgcagcagagctgtcgcttccactgtgcacaacacccaccagccccaggcccagcaaaacgaacctagcgagtgtaggggatcccagttcgggtgttgttacgacaatgtagcaaccgccgccggccctcttggggaagggtgcgtgggacaaccctcacacgcataccctgtccgatgcctgctgccaagcgctcacggttcatgcgccgattgggccgctcgctggtactttgttgcttcagtgggccagtgcaatagattttggtacggtggctgtcatggcaatgcgaataatttcgcctctgagcaagaatgtatgtctagctgtcagggcagcttgcacggacctaggaggccacagcccggggcaagtggaaggtcaactcacacagatggagggggatcctccccggctggcgaacaggagcctagccagcacagaaccggggccgccgtacagaggaaaccctggccttctggggggctttggagacaggaccagcaaccaggcccaggggaagcaccccacacccaagccttcggcgagtggccgtggggacaggagcttggctcgagagcgcctggtctcgggggggatgctggaagtccagcacccccattccattcgagctcctataggatatcgctggcaggggtcgaacccagcctcgtgcaagcggcactaggccaactggtgcggttgtcttgcagcgatgatacagcgcccgagagtcaggcagcgtggcagaaagatgggcagccaatttcatccgatcgtcataggttgcagttcgacggatctcttatcatccacccccttcaggcggaggacgccggaacctacagctgcggatcaaccaggcccggccgtgatagccaaaaaatacagcttaggatcattggtggggacatggccgtgttgagtgaggctgaactcagccggttcccacaaccccgggaccccgcccaggactttgggcaggctggagctgctggaccactgggagctattccgagttctcatccccagcctgcgaaccggttacgtctcgatcagaatcagccgagagtggtggatgcttcccctggtcaacgaatcagaatgacgtgccgggcagaaggctttcctcctcccgctatcgagtggcaacgcgacggccagccagttagctctccgagacatcagttgcagccagacggaagcctcgtgatatctcgcgtggctgtcgaggatggaggcttttatacctgtgtggcattcaacggacaggatcgcgaccagcgttgggtccagctgagagtgttgggcgaattgactataagcgggctcccgccaacagtgactgtgccggagggagataccgccaggctgttatgcgtagtggctggagaaagcgttaatattaggtggtcgaggaacggcttgccagttcaagccgacggccaccgggtccaccagtctcccgatggaacactcctcatctataacctacgtgccagagacgaaggctcatatacatgtagtgcataccagggaagtcaggctgtttcgagatccactgaggtaaaagtggtgtcacccgcccccacagcacaaccaagagatcctggaagagattgtgttgaccagcccgagctggcgaactgcgaccttatcctgcaagctcaactctgcggaaacgagtactattcctctttttgctgtgcatcctgctctcgctttcagcctcatgcacagccaatatggcaatag

SEQ ID NO: 9592 - DNA, 546 bp, synthetic construct
  misc_feature 1..546: note = source = /note="Description of Artificial Sequence: Synthetic coding sequence"
  source 1..546: mol_type = other DNA
tgaaagggccacgccagccccctgccccccagcgccgcccccaccactgactctacagacagcataactggacagaactcacgccagcgagaggaggaactggaactcattgaccaattgcgtaagcatatagagtacagactgaaagtgagtctcccatgcgatctaggcgccgcactgaccgacggggtcgtcctttgccatctggccaatcacgttcgcccccggtccgttccgtctattcacgtgccatcacctgccgtacctaagctcaccatggccaaatgtcggcgcaatgtggaaaatttcctcgaagcctgccgtaaaatcggggtgccccaggataatctgtgtagtccctcggatatcttgcagctaaatcttagcgtcaagcgcaccgtggaaacgctgctgtctttgggggcacatagcgaggagagttcgtttgtgtgcctgtcattacagctgctcgggttcgtggccttttattgtaccgtaatgctgacgctatgcgtgctatattattggttgtttccagctcgatag

SEQ ID NO: 9593 - DNA, 804 bp, synthetic construct
  misc_feature 1..804: note = source = /note="Description of Artificial Sequence: Synthetic coding sequence"
  source 1..804: mol_type = other DNA
atgggccccgaggccctgagcagcctgctgctgctgctgctggtggcctcaggcgatgctgatatgaagggccactttgaccccgccaaatgtaggtacgctttggggatgcaggataggaccattccagactcagacatctcagcatcatcctcatggagcgactccaccgccgcaagacattctcggctcgaaagtagcgatggcgacggcgcctggtgtcctgctgggtcagtgtttccaaaggaggaagagtatctgcaggttgacttgcagagactgcatctggttgctctggtgggaactcagggacgccacgcaggggggctgggcaaagaattttcaagatcttaccgactgaggtactctcgtgatgggcgaagatggatgggatggaaggacaggtgggggcaagaagtaatctcaggcaatgaagaccccgagggagtggtgctgaaggacctggggcctcctatggttgcccgacttgtgagattttatccgcgggccgaccgagttatgtctgtgtgcctgcgcgtcgagctgtacgggtgcctttggcgggacggccttcttagctacacagccccagtggggcagaccatgtacctgagcgaagctgtgtacttaaatgacagcacttacgatggtcacactgttggcggcctgcaatatggagggctagggcaactggccgatggcgttgtggggctcgacgatttccgaaagtctcaggagttgcgggtttggcccggttatgactatgtcgggtggtccaatcactccttttcatctgggtattag

SEQ ID NO: 9594 - DNA, 345 bp, synthetic construct
  misc_feature 1..345: note = source = /note="Description of Artificial Sequence: Synthetic coding sequence"
  source 1..345: mol_type = other DNA
atggcccccaagaagctgagctgcctgcggagcctgctgctgccccttagccttaccctgctgttacctcaggccgatacccggtctttcgtggtcgatcggggacacgaccggtttttgctggacggggcacccttccggtacgtttctggttctctgcattattttagagtgcctcgggtgctgtgggcagaccggctcttgaaaatgcgctggagtggactgaatgccattcagttctacgttccgtggaattaccatgaaccacaaccaggcgtttacaattttaatggtagtcgcgacttaattgcgttcctgaatgaagcagctttggcaaacctgtag

SEQ ID NO: 9595 - DNA, 507 bp, synthetic construct
  misc_feature 1..507: note = source = /note="Description of Artificial Sequence: Synthetic coding sequence"
  source 1..507: mol_type = other DNA
gccccccggatggagatgttccagggcctgctgctgctgctgctgctctctatggggggcacttgggcaagcaaggagccactccggccgagatgtaggcccatcaacgccactctggctgtggagaaggaagggtgcccagtgtgcatcactgttaatactactatctgtgcgggctactgccccacgatgactcgcgtgttacagggagtactgcctgcactgccccaggttgtctgcaattatcgagatgtccgcttcgagagcattaggctgccaggctgcccgagaggtgttaacccggtcgtatcctacgcagtggccttaagctgtcagtgcgcgctctgccggcggagcacaaccgattgtgggggcccaaaggaccaccctctgacatgcgacgacccaagatttcaggacagttcgtcatcaaaagcgcctccaccgtccttgccgtccccttccagacttccagggccctctgatactcctatactgcctcagtag

SEQ ID NO: 9596 - DNA, 1203 bp, synthetic construct
  misc_feature 1..1203: note = source = /note="Description of Artificial Sequence: Synthetic coding sequence"
  source 1..1203: mol_type = other DNA
atggagacccaggagctgcggggcgccctggccctgctgctgctgtgcttcttcacctccgcgagccaagacttgcaggtgatcgaccttctgaccgtcggcgagagccgccagatggttgctgtcgcagagaaaatccggaccgctctgttaacagctggagacatctaccttttgagcacctttcgtctgccacctaaacagggcggagtactgttcgggctttactctaggcaggacaacacccgctggctggaggcttcggtggtgggcaaaattaataaagtgaccaacgccctccattctattctcggcgaggggaacgtgcccgatccaaagcaccactacggcgtgagtggttttcacgagcagcgaagccactgcagcccaaatccatgctttcggggggttgactgcatggaagtctacgagtacccaggatataggtgtgggccttgcccccccggtctgcagggaaacggaacacactgctccgatatcaatgagtgcgctcacgcggatccatgtttccctggctcatcctgtataaacacgatgccaggattccattgtgaggcctgcccccggggatacaaggggacccaagtatccggagtgggcattgactatgcgcgggcctccaaacaggtgtgcaacgacatagacgagtgcaacgatgggaataatggaggctgcgatccgaactcaatctgtacgaataccgtcggatctttcaagtgtgggccgtgccgcctcgggtttcttggaaatcagtcacagggatgcttacccgctcgaacctgccacagccctgcccacagcccatgtcatatccacgcacactgccttttcgaaaggaacggtgcggtgtcttgtcagtgtaacgtggggtgggccggtaatggcaacgtgtgcggaacagacacagatattgacgggtatcccgaccaagccctcccttgcatggacaataacaagcactgcaagcaagacaactgtttgctaaccccaaacagcgggcaagaggatgcagacaacgatggagtgggggatcagtgtgatgacgacgctgatggagatggaatcaaaaacgtggaagcctcaccaatggactggactatcgctctcaaaagtccaacccattaccggcaaacaggcatgcgcaccggatgggagatgctggcaactgccgcgttaaagtag

SEQ ID NO: 9597 - DNA, 618 bp, synthetic construct
  misc_feature 1..618: note = source = /note="Description of Artificial Sequence: Synthetic coding sequence"
  source 1..618: mol_type = other DNA
atgatgcggaccctgatcaccacccaccccctgcccctgctgctgttgccacagcagctgctgcagctggttcaatttcaggaagttgatactgacttcgactttccagaagaagataaaaaggaagagtttgaagagtgcctagagaagtttttcagcaccggcccggcccggccccccaccaaggagaaggtgaaaagaagagtgcttatcgagcccggcatgcccttgaaccatattgaatactgcaaccacgaaataatgggcaagaatgtgtactacaaacatcgctgggtggcggaacattatttcttgttaatgcagtacgacgagctgcaaaagatctgctataaccggttcgtcccttgcaagaacgggattcggaaatgcaatcgcagtaagggactggtggagggtgtgtattgtaatttaacagaggcatttgaaataccggcatgcaaatatgagagcctttataggaagggttacgtactcatcacatgttcctggcagaacgagatgcagaaacggattccccacacaataaatgacctggtggaaccgcccgaacatcgcagcttcctgtcagaggacggagtcttcgtaatctctccctag

SEQ ID NO: 9598 - DNA, 177 bp, synthetic construct
  misc_feature 1..177: note = source = /note="Description of Artificial Sequence: Synthetic coding sequence"
  source 1..177: mol_type = other DNA
atggacctgctgcagttcctggccttcctgttcgtgctgctgctgtctggcatgggcgccacaggcacactccgtacaagtctggaccccagtcttgagatttataagaaaatgttcgaggtgaagcgccgcgaacaacttcttgccctaaagaacctggcgcagctgaacgactag

SEQ ID NO: 9599 - DNA, 450 bp, synthetic construct
  misc_feature 1..450: note = source = /note="Description of Artificial Sequence: Synthetic coding sequence"
  source 1..450: mol_type = other DNA
atgaaggtgatcgccatcctgaccctgctgctgttctgcagccccacacatagcagcttctggcagtttcagcgcagggtcaagcacattaccggaagaagcgcgttcttttcttattatggttacggttgttattgcggcctgggagacaagggtatacccgtcgatgatactgaccgccatagcccatccagcccgagcccatacgagaagttgaaggagtttagctgtcaacctgtgcttaattcttaccagtttcacattgtgaatggggctgtcgtttgtgggtgcactctgggaccaggtgcaagttgccactgccggctgaaagcatgtgagtgcgacaaacaaagcgtccactgcttcaaggagagtctccctacatacgaaaagaatttcaagcagttctcgtcccagccgagatgtgggcgtcataaaccctggtgctag

SEQ ID NO: 9600 - DNA, 237 bp, synthetic construct
  misc_feature 1..237: note = source = /note="Description of Artificial Sequence: Synthetic coding sequence"
  source 1..237: mol_type = other DNA
atgggcagcggcctgcccctggtgctgctgctgaccctgctgggcagttcacatggtactggacccggtatgactctacaacttaaactgaaagagagcttcctgaccaacagttcatatgaatctagctttctggagctgctggaaaaactttgtctgctcctgcatctaccctccggtacaagtgtgaccctgcatcatgcccgctctcagcaccatgttgtgtgtaacacatag

SEQ ID NO: 9601 - DNA, 1461 bp, synthetic construct
  misc_feature 1..1461: note = source = /note="Description of Artificial Sequence: Synthetic coding sequence"
  source 1..1461: mol_type = other DNA
atgatcagccccagccccagccaggaggagctgcagaccaccctggaggaaactgatcaaagcacccaggaaccttttacgaccaagatccctcgcacaaccgagctggctaaaactacacaggccccacatcgcttctacaccaccgtacggcccagaaccagcgataaaccgcatattcgacctgttctcaatagaacaaccacccgtcccacgcgcccaaagccttctggtatgcccagcgggaacggcgtaggaacaggtgtcaagcaggcccctcgcccttcaggtgcggaccgcaacgtatccgtggattccacacaccctactaagaagcccggcactcggcggccccctctgcccccacgtcccacgcatcctcggcgcaaacccctccctccgaacaacgtcacaggcaagccaggatcggccgggatcatctcgagcggaccgatcaccacaccaccattgagaagcacacctagacccactgggacgcctctagaaagaatcgagaccgatattaagcaaccaaccgtaccggcgagtggcgaggaattggaaaatatcacagacttctctagctccccaacacgggagaccgacccacttggcaaaccaaggtttaagggccctcacgtgcgatatatccagaagccggacaactcaccctgctcaattaccgattcagtgaaaaggttcccgaaagaagaggccaccgaaggaaatgctacgagcccccctcagaatccccccacaaatttgaccgtagtgaccgtagagggctgcccgagtttcgtcattctcgattgggagaaaccactcaatgacaccgtcacagagtacgaggtgatcagccgggagaacggatccttcagtggcaagaataagagtattcaaatgacaaaccagacatttagtactgttgaaaatcttaagcctaacacctcatatgaattccaggttaaacccaaaaacccgctcggtgaaggtcccgtgtcgaataccgtggcattcagcaccgagagtgccgacccccgcgtgtccgagcctgtgagcgcaggacgggatgccatctggacagagcgcccctttaatagcgactcttatagtgaatgcaagggtaagcagtacgtcaaacgaacatggtacaagaaatttgtaggagtgcagctgtgtaactccctgcgctacaagatctatttgagcgattcgctgaccgggaaattttacaacataggggaccagcggggccacggcgaggaccactgtcaattcgtcgactcgtttttggatggtaggaccgggcagcaactgacgagtgaccagctccccattaaggaaggatattttagagcagttcgacaagaaccggtgcagtttggcgagattggagggcatactcagatcaactacgtccagtggtatgaatgcggaaccaccatccccggtaagtggtag

SEQ ID NO: 9602 - DNA, 243 bp, synthetic construct
  misc_feature 1..243: note = source = /note="Description of Artificial Sequence: Synthetic coding sequence"
  source 1..243: mol_type = other DNA
tgaaacggccccgtgctgtggttcaagggcaccggccccaaccggaagttgatttataactttaaacaggagcagaatccgcggccacccaagaaccgcccagccgggcgcgccggctcccgggcccatcacgatgcacacacctgccttagcgcattaccagaacggaacagtaccaattacttcgtgcagccctgctgctgcttaaggctgctgggtctgactggattactgtctaaatag

SEQ ID NO: 9603 - DNA, 1341 bp, synthetic construct
  misc_feature 1..1341: note = source = /note="Description of Artificial Sequence: Synthetic coding sequence"
  source 1..1341: mol_type = other DNA
atgctgcaccccgagaccagccccggccggggccacctgctggccgtcctgctcgccctgctgggcactacttgggccgaagtctggcccccccagcttcaggaacaggcccccatggcaggcgccctcaataggaaggagtctttcctgttgttgtctctgcataaccggcttcgcagttgggtgcaacctcccgccgccgatatgagacggctagactggtctgacagtctcgcccagctggcgcaagctagggctgctttatgcggaatcccgacaccctcactggcgtccggcttgtggcgtaccctccaggtaggatggaacatgcagctcctgccagcaggtcttgcgtctttcgttgaagtggtgtccttatggttcgctgaaggtcagcgatacagccacgccgcaggcgagtgtgctcgtaatgccacctgtacccattacacccagctcgtctgggctacttccagtcaactcgggtgcggccgtcacctgtgctcggcaggccagaccgcgatcgaagcatttgtctgtgcatacagcccccgaggcaactgggaagtgaacggaaaaaccattattccctataaaaagggggcctggtgtagtctctgcaccgcgagcgtgagtggatgttttaaggcctgggatcacgcaggaggcttgtgcgaggtgcctaggaacccgtgtaggatgtcctgccaaaaccacggtaggctaaacatatccacctgccactgccactgtcccccaggctacaccggccgctattgtcaggtaagatgctctctgcagtgcgtgcacggccgatttagagaggaggagtgttcctgtgtttgtgatatcggctatggcggagcccaatgcgccactaaggtgcattttccttttcatacatgtgatctgcggatagacggtgattgctttatggtgagctcagaagccgatacatattacagagccaggatgaaatgccagcgcaagggtggagttctagcccagattaaatcacagaaggtccaggacattctcgccttctatcttggtcgactagagacaactaacgaggttattgattccgatttcgaaacaaggaacttctggattggcctcacctataagaccgctaaggacagcttccgatgggcaacaggcgaacatcaggctttcacctccttcgcgttcgggcagcccgacaaccatggatttggtaattgcgtggaattgcaggcttcagctgctttcaactggaacgaccaaaggtgtaagaccagaaaccgctacatatgccagttcgctcaagagcacattagcaggtggggccccgggtcgtag

SEQ ID NO: 9604 - DNA, 432 bp, synthetic construct
  misc_feature 1..432: note = source = /note="Description of Artificial Sequence: Synthetic coding sequence"
  source 1..432: mol_type = other DNA
atgcaggccgcctgctggtacgtgctgttcctgctgcagcccaccgtttacctggtgacgtgtgccaatctcacgaatgggggtaagagtgagctcttgaaaagcgggagcagtaagtctactctcaaacacatatggactgagagctccaaggacctgtcgatctccaggttgttaagccagacatttcgaggaaaagaaaacgacacggatttagacttgagatatgacactcctgaaccttacagcgagcaggatttgtgggattggctcagaaactcaactgacttgcaggaaccacgtccccgggcaaaacgtagacctatcgtaaagactggaaagtttaagaagatgtttgggtggggagattttcattcaaacattaagactgtgaagctgaacctgctgatcactggcaagatcgtcgattag

SEQ ID NO: 9605 - DNA, 783 bp, synthetic construct
  misc_feature 1..783: note = source = /note="Description of Artificial Sequence: Synthetic coding sequence"
  source 1..783: mol_type = other DNA
atgcagggcgagcccttcgcctgcctgacccaccaggagcccctgccaaaaatgtttaaactgctgtctcgggcctacgcagacgtgcacccaatgatgatggacaggtccgagaatcgctgtggcgggaacttcctgaaacggggatctataatcaacggagcagattggtacagttttacgggaggcatgtccgattttaattatttacatacaaattgtttcgaaataactgtggagctgggctgcgtgaagtttccaccagaggaggctctgtacattctgtggcagcacaataaggagagcctgcttaattttgtggaaacggtgcacagaggcatcaagggggtggtgaccgacaagttcggaaagccggtgaaaaacgcgcgcattagtgtcaagggaatacgccacgacataactaccgccccagatggcgattattggagacttctgccacctggcatccacatcgtaatcgctcaggcccctgggtacgcaaaggtcatcaaaaaagttatcatcccagccagaatgaaacgagccggaagagtggacttcattctgcagccactagggatgggccctaaaaactttatccacggactgcgacggacaggacctcacgatccactgggaggtgccagttccttgggtgaagccacagaacccgatcccctccgtgctcgccgacagccatcagccgacgggtcaaaaccatggtggtggtcgtactttacgagcttgtcaactcatcgtcctcgatggctgcttaagtattag

SEQ ID NO: 9606 - DNA, 882 bp, synthetic construct
  misc_feature 1..882: note = source = /note="Description of Artificial Sequence: Synthetic coding sequence"
  source 1..882: mol_type = other DNA
atgagcagcggcggcggcagccggggcctgctggcctggctgctgctcctgcagccgtggcctggtcaaaactgggcaggcatggctgcccctcgcctgccatctcccttattgagtgaggagggaggagaaaaccctgaggccagcccagccccggggcctgaggcaggaccgccactcaacctcttcacatcctttccaggcgactccttactgtgcggcaggactccccttcgcattgtggggggcgtagacgccgaagagggaagatggccctggcaagtgtctgtcaggaccaagggacgacatatatgtggggggacactcgtgacagctacgtgggtgttaacggcggggcactgcattagctcacggttccactattcagttaagatgggtgataggagcgtgtacaacgagaatacctctgtggtggtttccgttcagagggcctttgtccatcctaaattctcaaccgttaccacgatcagaaacgatctggcccttctacagctgcagcatccagtgaattttacttcgaacatacagcccatttgcatcccccaagagaattttcaggtggaaggccgtacacgatgctgggtcacggggtggggtaagacacccgaacgcgagaagctggctagtgagatcttgcaggatgtggatcaatatataatgtgttatgaagagtgtaacaaaatcattcagaaagcccttagttcaacaaaggatgtgatcatcaaagggatggtctgtggatataaggaacagggcaaagactcatgtcagggggattccggagggaggctggcatgtgagtataatgatacatgggtccaggtcgggatcgtgagctggggaatagggtgtgggcggtag

SEQ ID NO: 9607 - DNA, 870 bp, synthetic construct
  misc_feature 1..870: note = source = /note="Description of Artificial Sequence: Synthetic coding sequence"
  source 1..870: mol_type = other DNA
atgttcgtgctgctgtacgtgaccagcttcgccatctgcgccagcgggcaacctcgagggaaccagctcaagggagagaattacagcccccggtatatatgcagcatacccggactgcctgggccacccggaccgccaggagctaacggtagtccaggtccgcatggccgaattgggttacctggccgagacggtcgggatgggaggaagggtgagaagggtgagaaaggcacagccgggttaaggggcaagactgggccactcggcctggccggggagaagggagaccagggtgaaacggggaaaaagggtccaattggtccagaaggagagaaaggagaggtcggcccaataggtcctccaggccctaagggtgataggggggaacagggagaccctggattaccgggtgtgtgtcggtgcggatcgatcgtactcaagtctgcattctcagtaggtatcaccacgtcttaccccgaggaacggctacctataatctttaataaagtcctttttaatgagggagagcattacaaccctgcgacaggtaaatttatttgtgcttttcctggcatctactacttcagctatgacattaccctggcaaataagcatcttgccattgggctggtccataatggacagtatagaataaaaactttcgatgcgaacactggcaaccacgatgtcgcctcagggagcactgtcatttatcttcaaccggaagacgaagtgtggctggagattttcttcactgatcagaacgggttattctctgatccagggtgggctgacagcctgttcagtggcttccttctgtacgttgatacagattatctggatagcatctctgaggatgacgagttgtag

SEQ ID NO: 9608 - DNA, 2742 bp, synthetic construct
  misc_feature 1..2742: note = source = /note="Description of Artificial Sequence: Synthetic coding sequence"
  source 1..2742: mol_type = other DNA
atgggccccgaggccctgagcagcctgctgctgctgctgctggtggcctctggggatgccgacatgaagggacactttgacccagctaagtgccggtacgctcttggtatgcaggatcgtactattcctgactcagacatcagcgcttcctcctcgtggtctgattcaactgctgcccggcactccagactggagagctctgatggagacggtgcatggtgtcctgctggctcagtgttcccaaaggaggaggaatatctgcaggtggatctccaaagacttcatctggtggcactggtgggtactcagggacggcatgccgggggcctgggcaaagaattctctaggagctatcgacttagatacagtagggacggtcgccggtggatggggtggaaggaccgatggggacaggaagtaatctctggaaatgaagaccctgaaggcgtggttcttaaggatctgggcccccccatggtcgctcgcctggtaagattctatccaagggctgatcgggtgatgagcgtgtgcctccgggtggaactctacggttgtctgtggagggatggtttgttaagctatacggccccagtcggacagacgatgtacctgtccgaggctgtgtatcttaatgattcgacatatgacggtcacaccgtgggcgggctccagtacggtgggctcggacagctcgcggatggggttgttgggcttgacgattttcgtaagtcacaggagttgagagtgtggcccggctatgactacgtggggtggagtaaccatagctttagctcagggtacgtagagatggagttcgaattcgataggctgcgggcctttcaggcaatgcaagttcattgcaataatatgcacaccctgggcgccagattacccggtggcgtggagtgccgttttagacggggcccagcgatggcttgggagggggagcctatgagacacaacctgggtggcaatctgggcgatcctagggcgcgcgcagtgagcgtgcccctgggtggacgggttgcgcgcttcctgcagtgtcgattcctctttgcggggccatggctcctttttagcgaaatcagttttatctctgatgtggtgaacaactctagccctgcccttggaggtacttttccccccgcaccctggtggccccccgggcccccacccacaaacttttcctcactggagctggagccgcgtggccagcaacccgttgccaaagccgagggtagccccacggcaatactgattggatgcctggtggccataattttgctcctcctcctgattatcgcacttatgttgtggcggctccactggaggagattgctgtctaaggccgagcgaagggtcctggaagaggagctaacggtgcacctatcagtcccgggagacactattctcataaacaatcggcctgggccccgtgagcctccaccttaccaggaacctaggcctcgaggcaacccacctcattcagcaccatgcgtgcctaatggttcggccttgctgctgagtaacccagcctaccgcttactccttgcgacttacgcccgtccaccacgtggcccaggtccaccaactcccgcatgggctaagcccacgaatacccaggcgtatagtggcgactatatggaacccgagaagcccggcgctcccctcctgccccctcccccccagaactcagtcccgcactatgcagaagctgacatcgtaactcttcagggagtcaccggaggaaatacttatgctgtcccagcacttccaccaggcgctgttggggacgggcccccacgggttgacttcccacggtcaaggctaagattcaaagagaaactgggggaagggcagttcggagaggtccacctttgcgaggtcgactccccacaggacttagtcagcctagacttccccctcaatgtgcgcaaaggacatccgctgctggtcgcagtaaagatcctgagacccgacgcaaccaaaaacgcgcggaacgactttctgaaagaggttaagattatgagcagactgaaggacccaaacatcatccgcctcctgggagtatgtgtacaggatgacccactctgtatgatcactgactatatggagaacggtgatctgaaccagttcttgagcgctcaccagctcgaagacaaagctgccgagggggcccctggggacggtcaggcggcacaagggccgacaattagttaccccatgcttctgcatgttgcagcgcagatcgcgtccggaatgagatatctggcgacgcttaacttcgttcacagggatctcgctactcggaactgtctggtgggagaaaacttcaccatcaagatcgctgactttggaatgtcgcgtaacttgtatgccggggactactaccgcgtgcagggccgggctgttcttcccattagatggatggcatgggaatgcatcctcatgggcaagttcaccacagccagcgacgtgtgggcgttcggagtcaccttgtgggaagttctgatgctgtgccgcgctcaaccattcggccaacttaccgacgaacaggtgattgaaaatgcgggagaattctttcgtgaccagggcaggcaggtgtatctctcaaggccccccgcgtgcccccagggcctatacgagctgatgctgcgatgttggagcagagagtctgagcagcgccctccttttagccaattgcacagatttctggccgaagacgccctcaacaccgtgtag

SEQ ID NO: 9609 - DNA, 1089 bp, synthetic construct
  misc_feature 1..1089: note = source = /note="Description of Artificial Sequence: Synthetic coding sequence"
  source 1..1089: mol_type = other DNA
atgcggaccctgttcaacctgctgtggctggccctggcctgcagcccagtacacacgacactgtccaagtccgatgccaaaaaggccgcaagtaagactctgttggaaaaatcccagttctctgataagcctgtgcaagacagaggactcgttgtaactgatttgaaggccgagtcagtggtgctggagcatcggagctattgtagcgctaaggcccgcgaccgtcacttcgctggggatgtgctaggttatgtgaccccctggaattcacatggctatgacgtgacaaaggtgtttgggtctaagtttacgcagatcagtcctgtctggttacagttgaagagacggggacgggaaatgtttgaggtaactggtctccatgatgtggaccagggctggatgcgggccgtgaggaaacacgccaaaggtctgcatatcgtacccagactattatttgaagattggacttacgatgactttcggaatgtgctcgactctgaagacgaaattgaggagctgtcaaagacagtggtccaggtcgctaagaaccagcactttgacggctttgtagtggaagtgtggaatcagctcttatctcagaaacgtgttaccgatcaattgggaatgttcactcataaggaatttgagcagttggcgccagtcctagacgggtttagtctgatgacttatgattacagcactgcacatcagcctggtcctaatgcaccattaagctgggtaagggcgtgtgtacaagttctggaccctaaatctaagtggcggtcgaagatcctcctaggcttgaacttctacggcatggactacgcgacctctaaggatgctcgcgagcccgtggttggagcccgctacatacagaccctgaaagaccacagaccacgaatggtgtgggatagccaggcgagtgagcatttttttgagtacaagaagtctcgaagcggccgacatgtggtgttttaccccacactgaagagtttacaagtgcggctagagcttgccagagagctcggagtgggtgtgtccatttgggaactggggcaaggcctcgactacttttatgatctgctctag

SEQ ID NO: 9610 - DNA, 1350 bp, synthetic construct
  misc_feature 1..1350: note = source = /note="Description of Artificial Sequence: Synthetic coding sequence"
  source 1..1350: mol_type = other DNA
atgaagttccagggccccctggcctgcctgctgctggccctgtgcttaggttccggcgaagctggtcctctgcagtctggggaagagtcaaccggaacgaacatcggcgaagcattaggccacgggctgggggatgccttatcagagggagtgggaaaggctatcggcaaggaagcaggcggagcggccggttccaaggtgtccgaggcactgggccagggcaccagggaggcggtgggaaccggcgtaaggcaagtgcctgggttcggcgtggccgatgccctgggaaacagggtgggtgaggccgcacacgcccttggcaacactggacatgagataggcaggcaggccgaggatgtgattcgccacggcgctgacgccgtcaggggaagttggcagggagtcccaggccacaatggcgcctgggaaacgagcggcggccacggcatcttcgggagccagggaggacttggaggccaaggacagggcaatccaggtggcttaggaactccctgggtgcatgggtatcccggcaactccgctgggagtttcggcatgaatcctcaaggcgcgccttggggacagggggggaatggaggacctccaaatttcggaacaaatacacaaggtgcggtggcacagcccggatacggcagcgtgcgcgcgagtaaccagaatgaaggctgcaccaaccccccaccatccggaagcggcggcggaagcagcaactccgggggatcatccacgggatccagttctggcaaccacggcggctccggcgggggaaatggacacaaacctggatgtgaaaaacccgggaacgaagcaaggggatccggtgagagtggcatccaggggcagggatcttcttggggttccggcgggggggatgcggtgggcggagtgaataccgtcaactctgaaacaagccccgggatgtttaattttgacaccttttggaagaactttaaatcaaaactggggttcattaattgggatgcaatcaacaaaaaccaggttccccctccaagtacaagagccctgttgtatttcagccggctatgggaagatttcaaacagaacaccccatttctgaactggaaggccatcatagaaggcgccgacgcctcctctctgcagaagcgcgccggcagggatgaccagccaggcgctgggtggcaagaagtcgctgccgtgacatccaagaactacaactataatcagcacgcttacccgaccgcttacggagggaagtacagcgtgaaaacccccgcaaaagggggggtgagtcccagctccagcgcttcgcgcgtgcagcctggactgctgcaatgggttaaattctggtag

SEQ ID NO: 9611 - DNA, 735 bp, synthetic construct
  misc_feature 1..735: note = source = /note="Description of Artificial Sequence: Synthetic coding sequence"
  source 1..735: mol_type = other DNA
atgtggggcgcccccctgccccggcggcccgtgtgggacgtgcggtccgcttccgcagggccacagccatgtttgggtggcaagatgaaactgaatcttgtccagatatttttcatgctcctgatgttgctcttagggctcgggatgggtctggggctcgggctgcacatggcaacagctgtactggaggaaagcgatcaacctcttaacgagttctggagcagcgactctcaggacaaggccgaagctaccgaggaaggcgacggaactcagactaccgaaacactggtgcttagcaataaggaagtggtgcagcctggctggcccgaagatccgatccttggtgaagacgaagtgggagggaacaagatgttacgggcatcagcgctgttccagtccaataaggattacttgcgcctcgatcagactgacagagaatgcaacgatatgatggcgcacaaaatgaaagaacccagccaaagttgcattgcgcagtacgcctttatacacgaggatctgaacactgtcaaggctgtctgtaactcgcccgtaatagcttgtgagctgaaggggggcaagtgtcacaaaagctccagaccattcgatctgacactgtgtgagttgtcccagcccgatcaggtgaccccaaattgtaactacctgacatctgtaatcaagaaacacattatcataacgtgtaatgatatgaagcgccaattgcccaccgggcagtag

SEQ ID NO: 9612 - DNA, 1728 bp, synthetic construct
  misc_feature 1..1728: note = source = /note="Description of Artificial Sequence: Synthetic coding sequence"
  source 1..1728: mol_type = other DNA
atggccagctggctgcggcggaagctgcggggcaagcggcggcccgtaattgccttctgcctgctgatgattctgagtgctatggccgtgacccggttcccccctcagaggcccagcgcaggcccagaccccggaccgatggaaccacagggagtaactggtgctccagccactcacattagacaggcattaagctctagcaggaggcaaagagccaggaatatgggtttctggcgaagtagagcactcccaagaaatagtatactggtctgcgccgaggaacagggccacagagcccgtgtggatcggagtagagagtctcctggcggggatctgagacacccagggagagtcaggcgggatatcaccttgagcggacatccacggttgtctacacagcatgtcgtcctgctgcgcgaagatgaagtgggggatccaggcaccaaggatttaggccacccacagcacggaagcccaattcaggaaactcagagtgaggtcgtaacccttgtttcacccctgcctggaagcgatatggcggcgctgccggcttggcgcgcaacttcagggttgacactgtggccccataccgcggagggcagagatctgctaggcgccgagaatagggctctgacaggaggtcagcaggctgaggacccaactctagcatcgggagctcaccagtggcctggatccgttgaaaagcttcaaggttcagtgtggtgcgacgcggaaacactactatcatctagccggaccgggggtcaggccccaccatggctaactgaccatgatgtgcagatgctaagactgttggctcagggtgaggtcgtggacaaggccagggtacctgctcatggccaggtgctgcaggtagggttcagcacagaggccgctctgcaggacctgagcagcccaaggctgagtcagctgtgttctcagggtttgtgcggcttaattaaacggcccggggatctccccgaagtgctgagcttccacgtcgaccgggttttgggactgcgccggtctttgccagctgttgctaggagattccattcacccctgcttccttatcggtacaccgatggcggggccagacctgttatatggtgggcccccgacgtgcagcacctttccgaccccgatgaggaccaaaattccctggcgctgggatggcttcaatatcaggcactcctggcgcatagctgcaattggccagggcaggccccttgccccggcattcaccacaccgagtgggcacgcttggctcttttcgattttctgttgcaggtccacgaccgactggacagatactgctgtggttttgagcccgagccctccgacccttgcgtcgaagaacgccttagagagaaatgccaaaatcccgccgagctcaggctggtccacatcctagttcgtagctccgatccatcacacctggtgtacatcgataatgcaggcaatctccagcaccctgaagacaaactcaattttagactattggagggaattgacggttttcccgagtcagccgtcaaagtgttagcatcaggttgtctgcagaacatgctgctcaagtcactgcagatggatccagtattctgggaatctcaggggggagcacaggggttaaagcaggtgttgcagacattggaacagagaggtcaagtgctgttgggacacatccagaagcataatcttacactgtttagggacgaggatccatag

SEQ ID NO: 9613 - DNA, 390 bp, synthetic construct
  misc_feature 1..390: note = source = /note="Description of Artificial Sequence: Synthetic coding sequence"
  source 1..390: mol_type = other DNA
atggccgccggcagcgcccccatgcagctgcacctgcgggccaccattagaatgaaagacggcctctgcgtgccacgcaaatggatttatcacctgaccgagggatcaaccgacctgcgaacagagggaagacctgatatgaagaccgagttattctcatcttcctgtccaggcggaataatgctgaatgaaactgggcaaggctaccaaagatttctgctatataataggtcaccacatccaccagagaagtgcgttgaggaatttaagtcgctgacaagctgcttggacagtaaggccttcctgctcacccctagaaaccagggaaagggtctcaaaagccacaagaccggcctaggccttaccaaaagcagtggtgttacgggatag

SEQ ID NO: 9614 - DNA, 567 bp, synthetic construct
  misc_feature 1..567: note = source = /note="Description of Artificial Sequence: Synthetic coding sequence"
  source 1..567: mol_type = other DNA
atgttccaccagatctgggccgccctgctgtacttctacggcatcattttgaactccatttaccagtgtccagagcacagccagctaacaaccctgggcgtagatgggaaggagtttcccgaggtccacttgggccagtggtattttattgctggggccgcgccaaccaaggaggagctcgccacctttgatcctgtggacaacatcgtgtttaacatggcagcaggctccgcccccatgcagctccatttacgggccaccattaggatgaaagacggcctgtgtgtgccccggaaatggatctatcacttaaccgaagggtcaaccgatctacggacggagggccgcccggatatgaagaccgaactgttctcatcctcctgtcccggcggcataatgttgaacgaaacagggcaaggatatcagcgatttctgttgtacaaccgttctccacacccacctgaaaaatgtgtggaggaatttaagagcctgacctcatgcttagactctaaagcgttcctgctgacccctagaaaccaggaggcttgcgagctgagtaacaattag

SEQ ID NO: 9615 - DNA, 2676 bp, synthetic construct
  misc_feature 1..2676: note = source = /note="Description of Artificial Sequence: Synthetic coding sequence"
  source 1..2676: mol_type = other DNA
atgctgcccaccgaggtgccccagagccaccccggccccagcgcccttctgcttctgcagttgctccttcccccaacttcagctttcttcccaaatatatggtcgctactggcagcccccggatcaatcacacaccaggacctaaccgaagaggcagctttgaacgtgacactccaactgttcctcgaacagcctcctccagggcgaccgccgcttaggctggaggacttcctggggaggacattactggccgatgatttgttcgcagcatatttcggccctggttctagtcgcaggttccgcgccgccttgggggaggtgtctagggctaacgcggcgcaggactttctgcccacctctcgtaacgatccagatttgcacttcgatgccgaaagattaggccagggacgcgccaggttggtcggtgcattaagagaaaccgtcgtcgccgcccgggcacttgaccatacactggcccggcagagacttggcgcggcactgcacgctctgcaggatttctacagccactcaaattgggtcgaacttggcgagcagcaaccccaccctcatctcctctggccgcggcaggagctccagaatcttgcccaggtggccgatcctacatgctccgactgcgaggaattatcctgcccgcgtaattggctaggctttaccctgcttacctccggatacttcgggacgcatcccccaaagcctcccggaaagtgcagccacgggggacactttgatcgctcgagctcccagccccccagggggggcatcaacaaagacagtacctccccagggttctcaccacatcacatgctgcacctccaggccgccaagctggccctgctggcatccatacaggctttcagtctgctgagatcccgactcggcgatcgggattttagtaggttgctggacattacgcccgcgtcatccctgagcttcgttctggacacgacaggcagtatgggagaggagatcaatgcagccaaaatacaagccaggcatctggtggaacagaggcggggatcgcccatggagcctgtacactatgtgttggtgcccttccacgatcctggatttggaccagtctttacgacatccgatccggacagcttttggcagcaattgaatgaaatccatgctctcggcggtggcgatgaacccgaaatgtgcctgtctgcactgcagcttgccttgctgcacactcctcctctatctgacatcttcgtttttacggatgcaagccccaaagatgcgtttttaactaatcaagtggagagcctcactcaagagcggaggtgtagagtgaccttcctggtgacagaggatacttcacgcgtccagggtagagcacgccgagagatactcagcccactgagattcgaaccttataaagcagttgctctggcaagcggtggtgaagtcatcttcacgaaggatcagcatatcagggatgttgccgcgatcgtgggagaatccatggccgctctggtaaccctccccctggatccccctgtggtagtacccggccagccactggtgttcagcgttgacgggctgctgcagaagattaccgtgagaatccatggagacatatcgtcattttggatcaagaatcctgcgggagtttcgcagggccaggaggagggcggtggcccattaggtcacactcggaggttcggtcagttctggatggtaacgatggacgaccccccccaaacggggacatgggagattcaggtgaccgccgaggatacccctggcgtgcgggtccaggctcaaacatctctcgatttcctgttccatttcggcattcccatggaggatggaccccaccctggcctgtacccattgacccagcctgtggccggactccagacccagctgctcgttgaagtgacaggattagggtcacgggccaaccccggcgatccccagccacacttttcgcacgtgattctgagaggcgtgcccgaaggggctgaattgggacaggtcccgttggagcctgttgggccaccagagcgtggcttgctggccgccagcctgagtcccacactcctgagtactccgcgccccttttctctggaactgattggacaggatgcggcagggaggagactacatagggccgctccacagccctcaaccgtggtccctgtgcttctggaactgagtgggccttctggtttccttgcaccgggctcaaaggtacctctgagcctaagaattgcttcctttagtgggccccaggatctggatctgcgaactttcgtcaatccatccttttcactaacctcgaatctgtcacgcgctcacttagagctgaacgagagcgcctggggaagactatggttagaagtgcctgattccgccgcacctgacagcgtcgtgatggtaactgttactgcagggggtcgggaggctaacccggtacctcccacccatgccttcttgcggctcctcgtcagtgcccccgcccctcaggaccggcacacaacccccacagggtcttccgacccgatcttgacaacagccactcccgcttttagtccattcactttggtcacccagggccgggcaggggccggactggcggctggttcaccctggtgggggacagttggaggtgtgctgctgctgctcggtctggcctcttggtag

SEQ ID NO: 9616 - DNA, 2742 bp, synthetic construct
  misc_feature 1..2742: note = source = /note="Description of Artificial Sequence: Synthetic coding sequence"
  source 1..2742: mol_type = other DNA
atgggccccgaggccctgagcagcctgctgctgctgctgctggtggcttccggggacgccgatatgaaaggccacttcgacccggctaagtgccgctatgctttaggtatgcaggacagaaccattcctgatagtgacattagcgctagctccagctggagtgattcaactgccgccaggcattcacgtctggaatcatctgatggagacggcgcctggtgccccgcaggctccgtgttccccaaagaagaggagtatctgcaggtggatcttcagaggcttcacctggtagctctggtcggcacccaagggcggcacgcaggagggctgggcaaggagttctcgagaagttaccggctcaggtatagccgagacggaagacgctggatgggctggaaggatcgatggggccaggaagtgatctccggcaacgaggatccagagggcgtagtcctgaaggacttggggccacctatggtggcacggttagtaagattctatcctcgggcggatagggtaatgtcagtctgcttaagggtggagttgtacggctgtctgtggcgggatggtctgctttcctacacagctccagttggtcagacaatgtatctcagtgaggccgtgtaccttaatgacagcacctatgatggacatacggttggaggtctgcaatatggcggtctggggcagctcgcagatggcgttgtgggccttgatgacttcaggaagtcacaggagctgcgggtgtggcccggttatgactacgtgggctggagcaaccatagtttctctagcggatacgtggaaatggagtttgaatttgatcgcctgagagcatttcaggccatgcaagtgcattgtaacaatatgcatacactgggagccaggctgccaggtggagtggaatgccgctttaggcggggaccagccatggcctgggaaggtgagcctatgaggcacaatctggggggaaacctgggtgaccccagagcgcgggccgtctccgtgcccctaggaggcagagtcgcccgatttctccaatgccgctttttgtttgctgggccttggctcctgttttcagagatttccttcatcagcgatgtggtgaataacagtagtcctgcgttgggggggacatttccccctgccccttggtggcctcccgggccacccccgacaaatttctcatcattggagttagaaccacggggccagcaaccagtggccaaagcggaaggctctccgacggcaatcctcatagggtgtcttgttgccatcattctgctgctgctgctgatcatcgccttgatgctctggagattacactggcgcaggctgctttccaaagctgaacggagagtgctggaggaggagctgacagtgcacttaagcgttcccggcgacacaattctcattaacaatcgtcctggcccccgcgaacctccaccataccaggagcctagaccacggggaaacccccctcattccgcgccttgcgtgcccaacggaagcgccctcctgctcagcaaccctgcctaccgcctgttacttgcaacttacgcgagaccacccaggggaccagggccaccgactccagcttgggctaaacccacaaacactcaggcttatagcggcgactacatggaacccgagaaaccaggagcacctctcctccctcctcctccgcagaactccgtgccccattacgcagaggccgacatagttaccctgcaaggagtgacaggcgggaatacttacgctgtgcctgctctgccaccgggtgctgtgggtgacggacccccacgggtggacttccctcgcagccggctcaggtttaaggaaaagctgggggagggacagttcggcgaagtccacttgtgcgaggtggactccccacaggatctcgtctccctcgactttccactgaacgtgagaaagggccaccccctactggtcgctgttaagattctgagacccgacgccactaaaaacgccaggaatgactttcttaaagaggtaaaaataatgagccgtctcaaagaccctaatatcattcgcctgttgggcgtatgcgtgcaagacgatcctctttgcatgattaccgactatatggaaaatggagacctgaaccagtttcttagcgcccatcagttggaagataaagccgccgaaggcgcgcccggagatggtcaggcggcacaagggccgaccatcagttatccgatgctcctgcacgtggcagctcaaatagcttccggcatgagatacttagcgacgctcaattttgtccacagggatttggcgaccaggaactgtttggttggagaaaatttcactattaaaatcgcagatttcgggatgtctcgtaacctgtacgcaggtgattattaccgtgtgcagggacgcgcagtgctcccaatcaggtggatggcttgggaatgtatcttaatgggcaagttcactaccgcatctgatgtttgggccttcggagtgacattgtgggaagtgctgatgctgtgccgggcgcagccctttggacaattgaccgatgagcaagtgattgagaatgccggcgaatttttccgcgatcaaggccgtcaggtgtatttatccaggccaccggcctgtccccaaggcttatatgagctcatgcttcgctgctggtcacgggagtccgagcagcgcccacctttcagccagttacaccgctttctcgccgaagacgcccttaacaccgtctag

SEQ ID NO: 9617 - DNA, 453 bp, synthetic construct
  misc_feature 1..453: note = source = /note="Description of Artificial Sequence: Synthetic coding sequence"
  source 1..453: mol_type = other DNA
atgcggttcatggccggccccgccggcagccagagcctgggccccctgtgcttccactcatcaccccaggcactgtacaccgttctcctgattgtgctggttatgatgtctctggtctttgggaagttcgtgcctgttaattgggaaccaccccagcccctcccgtttcctaagtacctgaggtgctaccgctgcctcctggagactaaggagctggggtgtctgctcggcagtgacatttgccttactcccgctggctcatcttgcatcacgctgcacaaaaaaaactctagcggctcagacgtcatggtgtcagactgcagatccaaagaacagatgagtgactgttcaaacaccaggacaagtcctgtgagcggcttctggatcttcagccagtactgctttctggacttttgcaacgatccccagaatcggggactctacactccatag

SEQ ID NO: 9618 - DNA, 192 bp, synthetic construct
  misc_feature 1..192: note = source = /note="Description of Artificial Sequence: Synthetic coding sequence"
  source 1..192: mol_type = other DNA
atgggccccgaggccctgagcagcctgctgctgctgctgctggtggcttctggagacgctgatatgaagggccattttgatccagctaagtgtcggtatgccctggggatgcaggatcgcactatacctgacagtgacatctccgcctcttcctcgtggtcggattctacagccgccagacattcacggtag

SEQ ID NO: 9619 - DNA, 1212 bp, synthetic construct
  misc_feature 1..1212: note = source = /note="Description of Artificial Sequence: Synthetic coding sequence"
  source 1..1212: mol_type = other DNA
atgcagggcacccccggcggcggcacccggcccggccccagccccgtggacagaagaacccttctggtatttagttttattctggcagccgccctaggtcagatgaatttcaccggcgaccaggttttacgggtccttgccaaggacgagaaacagctgtctctgctcggagatctcgagggtctgaaaccccagaaagtagatttttggagggggcctgcccgtccctcactgcctgtggatatgagagttcccttcagcgaactaaaagatataaaggcctacctcgaatcccatggtttggcttactcgattatgataaaggacattcaggtgctgctggatgaggagaggcaagctatggccaaaagtagacgcctggaacgttccaccaactcattctcttattccagttatcataccttggaggagatttattcctggatcgacaatttcgtgatggaacacagcgacattgtgtctaagatccagattggtaactcgttcgaaaatcagtccatcctggtccttaaattctcaacaggtggtagtcggcatcctgcgatatggatagacaccggcattcattcccgcgagtggatcacccacgccacagggatttggaccgcgaataaaattgttagtgactatggcaaagatagggtgcttactgacatacttaacgcgatggacatttttatcgagctggtaactaatcccgacggctttgccttcactcattctatgaacagactctggcggaagaataagtccatcagaccaggaatcttttgcataggcgtggatctgaacaggaactggaaatcagggtttggcggtaacggtagcaattctaacccttgttctgaaacttaccacggaccttctccacagtccgaacccgaggtagctgccattgtcaacttcattaccgcccatggcaactttaaggctttaatatccatccattcctactctcaaatgctcatgtatccgtacggacggctgttggaaccagtcagcaatcaaagggaactcatgtggcccgtcgggagtccgtccaccggaccaatgaccgtggccagttctacccccagtgctctttcatccggcactctggggagtatggccagttgctgcagaccacatagatcaagcccccgcccccggagacgaggctggcggttcggaccttcctggtccacaccatag

SEQ ID NO: 9620 - DNA, 1542 bp, synthetic construct
  misc_feature 1..1542: note = source = /note="Description of Artificial Sequence: Synthetic coding sequence"
  source 1..1542: mol_type = other DNA
atggcccccgcccggaccatggcccgggcccggctggcccccgccggcatacctgcggtggctctgtggctgttgtgtacgctgggtctccagggaacacaagctggcccaccacccgcccccccgggacttccagctggggcagattgtttgaacagcttcacagctggggtccccggttttgtgttggatactaacgccagtgttagcaacggcgctacatttttagaaagcccgaccgtacggagaggatgggactgcgtacgcgcttgctgcacaacacaaaattgcaatttagccctcgtcgagctgcagcccgacaggggggaggacgccattgcggcatgcttcctaataaactgtctctatgagcaaaatttcgtatgtaagtttgcccccagagaaggatttatcaattatctaacacgagaggtctatcgctcctatcgccaactccggacacagggattcggcggatccgggattccaaaagcctgggctggcatagaccttaaggtgcaaccacaggaacccttggtgttaaaagacgtggaaaatacagactggaggctgctccgcggggacacggatgtgagggtggaacgtaaagatcccaatcaggtggagctttggggtctcaaggaaggcacctacctattccagctcaccgttactagttcagaccaccctgaggatacagccaacgtcacagtgaccgttttatcaaccaaacagaccgaagactactgccttgcctccaataaggtcggaaggtgtcgtggtagcttcccgcgatggtattacgatcccactgagcagatttgcaaaagtttcgtctatggcgggtgcctgggcaacaagaacaactacttgcgcgaggaagagtgtattctggcttgcagaggcgtgcagggaccttccatggagcgacgccaccctgtttgctccggcacctgccagccaactcagttcagatgctcgaatggctgttgcatcgattctttcctggaatgtgatgacactcctaactgtcccgacgcgagcgacgaggcagcctgcgagaagtacacatctggattcgatgagctccagcgcattcactttccctccgacaaaggtcattgtgtcgatttacctgataccgggctttgtaaggagagcataccccggtggtactataacccatttagtgaacactgtgctcgctttacatacggcggatgttatggcaacaaaaataattttgaagaggaacagcaatgcctggagtcatgtcgtgggattagtaaaaaggacgtgttcggcctgaggagagaaatccccatcccatctactggcagcgtggagatggccgtcgctgttttcctggtgatctgtattgtggttgtggtagctatactgggctactgtttcttcaagaatcaacgcaaggactttcacgggcatcaccatcaccctccaccgacacccgcctcgagtacggttagcaccaccgaggacactgaacacctcgtgtacaaccatacgacgagaccattatag

SEQ ID NO: 9621 - DNA, 798 bp, synthetic construct
  misc_feature 1..798: note = source = /note="Description of Artificial Sequence: Synthetic coding sequence"
  source 1..798: mol_type = other DNA
atggccccctggagccaccccagcgcccagctgcagcccgtgggcggcgacgcggtctccccagcactgatggttctgctgtgcctggggttaagtctgggtccaaggacgcatgttcaagccggaaacctcagcaaagctacgctgtgggcggaacctggttctgttatttctcggggaaacagcgtgacgatacggtgccagggaacactggaggcgcaagaatatcgcttggtcaaagagggctccccagagccatgggatactcagaatccacttgaaccaaagaataaggcaaggttctctattccatccatgactgaacatcatgcagggcgctacagatgttactactactcccctgctggctggtctgagcctagcgaccccctcgaacttgtcgtgaccggattctacaataagcctacattaagtgctctgccctcccccgtggtaacgtccggggaaaatgtgaccctgcagtgcgggtccagacttcgattcgaccggtttatcctaacagaagaaggcgaccacaagctgtcctggacactggattcccagcttacccctagcggccagttccaggcattgttcccagtgggaccagtcaccccaagccatcgttggatgcttagatgttacggctctcgcaggcacattttacaagtgtggagcgagcccagtgacttacttgaaattcctgtatcgggggaagaggcaaccgtgttcagttctaccatccagggcagtcaaaccggctgcggggagttgtaccgtcaggggtctccatgttag

SEQ ID NO: 9622 - DNA, 795 bp, synthetic construct
  misc_feature 1..795: note = source = /note="Description of Artificial Sequence: Synthetic coding sequence"
  source 1..795: mol_type = other DNA
atggagaagcccatcctgaagaacctgaacgagatgctgtgccccataattgcgtccgaggtcaaagctctgaacgcaaacttatctaccctcgaagtcctgactaagatcgataactacaccttgctggactattcgctgatatcttcccctgagattacagagaactacctcgatttgaaccttaagggagtcttctatcccttagagaatcttacggaccctccattctcacctgtgcccttcgtgttgcctgagcggtccaattccatgctctacattggaatcgctgaatattttttcaaaagtgctagttttgctcactttaccgcaggtgtctttaatgtcaccctgtccaccgaagaaattagcaatcattttgtccagaatagccaaggcctaggtaacgtcctgtcccgcgtggcctctacctccgtgggcctggtgatcctgggtcaacggcttgtttgtagcctgtcactcaaccgctttcgcctggctctgcccgagtcgaaccggtctaacatcgaagtcttgcggttcgagaacattttaagctcaattctgcattttggcgtccttcctttggctaacgcgaaactacagcaggggtttcctctgtctaacccacacaaatttctctttgtgaactccgacattgaggtcctagaaggctttttgcttatcagcaccgatttgaaatatgagactagcagcaagcagcaaccatcttttcacgtttgggagggtcttaacttgataagcagacagtggcgcggtaaatctgccccttag

SEQ ID NO: 9623 - DNA, 117 bp, synthetic construct
  misc_feature 1..117: note = source = /note="Description of Artificial Sequence: Synthetic coding sequence"
  source 1..117: mol_type = other DNA
atgaacaagatcctgagcagcaccgtgtgcttcggcctgctgaccctcctgtctgtcttatcctttttacaaagcgtgcacgggagaccttacttgactcaggggaacgagatttag

SEQ ID NO: 9624 - DNA, 567 bp, synthetic construct
  misc_feature 1..567: note = source = /note="Description of Artificial Sequence: Synthetic coding sequence"
  source 1..567: mol_type = other DNA
atgttccaccagatctgggccgccctgctgtacttctacggcatcatcctcaattcaatataccagtgtcccgagcactctcagcttacgactctcggcgtggatggcaaggagttccctgaggtacacctgggccagtggtatttcatcgctggcgccgcccccacaaaggaggagcttgcgacctttgatccagtcgataatattgttttcaatatggccgcagggtcagccccaatgcagctccacctgagagccaccatccgtatgaaggatgggctttgtgtcccgcgcaaatggatttaccatctcacggaaggttctaccgatttacgtaccgagggcagacctgatatgaagacagagctgtttagctccagttgcccgggcgggattatgctcaacgagaccggacagggctaccaacgctttctgctctataataggagcccccatccccctgagaaatgtgtcgaagagttcaagtcacttacttcttgtctggacagcaaggcatttctactaactccacgtaaccaggaagcctgtgagctctctaacaattag

SEQ ID NO: 9625 - DNA, 600 bp, synthetic construct
  misc_feature 1..600: note = source = /note="Description of Artificial Sequence: Synthetic coding sequence"
  source 1..600: mol_type = other DNA
atggagaccttccccctgctgctgctgagcctgggcctggtgctggccgaggcatccgagagtaccatgaagattatcaaagaagagtttaccgacgaggaaatgcaatacgatatggcaaagagtggacaagagaaacaaaccatcgagattctgatgaaccctatactgctggtcaagaacacatccttatctatgagcaaggatgacatgagctccacactgctgacgtttcggtcattacactacaacgaccccaagggaaattcgagtggtaatgataaggaatgctgtaacgatatgacggtgtggagaaaggtatctgaagccaatggctcctgtaagtggtcaaacaattttattaggagttcaacagaagtcatgcgcagggtgcaccgcgcaccaagttgcaagttcgtccaaaatcccggtataagctgttgcgagtccttggaactcgaaaacaccgtgtgtcagtttacaaccggcaagcagttccctcggtgccaatatcactccgtgacatccctggaaaagatccttacggtgctgacaggccatagcctcatgtcatggctggtgtgcggatctaagttgtag

SEQ ID NO: 9626 - DNA, 30 bp, synthetic construct; identical to SEQ ID NO: 4613
  misc_feature 1..30: note = source = /note="Description of Artificial Sequence: Synthetic coding sequence"
  source 1..30: mol_type = other DNA

SEQ ID NO: 9627 - DNA, 831 bp, synthetic construct
  misc_feature 1..831: note = source = /note="Description of Artificial Sequence: Synthetic coding sequence"
  source 1..831: mol_type = other DNA
atggcccccagccccctgcagcggctgcactgcggccccagcccctccccgcgacctacggaggtgcctagaggcaccgtttcagttagctgtcgctacctgaaaaacagtctccacgtatttgtgagtggtggagccattgggacaagtagtcctgcgcttctggaatgccaggagggcgtaggcccagctcgcccgtctcttctggtaccaccccccccaaggccccgccggctcgatctcgctcgcacattgccggccgagcggaccgacagtcagagtctatacatagtgtatattgcgctgcctggccggacaccacgtcccgcactggcctttgccttcctgatgcccgcttgttgcaacaggcccagtccacgacctagccccgcacacctaacagcctcgtctgtcctccgcagacagaggcacgtccttgccgcctccgcagccagcccttgtcagtggtcagggctgcgagtagcccattctctgagacaggtagtgtctttgtgcccccggtgtaccggcagttgcccatttagcggggcctgcgcttctagtctgccctctcctttaagctgccctcattctcatagcggctcctggggaacatggtcacagggcaggccctgctctagcactgaggttgctggactcgctctgtggcccaccgacttcctgagctgcctcctggacgcctcagagctgcagactcaagggagtcacggattctcattcactcctacgggattttcctccaaccggaaagtgggcgttggttcttgccgggacggcgccggccggggagccatggggggccttttctag

SEQ ID NO: 9628 - DNA, 678 bp, synthetic construct
  misc_feature 1..678: note = source = /note="Description of Artificial Sequence: Synthetic coding sequence"
  source 1..678: mol_type = other DNA
tgagccgacctgcccagctgctggggcgccggcccctgctacaccggccacaaggtgggggcactgcgaagggacaccgtcatctgctgctgtcgacacggtgactacagcaccccgtgcctgttcacccccggaaaacctagtagaaaccccagcccctggaagaggaccctgtggacattgagcgctccatgggcaggccctgccggatggaccggggaggaacagaacgctaccaaaaccgggctcatcacacgccggccccgtcccctcaggcgacgcccacatcccgcacctgcgagtcccctcccggagataattaggggcaacataccccgaatgctcggcaaatttgttcccgtgaattgggaaccgccacaaccgctcccctttccaaagtacctgcgttgctatcggtgcttgctggaaactaaggagctagggtgcctgctcggctccgatatctgccttacgcccgctggttcctcatgtattacacttcacaaaaaaaactcttctggctcagatgtgatggtttctgactgtagaagtaaagagcagatgtcagactgctcaaacacgagaactagtccagtctctggcttctggatcttttcccagtactgcttcttggatttttgtaatgatccacaaaaccgcggcctgtataccccatag

SEQ ID NO: 9629 - DNA, 534 bp, synthetic construct
  misc_feature 1..534: note = source = /note="Description of Artificial Sequence: Synthetic coding sequence"
  source 1..534: mol_type = other DNA
atggtgcccgccgccggcgccctgctgtgggtgctgctgctgaacttaggcccaagggcagccggcgcacaaggtcttacccagacacccactgaaatgcagagggtgtcactgcggttcgggggacctatgactcgcagttaccggagtactgcccgtacaggactcccaagaaaaactcgaattatactggaggatgagaatgacgcaatggcagacgccgaccgattggccggccctgccgccgccgaactcttggccgcaactgtctcgactggattttccagatccagcgctattaatgaagaggacggcagctcagaagagggtgtagtgataaacgcaggaaaggattccacctcccgggagttaccgtcagctaccccaaatactgcagggtccagctcaacacgcttcatcgctaattctcaggagcctgagattaggctcaccagctctctacctagaagtcccggtcggagtactgaggatttgcccccctgccacctcctcagaatctgtgggtggtgctag

SEQ ID NO: 9630 - DNA, 912 bp, synthetic construct
  misc_feature 1..912: note = source = /note="Description of Artificial Sequence: Synthetic coding sequence"
  source 1..912: mol_type = other DNA
atgctgcaccccgagaccagccccggccggggccacctgctggccgtgctccttgctctactcggaaccgcttgggctgaggtgtggcctcctcagcttcaggaacaggctccaatggctggggccctcaaccggaaagagtcatttctattgctgtcgcttcataataggttgcgatcctgggtgcagcctcccgcagcagacatgcgtcgcctagactggtcggatagtcttgcccagttggcgcaggccagggcggccctgtgtggaatacctacacctagcttggcttctgggctgtggagaaccctacaggtggggtggaacatgcaactgcttcccgccgggttagccagtttcgtagaggtggtgagcttgtggtttgccgagggtcaacgatatagtcatgcagccggtgagtgcgcaaggaatgctacatgtacccactatacacagttagtgtgggcaactagcagccagttgggctgtggcagacacctctgctctgccgggcaagctgctatcgaagcgtttgtgtgtgcttatagcccacgtggcaattgggaagtgaatggaaaaaccatcgtgccatataagaagggtgcctggtgctctttgtgcacagcgagcgtatctggttgcttcaaggcctgggaccacgcggggggactgtgtgaggtcccaagaaatccttgccggatgagttgtcagaatcacggccgcttgaacattagtacatgtcactgtcactgcccaccgggatatacaggacgctactgtcaggtgcgatgttcactccaatgcgtgcacggccgctttcgagaggaggaatgtagctgcgtgtgcgacatcggatacggcgaaccatcagtcccaccccggtgcatatttccttccactcccgtgacttag

SEQ ID NO: 9631 - DNA, 1482 bp, synthetic construct
  misc_feature 1..1482: note = source = /note="Description of Artificial Sequence: Synthetic coding sequence"
  source 1..1482: mol_type = other DNA
agcgaggccgtgtacctgaacgacagcacctacgacggccacaccgtcggtggcctccaatacggaggactcgggcaactggccgatggagttgtcggcctggatgattttagaaagtctcaggagctccgcgtctggcccggctacgactatgtcgggtggtccaaccactcattctccagcggttatgtggaaatggaatttgagttcgacaggcttcgtgcatttcaggccatgcaggtgcattgcaacaacatgcacaccctgggcgctagactcccagggggcgtggagtgcaggtttagaaggggacccgccatggcttgggaaggggaacctatgaggcacaatctggggggcaatctcggagatcccagggcaagagccgtgagcgtgccacttggcggaagggtggcacggtttctccagtgtcgcttcctgttcgctggaccctggctgctcttttctgagatcagctttatcagtgacgtggtgaataactcctcaccggccttgggcggtaccttccctcctgcaccctggtggccgcccggaccgcccccaacaaacttctcctctttagagctggagcccagaggtcagcaacccgttgcgaaggctgaaggaagcccaactgcaatcttgattggctgtctggtggccataattctgttattactgctgattattgccctgatgctctggagattgcattggaggcggctactaagtaaggtcctggaaagccacccgcggacgaggtcccccggtctcgtcggaatccggccaactccactgcccgtgtccccgatggctctgcggtgttgctccccaattcagccaacagcttccttctggcccctgacccctgtgcctctggaagcaagagcacctccacatccccccggacctaaccctccaactccacgtggcgtgactggcggcaatacttacgcagtgcccgccctcccccctggcgccgtgggagacggcccccccagagtggacttccctcgctctaggctacggttcaaggagaagcttggcgagggtcagtttggtgaggtccatctctgcgaggtcgactctccacaagacctagtgagtctggattttcccttaaacgtgaggaaaggtcacccattactggttgctgtgaagatcctgcggcccgacgccacaaaaaatgctagaaacgattttctgaaggaggtgaagatcatgtccaggctcaaggacccgaatatcatacgcctgctgggcgtctgtgtccaggacgacccattatgtatgatcacggactatatggaaaatggcgacttgaaccagttcctctcggctcaccaattggaggacaaggcagccgagggcgcccctggtgatggacaggctgctcaaggacctaccatcagctacccaatgttgctccatgtggccgctcagatcgcttccgggatgaggtacctggctaccctgaattag

SEQ ID NO: 9632 - DNA, 807 bp, synthetic construct
  misc_feature 1..807: note = source = /note="Description of Artificial Sequence: Synthetic coding sequence"
  source 1..807: mol_type = other DNA
atgaagcagatcctgcaccccgccctggagaccaccgacccctgcagtactggcttcgtattcccagccatgactctcttcccagtccttctctttttggtcgccgggctacttccaagtttcccagccaacgaggataaagatcctgcattcactgccttgctaaccacccagacgcaggtgcagcgggaaattgtgaataaacacaatgaattacgtagagccgtttcaccccctgcccggaacatgctgaaaatggagtggaataaagaggctgccgccaacgcacagaagtgggcaaatcagtgtaattaccgccactccaatcccaaggaccgtatgacttcattgaaatgcggcgaaaatttatacatgtcctccgctagcagctcctggtctcaagcaattcaatcatggttcgacgagtataatgattttgatttcggagtgggaccgaagacgcccaatgcagtcgtaggacactatacacaagtggtttggtattccagttatctggtcggctgcggaaatgcttactgcccaaatcagaaagtgcttaagtattactatgtatgccaatattgccctgccggtaactgggctaataggctctacgttccttatgagcagggagcaccctgcgcctcttgccccgacaactgcgacgatggcctgtgcacaaacggctgcaagtatgaggatctatatagcaattgtaagagtctcaaactcacactgacttgtaagcatcaattggtgcgagacagctgtaaagcctcctgcaactgcagtaattctatttactag

SEQ ID NO: 9633 - DNA, 372 bp, synthetic construct
  misc_feature 1..372: note = source = /note="Description of Artificial Sequence: Synthetic coding sequence"
  source 1..372: mol_type = other DNA
atgctgcccaagagccggcgggccctgaccatccaggagatcgccgccttggcaaggagttctcttcacggcatctctcaggtggtgaaggatcacgtgacaaagcctacagccatggcgcagggccgcgtcgctcacctgatcgagtggaaaggctggtccaagccaagtgatagtccggctgcactggaaagcgcgtttagcagctattctgatctaagtgagggcgagcaagaggctcgtttcgcagctggagtcgccgaacagttcgccattgccgaagccaagctcagggcctggagctctgtagacggagaagactctaccgacgactcatacgatgaggatttcgcgggcggcatggacacatag

SEQ ID NO: 9634 - DNA, 726 bp, synthetic construct
  misc_feature 1..726: note = source = /note="Description of Artificial Sequence: Synthetic coding sequence"
  source 1..726: mol_type = other DNA
atgggcgccgtgatgggcaccttcagcagcctgcagaccaagcagcggcgcccctccaaggacaagattgaggatgaattggagatgactatggtttgccacaggcccgagggtctagagcaactggaggcgcagacgaactttaccaaaagagagttgcaagtcctatacagaggatttaaaaatgagtgtcctagcggtgtggtgaacgaagatacttttaagcagatctacgctcagttctttccacacggtgcgcttccctgcctggagggcagtccatgcgtcgaatttctgccacccagccctgccctcctattctgcttggttgacgcttccacttacgctcactacctgtttaatgcattcgatactacacagaccggaagcgttaagtttgaagatttcgtgaccgccttgtccatccttcttagaggcactgtacatgaaaagctgcgctggacctttaacctgtacgacattaacaaagatggatacatcaacaaagaggagatgatggatatagtcaaggcgatttacgacatgatgggtaagtatacataccccgtactgaaggaagacacccccagacaacatgtcgatgtctttttccagaagatggacaagaacaaagatggaattgtgacactcgacgagtttctggaatcatgtcaggaagatgataatattatgaggagcctacagctcttccagaatgttatgtag

SEQ ID NO: 9635 - DNA, 630 bp, synthetic construct
  misc_feature 1..630: note = source = /note="Description of Artificial Sequence: Synthetic coding sequence"
  source 1..630: mol_type = other DNA
atgggccccgaggccctgagcagcctgctgctgctgctgctggtggcttccggggacgcggacatgaaagggcactttgatcctgctaagtgtaggtatgcgctgggcatgcaagaccgaacgatacctgattctgatatctccgcctcatcttcatggtccgattccacagcagcacgccacagcaggctggaatctagcgacggtgacggcgcctggtgtcccgccgggagcgtctttcctaaggaagaggagtatctgcaagtagacctccagaggctgcatcttgtggccctcgtgggaacgcaaggcagacatgcgggcgggctgggcaaggagttttcgcgctcttaccgccttagatattcccgagatggtaggcgatggatgggctggaaagataggtgggggcaggaagttattagcggtaatgaggatcctgaaggtgtagtgctgaaagacctgggtccaccaatggtggcaaggctggtgcgattttaccctagagccgaccgcgtgatgtccgtctgtcttcgcgtagaattgtacggttgcctatggcgcgacggcctgctgagttacaccgcacccgtgggccagactatgtacctatccgaggccgtgtactag

SEQ ID NO: 9636 - DNA, 312 bp, synthetic construct
  misc_feature 1..312: note = source = /note="Description of Artificial Sequence: Synthetic coding sequence"
  source 1..312: mol_type = other DNA
atgcggcagcggctgctgcccagcgtgaccagcctgctgctggtggcactgctgttcccaggcagcagccaagccagacatgtcaaccacagcgccacagaggccttgggcgaattgcgcgagagagcccccggacagggtactaatggattccagctgctgaggcacgctgtgaaaagagacctgctgcccccaagaacgcctccttatcaggtccacatctcacatcaggaagcccgagggccctcttttaaaatctgtgttggtttcctgggcccccggtgggccagagggtgttctacaggcaactag

SEQ ID NO: 9637 - DNA, 426 bp, synthetic construct
  misc_feature 1..426: note = source = /note="Description of Artificial Sequence: Synthetic coding sequence"
  source 1..426: mol_type = other DNA
atgaagaccggcctgttcttcctgtgcctgctgggcaccgccgccgcaatccccaccaacgcccgcctgctgtccgatcattccaaacccacagctgagacagtggctcccgacaacactgccattccctccctgcgcgctgaagctgaagaaaacgagaaggaaacagcagtaagcacggaggacgacagccaccacaaggcagaaaaaagctccgtgctcaaaagcaaggaagaatcccacgagcagtctgctgagcagggtaaaagttcctcccaggaactgggcctgaaggatcaggaggacagtgacggacatttgtctgtgaacctggaatatgcacccactgaaggcacattggacatcaaggaagacatgtcagaaccccaggagaaaaaactcagtgaaaacaccgacttcttatag

SEQ ID NO: 9638 - DNA, 642 bp, synthetic construct
  misc_feature 1..642: note = source = /note="Description of Artificial Sequence: Synthetic coding sequence"
  source 1..642: mol_type = other DNA
atgcggctggccggccccctgcggatcgtggtgctggtggtgagcgtgggggttacatggatagtagtgtcgatcttgcttggaggcccaggcagcggatttccacgcatccaacagttattcacatctcccgagagttcagtgaccgctgcccctagagcacggaaatataagtgcgggctgcctcaaccctgcccggaagagcatcttgcctttcgggtcgtcagtggagctgctaacgttataggacctaaaatatgccttgaggacaaaatgctcatgtcatcagtgaaggacaacgtggggcgcggcctgaatatagctctcgtgaacgatgttaatgacctgctcaaattcattcgtccgctccacgagggaactttagtttttgttgcttcttatgatgatccagccaccaagatgaatgaggaaaccagaaagctctttagtgagctgggctccaggaatgcgaaggaactcgcctttagagactcctgggtgtttgtcggagctaagggtgtacagaataagtctccttttgaacagcacgtgaagaactctaaacatagcaacaaatacgaggggtggcctgaggccctcgagatggagggctgtatcccccgtcgatctaccgcatcttag

SEQ ID NO: 9639 - DNA, 2700 bp, synthetic construct
  misc_feature 1..2700: note = source = /note="Description of Artificial Sequence: Synthetic coding sequence"
  source 1..2700: mol_type = other DNA
atgctgctgctgctgctgctggcccccctgttcctgcggccccccggggccggcggcgctcagacgccaaatgcaacatccgaggggtgccaaataatccatcccccatgggagggtggaattagatataggggcttgacccgtgatcaggtcaaggctatcaattttcttccggtggactatgagatagaatatgtgtgccggggggaacgcgaagtagtgggtccaaaggtgagaaagtgtttggccaacggaagctggactgacatggatacaccctctaggtgtgttaatcggactccccacagtgagaggagagccgtgtacatcggggctctgttccccatgtccgggggatggcctgggggccaggcgtgccagccagccgtagagatggctctagaggacgtcaatagccggcgagacatcctaccggattacgagctgaagctgatccatcacgatagtaaatgcgaccccggccaggccaccaagtacctgtacgagcttctatacaacgaccccattaagattattctcatgcccggttgtagctctgtcagcaccttggtcgcagaagcagcacggatgtggaacctaatcgtacttagctatggatctagttcaccagcattgtctaaccgccagcgctttcctacttttttccgcacacacccgtccgccacattacacaacccaaccagagtgaagctgtttgagaaatggggatggaagaaaatcgctactattcagcagaccaccgaggtctttacctccaccctcgacgacttggaagagagggtgaaagaggcgggaatagaaattacgttcagacagtcattcttctccgaccctgccgttccggtaaagaacctcaagcgccaggatgctagaattatcgtggggctgttttatgaaaccgaagcaaggaaagtgttttgcgaagtctacaaggagagactgtttggcaaaaagtacgtttggtttcttatcgggtggtacgcagacaactggttcaagatttatgatccatcaatcaactgcacagtggacgagatgaccgaagctgtggaggggcatattacaactgagattgttatgctcaaccccgccaatacacgaagtatttccaatatgacctcccaggaatttgttgaaaagctgaccaaaaggctcaaacggcaccccgaggaaacgggcgggttccaggaggctccactagcctacgacgccatatgggcgctggccctggccctgaacaaaaccagcggcggcggtgggcgctctggagtgcgcttggaggactttaattacaacaatcagacaattaccgatcagatctaccgagcaatgaactcctccagcttcgagggggtttccggccatgtcgtatttgatgcttctggctcgagaatggcctggacactcattgagcaactgcaaggcggcagctacaagaagatcggatattatgactcaactaaagacgatctgtcatggtcaaagaccgacaagtggatcggcggtagcccgcctgctgatcagacgctcgtcatcaagaccttcagatttttgtcccaaaaactgttcatttcagtgagtgtgctgtcgtcactcgggatcgtgttggccgtggtgtgtttgtctttcaatatttataattctcacgtgagatacatccagaatagccagcctaacctaaacaatctgaccgccgttgggtgctctctggcattggcagcagtctttcccctgggcctcgacggctaccacattgggcggaaccaatttccgttcgtatgtcaggctcgtctatggctgctggggctgggcttttcattaggatacgggagcatgttcacaaagatctggtgggtacacactgtgtttactaagaaagaggagaagaaagagtggcgtaagacgctcgaaccctggaaactgtacgcgacagtcggcttgctggtcgggatggatgtgttgactttggctatctggcagatagtggatcctctacacagaacaatcgaaactttcgctaaagaggagcccaaggaagacatcgatgtgtcaattctccctcagctcgaacattgcagcagcaggaaaatgaacacttggctgggaatattctatggttacaaagggttgctgctgctactaggaatattcttggcttatgagactaagagtgtaagcacagaaaagataaatgaccatagggccgtaggcatggccatatacaatgtggctgtgttatgcttgatcaccgcccccgtgaccatgattctgtcttcccagcaggacgccgcgtttgcttttgcctccctagccatcgtgtttagtagctatattaccctggtggtacttttcgtccctaaaatgcgccgcctaattacacggggagaatggcagagtgaggcacaggatacgatgaaaacaggctcaagcacgaataacaacgaggaagagaagtcccgcctcctggagaaggaaaacagagagctggaaaagattatagccgagaaggaagaaagagtgtctgagctgcggcaccagctgcagtcccggcaacagctgcggtcccggagacatcctcccaccccacctgaacctagcgggggcctcccaagagggccccctgagccacccgaccgactttcctgtgacgggagccgggtgcatctgctttataagtag

SEQ ID NO: 9640 - DNA, 192 bp, synthetic construct
  misc_feature 1..192: note = source = /note="Description of Artificial Sequence: Synthetic coding sequence"
  source 1..192: mol_type = other DNA
atgggccccgaggccctgagcagcctgctgctgctgctgctggtggcatccggcgatgccgacatgaaaggccatttcgaccccgctaaatgtcgatatgcgctggggatgcaagatcggacgattcctgattcggacatcagcgcctcatcttcatggtctgactcaacagccgctcggcatagcaggtag

SEQ ID NO: 9641 - DNA, 489 bp, synthetic construct
  misc_feature 1..489: note = source = /note="Description of Artificial Sequence: Synthetic coding sequence"
  source 1..489: mol_type = other DNA
gacgaggaccggtacaccacctgctggcccaagacctggctggccaaggattgtcctgccttaagaatcatctccgtagaatatgacacctcgctgtcagactggcgcgctagatgcccaatggaaagaaaatcaatagcattcagaagcaatgagctgctgagaaagctgagggcagccggtgtgggagacaggcccgtcgtgtggatttcgcacagcatggggggattgctggtcaagaagatgctcctggaagcctcaacaaaacccgaaatgtccaccgtaattaataatacacgcggaatcatattctactctgttcctcatcacggctctcgactggctgaatacagtgtcaatattagatatctgttgtttccgtccctggaagtgaaggaactgtctaaagggaataccttttgtcataagggaaattggggatacatcaacatttcctataccgagaagaagaagaagttcctgccctag

SEQ ID NO: 9642 - DNA, 1083 bp, synthetic construct
  misc_feature 1..1083: note = source = /note="Description of Artificial Sequence: Synthetic coding sequence"
  source 1..1083: mol_type = other DNA
atgcccgagctggtggtgaccgccctgctggcccccagccggctgagtctgaagctattacgggcctttatgtggagtctagtattcagcgtagccctcgtggcagccgcagtttatgggtgtatagccctcacacatgtgctgtgcagaccccgtaggggatgttgcggccggaggcggtctgcatctccagcctgtctgtctgacccctcccttggtgagcatggattcctcaatttgaaatccagcggactgcgcctgcattacgtgtccgctgggaggggcaatggtccgctgatgctgttcctgcatggatttcccgagaattggttttcctggagataccagctgcgagagttccagtcaaggtttcatgtggtggctgtagatctgagagggtacgggccctctgatgctccacgagatgtggactgctatactatcgacctgctcctcgtcgacatcaaagacgtgatcttaggcctgggatacagtaaatgtattttggtggcccatgattggggcgccttgctggcttggcacttcagcatctattacccctctctcgtggaaaggatggtcgtcgtgagtggtgctccgatgagcgtgtaccaggactatagtctacaccatatatctcaattctttcggtcacactatatgtttctatttcagctgccgtggcttccggaaaagttattgtccatgagtgattttcagatattgaaaaccacactcacacatcgcaaaacagggataccctgcctgactccttcagagctggaggctttcttgtataacttcagtcagcccggcggtctcactggtcccttgaattactacagaaacctgtttcggaactttccccttgagcctcaggagcttaccacaccaacactcctgttgtggggggaaaaggacacctatctggaactaggcctggtggaagccatcgggagtaggttcgtgcctgggcgccttgaagcccatatactgcctggaatcggacattggatcccccagagtaaccctcaggaaatgcaccagtatatgtgggccttccttcaggacctgcttgactag

SEQ ID NO: 9643 - DNA, 678 bp, synthetic construct
  misc_feature 1..678: note = source = /note="Description of Artificial Sequence: Synthetic coding sequence"
  source 1..678: mol_type = other DNA
tgagccgacctgcccagctgctggggcgccggcccctgctacaccggtcacaaagtcggcgccctccgaagagataccgtgatatgctgctgtcgacacggagattatagcaccccctgcctttttaccccggggaagccaagcaggaacccatctccctggaagcgcactctctggaccttatcagcaccctgggcgggtcccgcaggttggacaggcgaagagcagaacgcgactaagaccggcctcatcacacggcgcccgcggcccctcaggcgtcgcccccatcctgcacctgcttctccgctgccggaaataatcagaggtaatattcctagaatgctcggtaagttcgtgccagttaactgggagcctccccagcccttgcccttccccaaatacctgcggtgttataggtgtcttctcgagactaaggaactgggctgcctgcttggtagcgacatatgcctgacacctgccggaagtagttgcatcacgcttcataagaagaactcatccggttccgacgtgatggttagtgattgccgctcaaaggaacagatgtcagactgttccaatacacggacttctcccgtttcaggcttctggatcttctctcagtattgttttcttgatttttgcaacgaccctcagaacagaggcctctatacaccgtag

SEQ ID NO: 9644 - DNA, 192 bp, synthetic construct
  misc_feature 1..192: note = source = /note="Description of Artificial Sequence: Synthetic coding sequence"
  source 1..192: mol_type = other DNA
atgaagcacgtgctgaacctgtacctgctgggcgtggtgctgaccttgctgtcgatttttgtgcgagtgatggagtccctcgaaggcctgcttgagtcgccctcgcccggcactagctggacaacacgctctcaactagcgaataccgagccaacgaaagggcttccggatcatcccagccggtcaatgtag

SEQ ID NO: 9645 - DNA, 5235 bp, synthetic construct
  misc_feature 1..5235: note = source = /note="Description of Artificial Sequence: Synthetic coding sequence"
  source 1..5235: mol_type = other DNA
atgcggctgctgtggggcctgatctgggccagcagcttcttcaccctcagtctgcagaaacctaggcttctgctctttagtcccagcgtcgtacacctcggtgttccactgagcgtcggcgtacagttgcaggacgtaccaaggggtcaagtggtcaaagggtcagtttttctgcggaatccctccagaaacaatgtcccctgcagtcccaaggtcgatttcacactcagttctgaacgcgatttcgccctcttgagcttgcaggtgccactgaaggatgccaaaagctgcggactgcaccagcttcttcgaggccccgaagtgcaattggtggcacactccccttggctcaaagacagtttatcacggacaaccaacatccaaggaatcaatcttcttttctcatcccgtcgaggacacttatttctgcagacagatcagcctatctataatccagggcaacgggtcaggtacagagtcttcgcacttgaccagaagatgaggccctccaccgacaccattactgtaatggttgagaattctcacggacttcgcgtgagaaagaaagaggtctatatgcccagttctatcttccaggacgacttcgtgatccccgacataagcgagccaggaacctggaagatctccgccagatttagtgacggcctagaaagtaattcctccacccaatttgaggtgaagaaatacgtcctacccaacttcgaagtaaagatcacgcccggcaaaccatacattttaaccgtgcctgggcacctcgatgaaatgcaactggacattcaggcccgctatatttacggtaagccagttcaaggggtggcctacgtgaggtttgggttactggacgaagatgggaagaaaactttcttccggggtctcgaatcccagacgaagctggtgaacggtcagtcacacatctccctctccaaagctgagtttcaagacgccctagagaaactcaacatgggaataactgatctccagggactgagactgtacgttgcagcggcgataatagagtacccagggggcgagatggaggaagcggagctgacatcatggtacttcgtgtccagcccattcagtctggatctctcaaagactaagcggcacctcgtaccaggggcccctttcttactacaagcactcgtaagagaaatgagcgggtcccccgcttcaggcatacccgttaaggtgtccgcaaccgtctcatcccctgggagcgtgccggaagtgcaggacatccagcagaatactgacggcagcgggcaggttagtatccccatcataattccacagactattagcgagctccagctttccgtcagcgcggggagcccacatcctgccattgcccgtctgactgtggcagcccccccaagtggggggccagggttcctgagtatcgaacgacccgactcaaggcctccccgggtgggcgatacactcaacctgaacctcagggccgtgggctctggagcaaccttttctcattactactacatgatcttaagccgggggcagattgtgttcatgaaccgcgaacctaaacgaacactgaccagtgtgagcgtctttgtggatcatcatcttgccccctcattttacttcgtcgccttctattatcacggtgaccacccagtagcgaactctcttcgtgtcgacgttcaggcgggagcctgcgagggcaaacttgagttatcggtcgatggggcaaaacaataccgcaacggcgagtctgtgaagctgcacctggagactgacagtctggccttggttgcgctgggggctctggacacagccctttatgctgcgggttcaaaatcacataagcccctcaatatggggaaggtattcgaggcaatgaatagttatgacctcggttgcgggccgggggggggggattcagctctccaagtcttccaggcagcaggcctggctttctctgacggcgaccagtggaccctcagtagaaagcggctgtcatgtcccaaagagaagactacaaggaaaaagcgtaacgtgaactttcagaaggcaatcaacgagaaattagggcagtatgcttcgccaaccgcaaaaaggtgctgccaggacggggtaacaagactccctatgatgcggtcttgtgaacagcgagcagctcgcgtccagcaacctgattgccgcgagcctttccttagctgttgtcaattcgcggaatctttgcgaaaaaagtcccgcgataaaggccaggcaggcctccagcgggcacttgagatcctgcaggaggaggatcttatagacgaggacgacattcccgtgcggagcttctttcctgaaaactggctgtggcgggtcgagacggtcgataggtttcagattctgacactgtggctgccggactcattgacaacatgggaaattcacggattgtctctttcaaaaaccaaggggctgtgtgtggccacacctgtacagctcagggtattccgcgaattccatctccacttgagactgccgatgtccgtgaggcgtttcgaacagctggagttacggcctgtactgtacaattacctggacaaaaatttaaccgtttcagtgcatgtttcccccgtggagggcctgtgtctggctgggggtggaggactcgctcaacaggtgttggttccagccgggagcgcgcgacccgttgccttctcagtcgtccccacagccgcagctgctgtttcactgaaggtggttgctcgcggtagttttgagtttcccgtgggggatgcagtcagcaaggtcctgcagattgagaaggagggcgccatccatcgcgaggagctggtgtatgaactaaaccctctggatcatagaggccgaaccttagaaattcctgggaactctgatcctaatatgattcctgacggagattttaattcgtatgtcagggtgactgcctccgatcctttggatactcttggaagcgagggcgcattgtccccaggaggggtcgccagcttacttcggctgccacgggggtgcggggagcagacgatgatctatttggcccccactctcgcggcctcgcgttatcttgacaagacggagcagtggtctactctaccgccagagacgaaagatcacgccgttgatttaatacaaaaggggtacatgcgcatccagcagtttcggaaggctgatggatcctatgccgcctggttgtcaagggggtcctccacgtggcttactgcgttcgtgctgaaagttttgtccctggcacaggagcaggttggcggtagtccagagaaactgcaagagacgagtaattggctcctatcccagcagcaggccgatggcagttttcaggacctgtccccagttatacaccgaagcatgcaagggggactcgtgggtaacgacgagaccgtcgctcttactgcctttgtgacaatagccctacatcacgggctggcggtcttccaagatgaaggcgcggaaccccttaaacaacgggtggaggcttctatcagtaaggccagctcttttctcggagaaaaggcttccgcagggcttttaggggctcatgccgctgccattaccgcatacgctctgacactaaccaaagcccctgcggatctgaggggggtagcccataacaatctcatggctatggcacaggagacaggtgacaacctctactggggcagcgtcactggctctcaatcaaacgctgttagccctacgcctgcacctcgcaacccctccgatcccatgcctcaagcccctgctctgtggatcgagacaaccgcctacgcactccttcacctcctattgcacgagggcaaggctgaaatggctgatcaagctgcagcatggttgacacggcagggtagcttccaggggggattcaggagcacacaagataccgtgatcgccctggacgctttgtccgcttattggatcgcttcccatacaactgaggagcgggggctcaacgttacgcttagctccacaggccgtaatgggtttaaatcacatgcattgcagctcaataatagacagatccggggactagaggaggagctgcagttttctctaggttcgaagatcaatgtgaaagtaggtggcaatagcaagggcacgctgaaagttctgcgcacttacaatgtgctagatatgaagaatacgacttgccaagatctgcaaatagaagttacagtgaagggccatgttgagtacacgatggaggccaacgaagactacgaggactatgagtatgacgagctcccagctaaagacgaccccgatgctccactgcagcctgtgacaccactccagctattcgaaggcagaagaaatcgccgacgtagggaggcacctaaggtcgtcgaggagcaggagagccgcgtccattacacagtgtgtatctggcgaaacggaaaggtcggccttagcggcatggcaatcgcagatgtaaccctactaagtgggttccacgccctccgggcagatctcgagaaactgacatctttgtccgatcggtatgtgtcacatttcgaaacggagggtccgcacgtgctgttatactttgacagcgtgccgactagtagagagtgtgtgggctttgaagccgtgcaagaggtacccgtgggactcgttcaaccagccagcgctacgctctacgactactataaccccgagcggaggtgtagtgtgttctacggtgccccctcaaagagtcgtttgctggccactctgtgctcggctgaagtctgtcagtgtgctgaaggcaagtgtccccgccagcggagggccctggagagaggacttcaggatgaggatgggtacagaatgaaatttgcttgttactatccccgggtagagtacggtttccaggttaaggtgctccgagaagatagtagagcggcctttaggcttttcgaaacaaaaatcactcaagtgctgcattttactaaggacgtgaaggccgccgcgaatcaaatgcgaaatttcttagttagggctagctgcaggctacgtctggagcctggaaaggagtatctcattatgggactcgacggagccacttatgacttagaggggcatcctcagtacctgctggattctaacagctggatagaggagatgccaagcgagcgactgtgtcgatcaactaggcagagagcagcatgtgcccagctgaacgactttctgcaagaatatgggacgcaggggtgccaggtgtag

SEQ ID NO: 9646 - DNA, 792 bp, synthetic construct
  misc_feature 1..792: note = source = /note="Description of Artificial Sequence: Synthetic coding sequence"
  source 1..792: mol_type = other DNA
atggccgacatgcagaacctggtggagcggctggagcgggccgtggggcgcctagaggcggtgtctcatacaagcgacatgcaccggggctacgcagatagtcccagtaaaggtgctgctccctatgttcaagcatttgacagcctgctcgccggccccgtggccgagtatctgaagattagcaaagagattggtggcgatgtccagaagcacgcagagatggtgcatacagggctaaaactcgagagggcgttgctcgttacagcaagtcagtgtcaacagcctgctgaaaacaaactttctgacttactggcccccataagtgagcagataaaggaagtgatcacgttcagggagaaaaaccgcggtagcaagctgttcaaccacctcagtgccgtgtccgaatcaattcaggccctcgggtgggtggccatggcaccaaaaccaggaccatatgtgaaggagatgaacgacgctgccatgttttatactaacagggtgctcaaagagtacaaagacgtggacaagaaacatgttgattgggtgaaggcatatttgtcaatttggacagaactccaggcctacatcaaagagttccatacaactggcctcgcatggagcaagactggtccagtagctaaggagctgtcaggactgccctcaggacccagcgccggctcttgtccgcccccacctcccccctgccccccccccccgccagtgagtactatcagctgctcatatgagtcagcttcacgtagtagcctcttcgcccagattaatcagggatag

SEQ ID NO: 9647 - DNA, 501 bp, synthetic construct
  misc_feature 1..501: note = source = /note="Description of Artificial Sequence: Synthetic coding sequence"
  source 1..501: mol_type = other DNA
atgggccccgaggccctgagcagcctgctgctgctgctgctggtggctagtggcgacgccgatatgaaaggccacttcgacccggccaaatgtcggtatgccttgggtatgcaagatcggaccattcccgacagcgacatcagcgcttcaagtagctggtccgactctaccgctgctcgacactctcgcctggagtcttctgacggagacggtgcctggtgccctgcaggatccgtctttccaaaagaggaagagtacctccaagtggacctgcagcgcttgcacctcgttgccctggtagggacacaagggcggcatgctggggggctaggcaaagagttttcgaggtcatataggctccgctactcacgggacggccggcgctggatggggtggaaggatagatggggacaggaagtgatttcaggcaatgaagacccagagggtgtggtccttaaggatctaggcccaccaatggtcgcacgtcttgttcggttctag

SEQ ID NO: 9648 - DNA, 2349 bp, synthetic construct
  misc_feature 1..2349: note = source = /note="Description of Artificial Sequence: Synthetic coding sequence"
  source 1..2349: mol_type = other DNA
agcatcctgcgggtggaggccgtggacgccgactgcagcccccagtttagccagatctgttcttacgagataatcacgcctgacgtccccttcaccgtggataaggatggatacatcaaaaataccgaaaagttaaattatgggaaggaacatcagtacaagcttactgtgacagcatatgactgtggaaaaaagagggcgacagaagatgtactggtcaaaatcagcattaaacccacatgtacacctggatggcagggatggaataatcgcattgagtacgagcccgggaccggtgctttggctgtcttcccaaatatccatctggagacgtgtgatgaacccgtcgcatccgtgcaagccactgtagagctagagacctcgcacatcgggaaaggatgtgaccgcgacacttacagcgagaaatcactacatcgactgtgcggcgctgctgccggcacagccgaactcctcccctcaccatccgggtcactgaattggacaatggggctgcccacagataacggacatgactcagaccaagtgtttgaattcaacgggacacaggctgtgcggatacctgatggcgttgtgagtgtgtcaccaaaagaaccatttactatctcagtatggatgcggcacggccccttcggacggaaaaaggaaactatcctctgctcttccgacaaaacggacatgaataggcaccactacagtctgtacgtgcatggatgcaggttgatcttcttattccgccaagaccccagtgaagagaagaagtatagaccggctgaatttcattggaaactaaaccaggtgtgtgacgaggaatggcaccattatgtgctgaacgtagaatttccttctgtcacgctttatgttgacggaacctcccacgagccgttcagtgtgactgaagactaccccctgcatccatctaagattgagacccagctggtggtgggtgcctgctggcagggcggggacctgcacatgactcagttttttcggggcaatctggccggacttacattgcggtcgggaaagctggcagacaagaaagtgattgattgtttatacacctgcaaggaggggctggatctgcaggtgctcgaggatagcggcaggggcgtgcagattcaagcacacccttcacagctggtcctgacactcgagggggaggatttaggagaattggacaaagcaatgcaacacatttcttacctgaactccagacagttccccactcccgggatccggcggctcaagatcacttcgacaatcaaatgcttcaacgaagctacatgtatctccgtgcctcctgtagacggttacgtgatggtgcttcagcccgaagagccaaaaattagccttagcggcgtgcaccactttgctcgcgctgcttcagaatttgaatcttccgaaggagtgttcctgttcccagagctgcgcattatttctaccattacccgagaggtggaacccgaaggggacggggccgaggaccctaccgtgcaagaatctctcgtctccgaagaaatcgtacacgatctggacacctgcgaggtgacagtagagggcgaagagctgaaccacgagcaggaatctttagaggtagatatggcccggctccaacagaaagggatcgaggtgagcagttctgaactcggcatgacattcaccggtgtcgacaccatggcctcttacgaagaggtgctccatcttctgagatacagaaactggcatgccaggtctttactcgatagaaaatttaagctaatctgctctgagttgaacgggcgatacatctcaaatgagtttaaggtcgaggttaacgtgatccatactgccaaccccatggagcacgctaatcacatggcagcccagccccaatttgtgcatccggaacaccgctcctttgtcgacttatctggtcataatttagcaaatccccaccccttcgccgtggtgccctcgaccgcaacagtggtgatcgtcgtgtgcgttagctttctggtgtttatgatcattctgggcgtcttccgcatcagggcggctcataggagaacaatgagggatcaggacacaggcaaggagaatgagatggattgggatgattcagctctgacaattaccgtgaacccgatggaaacctatgaagatcagcatagctcagaagaggaagaagaagaggaggaagaggaagaatcagaagacggagaagaggaggacgatatcacatccgccgaatcagagagcagcgaggaggaggagggagagcaaggcgacccccaaaatgccacgaggcaacagcagctggaatgggacgactctaccctgtcatactag

SEQ ID NO: 9649 - DNA, 531 bp, synthetic construct
  misc_feature 1..531: note = source = /note="Description of Artificial Sequence: Synthetic coding sequence"
  source 1..531: mol_type = other DNA
atggcccggcggcactgcttcagctactggctgctggtgtgctggttggtcgtgacagtcgcagaggccctatcaactttttacctacaacagcacattaatttgcatatggacaagaaacgctacctccgactgctggagatacacaaaataatgagaaccttgccaaccgctcgatccctgcacagccccctccacctcccccgtggcgtgagatcacagggtccttcccccagtcaacggcatcccggcgttccgtctatatttttccatgagggacctgaaagcattttggggtttcagactgacttgtcatcactccagggggtcactacagtgtttcacagctctcactttattggccataccgttacattactgattggtattagccccgaggaggatagccgagaggaggcacacctacgcaaagccgaacgagaggagaagccaaaacatacagaggccaaaaaatctttgtcctttcggaagaaacagcaaaaagacttttgctttatctttcggaattag

SEQ ID NO: 9650 - DNA, 1182 bp, synthetic construct
  misc_feature 1..1182: note = source = /note="Description of Artificial Sequence: Synthetic coding sequence"
  source 1..1182: mol_type = other DNA
atgcggaccctgttcaacctgctgtggctggccctggcctgcagccccgtccatactactttgtctaagtccgatgcgaagaaggccgccagcaagaccctgttggaaaagtcacaattctctgataaacccgtgcaggataggggactcgtggtgacagatctgaaggccgagagtgtcgtgttagagcaccgcagctattgtagcgccaaagctagagacagacacttcgccggggacgtgttgggatatgtgactccctggaatagccacgggtatgatgttactaaggtttttggcagcaaattcactcaaataagccctgtttggctccagctgaagcgtagagggagagaaatgttcgaagttacaggattacacgacgtggatcagggctggatgagggctgtccggaaacacgctaagggcctacacatagtaccacgcctcctgttcgaggactggacctatgatgatttccggaacgtgttggattctgaagacgaaattgaggaattgtcaaagacagtcgtgcaggtggctaagaaccagcacttcgatggattcgtggtcgaggtctggaatcagttacttagccagaaacgagtgggattgatacatatgcttacacacctcgcggaggcccttcaccaggctaggttgttggctcttctggtcataccacctgccattactcccgggactgaccagctgggtatgttcacccacaaagaattcgagcaacttgcccctgtgcttgatggcttttccttgatgacatatgactatagcactgctcatcagccaggcccaaacgcacctctgtcctgggtcagggcttgtgtccaggtgctggatccgaaatcaaagtggcgcagcaaaattcttctggggctgaatttttacggcatggactatgccacctctaaagatgccagggaacctgtagtcggggcaaggtacattcaaactcttaaggaccaccgacctcggatggtgtgggactcccaggcgagcgaacacttttttgagtataagaaatcccgctccgggagacacgtggtgttttacccaaccctgaagtccctgcaagtcagactcgaactggcccgcgaattgggggttggagttagtatctgggagttaggccaagggttggactacttctacgacctcttgtag

SEQ ID NO: 9651 - DNA, 324 bp, synthetic construct
  misc_feature 1..324: note = source = /note="Description of Artificial Sequence: Synthetic coding sequence"
  source 1..324: mol_type = other DNA
atgctgccctgcctggccctgctgctgctgatggagctgagcgtgtgtactgtggctggcgacggcggcgaggaacagacactttccactgaagcagagacatgggaaggtgcggggccttcaattcagctccaactgcaggaggtgaagactggcaaagccagccaattttttggacttatgggaaagcgagtcggaggacgccccctaatccaacctaggcgcaaaaaggcttaccagcttgagcatacctttcaagggctgttaggtaagaggtctctcttcactgaaggaagggaagacgaggcccagggaagcgagtag

SEQ ID NO: 9652 - DNA, 1086 bp, synthetic construct
  misc_feature 1..1086: note = source = /note="Description of Artificial Sequence: Synthetic coding sequence"
  source 1..1086: mol_type = other DNA
atgggcatcatccagagcatcctggccaccagccgggactgctactccttcaagaagaaacccattcccaagaagcctaccatgttagccctagccaaaattctactgatctccacccttttctatagcctgctgagcggatcacacggcaaggagaatcaggatatcaatacaactcagaatatagcagaggtcttcaagactatggagaacaagcctatttccttggagagcgaagcgaatctcaatagcgataaagagaacattaccacatccaacttgaaagccagtcattccccccccctgaacctgcccaacaattctcatggaattacagattttagctccaatagcagcgctgaacattcactaggctcgcttaaacccacctccacaataagtacgagccctccgctgatccattcatttgtgagcaaagtgccgtggaatgccccaatcgctgacgaggacctcctgccaatctctgcacatccaaacgccacacctgccctcagttctgagaactttacatggtctctggtgaatgacaccgtgaagacaccagacaacagcagcatcacggtgtctattctgtcctcggaaccgacctctcccagcgtgactcctctcattgtggagccttcaggatggctcacgactaatagcgatagttttacaggattcaccccataccaagagaagaccactcttcaaccaactctaaagttcactaacaatagcaagctctttcccaatacctccgaccctcaaaaggagaacaggaacacagggatcgtgttcggggcaatactgggcgccatactgggtgttagcttattaactttagtgggatatcttctgtgtggcaaaaggaagactgactccttcagccaccggcgtctttacgatgacaggaacgaacctgttctgagactggataatgctcccgaaccttacgatgtgtcattcggaaacagttcatattacaaccccactttgaacgacagcgctatgccagaaagcgaggagaacgctagagatggaattcccatggacgatattcctcccttgagaacctcggtatag

SEQ ID NO: 9653 - DNA, 279 bp, synthetic construct
  misc_feature 1..279: note = source = /note="Description of Artificial Sequence: Synthetic coding sequence"
  source 1..279: mol_type = other DNA
atgcggggccccggccaccccctgctgctgggcctgctgctggtgttgggcccttcccctgagcagagggtcgaaatcgtgccacgcgaccttcggatgaaagataagttccttaagcatcttaccggcccactgtatttctctcctaaatgctccaaacacttccaccgcttatatcacaatacacgagattgtaccatcccagcttattataaaaggtgtgctcgactcctgacacgcctggcagttagccccgtttgcatggaggacaagcagtag

SEQ ID NO: 9654 - DNA, 1125 bp, synthetic construct
  misc_feature 1..1125: note = source = /note="Description of Artificial Sequence: Synthetic coding sequence"
  source 1..1125: mol_type = other DNA
tgacgggtgcggcggggccccctgcccgccgaccggccccgggccttgggcccagccagacgctgttcccggcacccacacccagcaccctttagagtttgtagcgaaggagctgcccataggctgcggcggccggaaagattaccactgccaagccgtgccctccgtccacggcccgcccatacacctatcttaggcccggcgcctcgggcgtgccccggtgctccacgagcttccgattcaccgacttgtgctgcagcagcggccactgcttggccgaggactcgggcagtggagcggaagggatgccaagtcgcagcagccgctggcgtgagaggcacgggctgcccctctagggcggaccttgaaaaggatagctggaatgatactaaggaagacgtgtttgtgcaccagacagctatcaaaaaaaacaatccccgcaaatacctcaggtcagtgggcgatggcgagaccgtagaattcgacgtagtagagggtgagaagggtgccgaagcagccaatgtcactggcccaggaggagtgccggttcaggggtctaagtatgccgcagaccgtaatcattatcgtcgctacccacgacggcgtggcccgcctcggaattaccagcagaactatcagaacagcgagagcggggagaagaacgaaggttctgagagcgccccggaaggccaggcccagcaaaggcgaccgtatcgccggagaaggttccccccctattacatgaggcggccgtatggacgccgaccgcagtattccaatcctcccgtgcagggcgaggtgatggagggcgccgataatcagggcgcaggtgaacagggccgccctgtgcgccagaatatgtatagagggtaccggcccaggttccgccggggcccccctagacagcggcaacccagagaggatggcaacgaggaggataaagagaatcagggagatgagactcagggacagcaaccacctcagcgaagataccggagaaatttcaactacagacggaggaggcccgaaaaccctaaaccccaagatgggaaagagacaaaggccgctgatccacccgctgaaaactcatctgcccctgaagctgagcagggcggagccgagtag

SEQ ID NO: 9655 - DNA, 420 bp, synthetic construct
  misc_feature 1..420: note = source = /note="Description of Artificial Sequence: Synthetic coding sequence"
  source 1..420: mol_type = other DNA
atggccctgcggatgctgtgggccggccaggccaagggcatcctggggggctggggcatcatctgtctggtgatgtctttactgctgcagcaccctggagtgtactccaagtgctattttcaggctcaggccccttgtcattacgagggtaagtatttcacactcggtgagtcctggctcagaaaggattgctttcattgtacctgtctgcatcctgtgggagtgggttgctgcgatacatctcaacacccaatagactttcccgcaggctgcgaagtacgccaggaagctggtacctgtcaattttctctggtgcagaaatccgatccccggctaccttgcaagggcggaggcccagacccagagtggggctcagccaacacaccagtccccggcgcccctgcacctcattcctcttag

SEQ ID NO: 9656 - DNA, 462 bp, synthetic construct
  misc_feature 1..462: note = source = /note="Description of Artificial Sequence: Synthetic coding sequence"
  source 1..462: mol_type = other DNA
cactactgcaaggagggctactaccgggacatgggcaagcccatcacgcaccggaaagcttgtaaagcctgcgattgccaccctgtaggcgcagcaggtaaaacgtgtaatcagacaaccggccagtgtccatgtaaggatggcgtgacaggaatcacttgcaatcgatgcgcgaaaggttaccagcaatctaggagccctattgctccctgcatcaaaatccccgtggctcctcccactacagcagcctcttctgtggaggaacccgaagctgcacgccaaccaaacacttttcaggcagaggggttgtctctgttgcctggggctgcggagaaagaaggggccaggtgttggggctatcggcgccggttgggacatagggtggcacaggccgagtgtagagggcctcggtcatgggcttgggggcgaatcacttcctccttctcatttgcatccaactag

SEQ ID NO: 9657 - DNA, 213 bp, synthetic construct
  misc_feature 1..213: note = source = /note="Description of Artificial Sequence: Synthetic coding sequence"
  source 1..213: mol_type = other DNA
atgctggtgctgttcctgctgggcaccgtgttcctgctgtgcccctactggggtgaactgcatgaccccatcaaaggacagtcgatgtaccactattccaagttatcatgcatgacatcttgcgaggatatcaattttcttggatttactaaaagggtggagttgatatgttgcgaccactccaattattgcaatctgcccgaaggtgtgtag

SEQ ID NO: 9658 - DNA, 567 bp, synthetic construct
  misc_feature 1..567: note = source = /note="Description of Artificial Sequence: Synthetic coding sequence"
  source 1..567: mol_type = other DNA
atgttccaccagatctgggccgccctgctgtacttctacggcatcatcctaaactcgatctatcagtgtccagagcattctcagctgacaactttgggagtggacggaaaggagtttccggaagtccatctgggacagtggtatttcatcgctggtgccgctcccactaaagaggagcttgccactttcgaccctgtcgacaacattgtgtttaacatggctgctgggtctgcacctatgcagcttcatctcagagctactatcaggatgaaagatgggctgtgcgtcccacggaaatggatttaccacctaacagagggatctaccgacctgcggaccgagggacgaccggacatgaagacagaactcttctcctcgtcatgtccaggtgggattatgcttaatgaaacaggccagggttaccaacgcttcctactgtacaatagatctcctcacccccccgagaaatgtgttgaagagtttaagtcactcacttcctgcttggattccaaagccttcctcctgactccccggaatcaggaagcctgcgagctaagcaacaactag

SEQ ID NO: 9659 - DNA, 2316 bp, synthetic construct
  misc_feature 1..2316: note = source = /note="Description of Artificial Sequence: Synthetic coding sequence"
  source 1..2316: mol_type = other DNA
atgggctggctgacccggatcgtgtgcctgttctggggcgtgctgctcaccgcacgggcgaactatcagaatgggaaaaacaacgtcccacggctgaagctgtcttacaaagagatgttggaatccaacaacgtgattacctttaacggtctggctaattccagcagctatcacacctttctgctcgacgaggagcgcagcagattatatgtcggcgctaaagaccatatcttttctttcgatctcgtgaatataaaagactttcagaaaattgtgtggcctgtgtcttacactcgacgggatgagtgtaaatgggccggtaaagacattctcaaggagtgcgctaactttattaaggtgcttaaagcctacaatcagacccacctgtatgcttgtggcactggtgctttccatcctatctgcacctatattgaaataggacaccaccctgaagacaatattttcaaactggaaaacagccatttcgaaaacggaaggggaaagtcaccgtatgatcctaagctgctgacagccagcttactgattgatggcgaactctattccggcacggcagctgactttatgggtcgggactttgcgattttcagaactttaggccatcatcacccaatccgcaccgagcagcacgacagtcgatggctcaacgatcccaaattcattagcgcccacttgattagcgagtccgataatcctgaggatgacaaggtgtatttcttctttcgggaaaacgccatcgacggagagcatagcggaaaggctacgcatgcccgcattggacaaatttgtaaaaacgatttcggcggtcacagaagcctggttaataagtggacaaccttcttgaaggcccgactgatttgttccgtgcccggccctaacggtatcgacactcattttgatgagctgcaggacgtgttcctcatgaacttcaaggatccaaagaaccccgtagtatacggagtttttaccacatcaagtaacatctttaaggggagtgcagtctgtatgtattctatgagtgatgtgaggagagtctttctcgggccatatgcacaccgcgacgggccaaactatcagtgggtgccttaccagggcagggtgccataccctcgacccggcacttgtccaagcaagacctttggtggattcgattctaccaaggacctgcccgacgacgtcatcacttttgcaagatctcaccccgccatgtacaatccagtttttcctatgaataatcggccaattgtgatcaagactgatgttaactatcagttcacacagatcgtcgtcgatagggtggacgctgaggacggccagtatgatgtgatgttcattggcactgacgtagggactgtgttaaaagtagtctccattcctaaggaaacatggtacgatctcgaagaagtgctgctggaagagatgaccgtgtttagagagcccaccgcaatctctgctatggaattgtcaaccaagcagcagcagctttatattggcagtactgctggtgtggcccaacttccactgcaccgttgcgacatatatggcaaagcatgtgcagagtgctgtcttgcacgtgatccttactgtgcctgggacggttcagcatgctccaggtactttccaaccgctaagaggagaactcggcggcaagacatccgcaatggcgatcctcttacacattgcagcgacctgcaccatgataaccaccacggacactcccccgaggagagaatcatctacggtgtggaaaacagtagcactttcttagaatgtagtcccaagtcccagcgagccctggtgtactggcagttccaaagaagaaatgaagaaaggaaggaggaaataagagttgacgaccatatcatcaggacggaccagggactgcttctgaggagcttacagcaaaaagattctgggaactacctttgccacgccgtggagcatgggttcatacaaaccctgcttaaggttactctcgaagttatcgatacggagcacttggaagaactgctgcacaaggacgatgacggggatggttcaaaaacaaaggagatgtctaattctatgaccccatcacagaaagtgtggtatagagatttcatgcagctgattaaccatcctaatctgaatactatggatgagttctgcgagcaggtgtggaaaagggataggaagcagcggaggcaacgaccaggccatactcctggaaatagtaacaagtggaagcatctgcaggaaaataagaaaggaagaaatcgtcgaacgcatgagttcgagagggcaccacgttccgtgtag

SEQ ID NO: 9660 - DNA, 1014 bp, synthetic construct
  misc_feature 1..1014: note = source = /note="Description of Artificial Sequence: Synthetic coding sequence"
  source 1..1014: mol_type = other DNA
atggcccggcccatgatcaaggaggcccggatggccagcctgctgctagaaaacccgtattacgggtgcagaaaacccaaagaccaggtgcgctcctcacttaagaacgtcagtgatctgttcgtgatgggtggagcactcgtgctggagtcagccgcgttacttcactggctcgaaagggagggctatggcccactggggatgactggcatttcgatgggcgggcatatggcatctctcgctgtcagtaactggcccaagccaatgcccttgatcccatgccttagctggagtactgcctctggagtgtttaccaccggggtgctttcaaagagtatcaactggcgtgaattggagaagcaatattatactcaaacagtgtatgaggaggaaatcatccatatgcttgagtactgcggtacagattctttcaagatgggtcaggaatttgttaagcatttcacctcctccgccgacaagctaaccaatctgaatcttgtctcacgaactcttaacctcgatatttcaaaccaggtggtctcacagaagccagcagattgtcataattcatctaaaacgagtgtttccgcgactagtgagggcctgctcctccaggacacttctaagatgaagcgcttcaatcagaccctgtccacaaacaagtccgggtatacttcacggaacccccagagctaccacttgctgagcaaggaacagagcaggaattctctgcgaaaggaaagtctcatctttatgaagggggttatggatgagtgtacacatgtggcaaactttagcgtgcccgtcgatccgagtctcattatcgtggtccaagccaaagaggacgcttacatacctcgaaccggtgtaaggagcctccaagaaatttggcctggatgcgagattaggtacttggaagggggacatattagcgcttatctgtttaagcaaggcctattccgccaggcaatctacgacgcctttgacagattcctgcacaaatatgccaattag

SEQ ID NO: 9661 - DNA, 462 bp, synthetic construct
  misc_feature 1..462: note = source = /note="Description of Artificial Sequence: Synthetic coding sequence"
  source 1..462: mol_type = other DNA
atgggccccgaggccctgagcagcctgctgctgctgctgctggtggccagtggcgacgctgatatgaaaggacattttgacccagccaagtgtagatacgctctgggcatgcaggaccgcactattcctgatagcgatatttccgccagttcctcatggagcgacagcacagccgcccgacatagccggctcgaaagcagcgacggggacggcgcgtggtgccctgcgggctctgtgttccccaaggaagaggaatacctgcaagtggacctgcagcgactccaccttgttgctttggtagggacacaaggccggcacgccggtggcttggggaaggagttttctcgatcctatcggctgcgatatagccgtgacggccggcggtggatgggatggaaagacaggtgggggcaggaagtaatctctgggaatgaggatccagaaggcgtggttcttaagtag

SEQ ID NO: 9662 - DNA, 345 bp, synthetic construct
  misc_feature 1..345: note = source = /note="Description of Artificial Sequence: Synthetic coding sequence"
  source 1..345: mol_type = other DNA
atggacaagagcctgctgctggagctgcccatcctgctgtgctgctttcgcgccctgagcggcagcctgagtatgcgtaacgacgctgtgatcgaaatcgtgcagtgccgaatgtgccatctgcagttccctggcgaaaaatgttctcgcggtcggggcatatgcaccgccaccacagaggaggcctgtatggtgggcagaatgtttaaacgcgacgggaatccatggctgaccttcatgggctgtctcaagaattgtgccgatgtcaaggggatccgctggtctgtctacttagtgaatttccgctgttgtcgttcacacgatctgtgcaacgaagacctatag

SEQ ID NO: 9663 - DNA, 630 bp, synthetic construct
  misc_feature 1..630: note = source = /note="Description of Artificial Sequence: Synthetic coding sequence"
  source 1..630: mol_type = other DNA
atgggccccgaggccctgagcagcctgctgctgctgctgctggtggcctctggtgatgcagatatgaaggggcactttgatccggctaagtgccggtatgcactcggcatgcaggatcggacaatacccgactctgacatctcagcatcttcaagttggtctgattctaccgccgcaaggcacagcaggctggagtccagcgacggagacggcgcctggtgtcctgctggatccgtgttccccaaagaagaggaatatctccaggtggatctccagagactccacttggtggccctggtcgggacacagggacggcacgctggaggactgggaaaggagttcagccgaagctatcgacttagatactctagggacggcaggcggtggatgggctggaaggacaggtggggccaggaagtgatctctggcaatgaggaccccgaaggagtggtcttgaaagaccttggacccccaatggtagcccgactcgtacgcttttatccacgggcagatagagtcatgtctgtatgcctgagggttgaattatatggttgcctgtggcgggatggattgctgtcatatactgcccctgtggggcaaacaatgtatctgtctgaggctgtatactag

SEQ ID NO: 9664 - DNA, 639 bp, synthetic construct
  misc_feature 1..639: note = source = /note="Description of Artificial Sequence: Synthetic coding sequence"
  source 1..639: mol_type = other DNA
gacttcggctactgcccccgggtgtactgcgagaaccagcccatgctgccaataggggtcttagtaatggtgggatttaccgtgggaaaggtgcctgtgccagatatcaggacgtgtcatttctgtctcgtggaagacccttctgttggctgtattagcggtagtgagaagtgcaccattagctctagctcactgtgcatggttatcacaatctactatgacgtgaaagtgagattcattgtacgcggatgcggccagtacatttcctatcgctgtcaggagaagcggaacacgtatttcgctgagtactggtatcaagcccagtgctgccaatacgactattgcaactcatggtccagccctcagctgcagagcagcctgcccgaacctcacgacagacccttggcattaccactctcagacagccagatacagtggttttaccaggcactgaatctgagcctaccactgcccaacttccatgcaggcactgagcccgatggcctggatcctatggtgactctgtcgctgaatctgggcctgtcgttcgcagaactccgtcgaatgtacctgttcctgaatagcagcggcctgcttgtgctgccccaggccggtctgctcaccccacatccctcttag

SEQ ID NO: 9665 - DNA, 240 bp, synthetic construct
  misc_feature 1..240: note = source = /note="Description of Artificial Sequence: Synthetic coding sequence"
  source 1..240: mol_type = other DNA
atgaagctgcacagcctgatcagcgtgctgctgctgttcgtgacccttattccaaagggaaaaacaggcgttatccctgggcaaaaacagtgcattgcactgaaaggggtatgtagggataagctttgttctacgctcgatgatacaatcggcatatgtaacgaagggaaaaagtgctgccgccggtggtggattctggagccctaccctacccctgtgccaaagggaaagtccccctag

SEQ ID NO: 9666 - DNA, 1620 bp, synthetic construct
  misc_feature 1..1620: note = source = /note="Description of Artificial Sequence: Synthetic coding sequence"
  source 1..1620: mol_type = other DNA
atgagcgagccccaggagaagaagctgagcgagaacaccgacttcctagcccccggtgttagctcttttacagacagcaaccaacaggagtccattaccaaaagagaggaaaatcaggaacagcccaggaattattctcatcatcagctgaatcggtcaagcaaacattcacagggcctacgagaccagggtaaccaggagcaggaccctaatatctccaacggtgaggaggaagaagagaaagagccaggcgaggtcggtactcacaatgataaccaggagcgtaagacggaactgccccgcgagcatgcaaactcgaagcaagaggaggataacacacagtctgatgacatcctggaggaatcagatcagcccacccaggtaagcaagatgcaggaagatgaattcgatcagggcaaccaggagcaggaggacaacagcaacgccgaaatggaggaggaaaacgcaagtaacgttaataaacatattcaggagaccgaatggcagtctcaggagggaaaaactgggttggaggctatctcgaatcacaaagaaactgaagagaaaaccgtctccgaagccttgttgatggaacccactgacgatggcaacactacacctcgaaatcacggggtggacgatgacggtgatgatgacggcgacgacggcgggacggacggcccccgacattccgccagcgatgactacttcatcccatcacaggcatttctggaagctgagcgggcccagagtatcgcctaccatctgaagattgaagagcagagagaaaaagtgcacgagaacgagaacattggcaccacggaacccggcgagcatcaggaagcgaagaaggctgagaattcttcgaacgaagaagagacttcctctgaagggaacatgcgtgtgcatgcagtcgattcctgcatgagtttccagtgcaagcggggccacatttgtaaggctgaccaacagggcaaaccccattgtgtttgccaagatcccgtaacttgccccccaaccaagccactcgatcaggtgtgcggtacggacaaccagacatatgccagtagctgccacctgtttgccacgaagtgtagactagaaggaaccaaaaaaggccatcagctgcagctggactacttcggggcttgtaaatctataccgacctgcactgactttgaggttatccagtttcctctacgcatgcgagattggctcaaaaatatcctgatgcagttgtacgaagctaatagtgaacatgcaggttacctgaacgagaaacagaggaacaaggttaagaagatctatctggatgaaaaacgcctgctggccggagaccatcctatagacctcctgttgcgtgatttcaagaaaaactaccacatgtacgtataccctgtccactggcagtttagcgaactggatcagcatcccatggatcgagttctgacccactcagagttggctccactgcgcgcctcattggttcccatggagcattgcatcactcgtttcttcgaggaatgtgatccgaacaaagacaaacatatcactttgaaggagtgggggcactgtttcggaataaaggaggaggacatagatgaaaatctgctcttctag

SEQ ID NO: 9667 - DNA, 2535 bp, synthetic construct
  misc_feature 1..2535: note = source = /note="Description of Artificial Sequence: Synthetic coding sequence"
  source 1..2535: mol_type = other DNA
atgggccccggcgcccccttcgcccgggtgggctggcccctgcccctcttggtggtaatggcggcgggcgtagctccagtgtgggcctctcactctccccacttgccccgcccgcattcacgcgtcccgccacatcctagttcagaaaggcgggctgtgtacatcggagccctatttcctatgtcaggaggttggccagggggccaggcatgtcaacctgccgtagaaatggcccttgaagatgtgaacagtagacgcgacatcctgcctgattacgagctgaaactgatccaccacgacagtaaatgcgaccccgggcaggcgactaagtacctgtacgagctcctgtacaatgacccaattaagattatcctcatgcccggctgttcttcagtgagcaccctggttgccgaggcagcaagaatgtggaatctgatcgtgctgtcctacggcagttcctcccctgcacttagcaacaggcagaggttcccaacattttttcgaactcatccctccgccaccctgcacaatcctacccgcgtgaagttgttcgaaaagtgggggtggaaaaagatagccaccatccagcaaactaccgaggtcttcacttcgacactggacgacttagaggagcgtgttaaagaagccgggattgagataactttccgccagtcctttttctctgacccagcagttccagtgaagaacctcaaaaggcaagatgctcggattattgtcggcctcttctacgaaaccgaggcccgcaaggtgttttgtgaggtgtataaggaaagactgttcggtaagaagtatgtctggtttttgatcgggtggtatgcagataattggttcaagatatatgatccaagtataaactgtaccgtggacgagatgactgaagccgtagagggccacattacgaccgagattgtcatgctcaaccctgccaacacaaggtcaattagtaatatgacatcccaggagttcgtcgagaagctcactaagaggctgaagaggcaccctgaagagaccggagggtttcaggaagcccccctcgcctatgacgctatctgggctcttgccttagccttaaacaagactagtgggggcggcggacgtagtggggttcgcctggaagattttaattacaataatcagactatcacggatcagatttacagggccatgaattcaagctcctttgaaggtgttagcggccacgttgtcttcgatgccagcggttccaggatggcttggaccctgatcgaacagctccagggcggaagctacaagaagataggatattacgactcaaccaaagacgatctgagctggagcaaaaccgacaagtggatcggcggcagtccacctgcagaccagaccctggtgatcaagactttcagatttctctctcagaagttgttcatctctgtgagtgtactcagctcccttggcatagtgctggctgttgtttgcctgtccttcaatatctacaattcgcacgtccggtacatccaaaattcccagcccaacttgaacaacctgactgcggtgggctgttcactggcacttgctgctgtgttcccgctcgggctcgacggctatcatattggtcggaaccagtttcccttcgtttgccaggcgcggctgtggctccttggcttaggattctccctgggctacggcagcatgttcaccaaaatttggtgggtgcatactgtgttcaccaagaaggaagaaaaaaaagaatggagaaaaacactggaaccctggaagctctacgctacagtggggctgttagtgggcatggacgtcctgacgctcgccatatggcagatcgttgatccattgcataggactattgaaacatttgctaaagaggagccgaaggaggatattgatgtgtcgatcctcccacagctggaacattgctcctccaggaaaatgaacacatggctgggaatcttctatgggtacaagggtttgttgctgctgctcggaatcttcctagcctatgagactaagagtgtctccaccgagaaaatcaatgatcaccgagcagtgggcatggcaatttacaacgtagctgtgctatgtttgatcacagcgcccgtgaccatgattttaagtagccaacaggatgccgcctttgctttcgccagtttggctatcgtgttctcatcttacatcacgctggttgtcctgtttgtgccgaaaatgcgaaggttgatcacaaggggagagtggcaaagcgaagctcaagacaccatgaagacaggttcaagcactaataataacgaggaggagaagagccggttgctggagaaggagaatagggaactagagaagattattgcggagaaagaggaacgcgtgtccgagcttcggcatcagctgcagtctagacagcaacttaggtctagaaggcaccctcctacacctcccgagccaagtgggggattgccacgggggcccccagagcccccggatcgactgtcatgcgacggctctcgcgttcacctcctgtataagtag

SEQ ID NO: 9668 - DNA, 993 bp, synthetic construct
  misc_feature 1..993: note = source = /note="Description of Artificial Sequence: Synthetic coding sequence"
  source 1..993: mol_type = other DNA
atgcagctgttcctgctgctgtgcctggtgctgctgagcccccagggggcttctctgcatagacaccacccccgcgagatgaagaaaagagtggaagacctacacgtcggcgcgactgttgctccctcaagccggcgcgattttaccttcgatctgctgggaaacgcactgtttactgatcttgttgtggatttacaggacacttttgtgtccgctatgaaaacactgtatctggccgacacattccctactaattttcgagattccgcaggagctatgaaacaaatcaatgactacgtggctaaacagacaaaagggaagattgtggacctcctcaagaatctcgatagcaacgccgttgtcatcatggttaattacattttttttaaagcaaaatgggaaaccagctttaaccacaaagggacccaggagcaggatttttatgtcacgagcgagacagtcgtcagagtgcccatgatgtccagagaggatcagtatcattatctgctagacagaaacctcagctgtcgcgtcgtgggcgtgccctaccagggcaatgcaaccgccctcttcatcctgccaagcgaaggaaagatgcaacaagtcgagaatggtctgagcgaaaagacactccggaagtggcttaaaatgtttaaaaagcggcagctagagctataccttccaaaattcagcatagagggaagctaccagcttgagaaagtactcccgtctctggggatcagcaacgtgttcaccagccatgccgacctatcaggtatctccaaccactctaacatccaggtcagcgagatggttcacaaggccgtggtggaggttgatgagtccggcacccgcgcggccgccgctactggcaccatctttaccttcagatccgctcggctcaacagccagagactggtcttcaacagaccattcttgatgttcattgttgataataatattctctttctggggaaagttaatcggccatag

SEQ ID NO: 9669 - DNA, 2676 bp, synthetic construct
  misc_feature 1..2676: note = source = /note="Description of Artificial Sequence: Synthetic coding sequence"
  source 1..2676: mol_type = other DNA
atgctgcccaccgaggtgccccagagccaccccggccccagcgccctcctgcttcttcagcttctgctacctccaacaagcgccttttttccaaatatctggtccctgctcgcagcccctgggagcataactcatcaagacctgacagaagaagctgcgctgaatgtgaccctgcaactgttcctcgagcaaccaccccccggcaggccgccgctacgtctggaggacttcctcggcagaaccctgctcgctgacgaccttttcgccgcctactttggacctggttcgtcaaggcgtttcagagcagctctaggagaggttagccgggcgaacgctgcgcaggattttctccccacgagccgcaatgacccggacctccatttcgacgcagagcggctggggcaggggcgggcccgactggtgggagccctccgggaaactgtggtggctgcacgcgctctggaccatacactcgctcggcagcggcttggagcagccctgcatgccctgcaggatttttacagtcatagcaattgggtggaactcggtgaacaacagccgcacccacatctcctctggccacggcaggagcttcagaacctggctcaggtggccgatccgacatgctccgactgtgaggagctgtcttgtccacggaactggttagggtttaccctgctgacttccggctattttggtactcatcccccaaaacctcctggcaaatgtagccatggcgggcatttcgaccgttcttcttcccagcccccacggggtgggattaataaagatagcacgagtcccggattcagtccccatcatatgcttcacttgcaggccgctaaactggccctgctcgccagtattcaggccttttcccttcttcgttctcgccttggcgacagagacttttcccggctgctggacataacgcctgcctcgtctctgtcctttgtactggacactacggggtctatgggtgaggagattaatgcagccaaaatccaggcccgccatttggtggagcaaaggcggggctccccaatggagccagtgcactatgtgctcgtgccgtttcacgatccagggtttggacctgtctttactacctcagatcccgattctttttggcagcagttgaacgaaatacatgcattaggcggtggggatgaacccgaaatgtgcctgtccgccttacagctggccctactacatacacctcccctctctgacattttcgtgtttaccgacgcaagtccaaaggacgccttcctgacgaatcaggtcgagtccctcacccaggaaaggagatgtagagtgacctttttagtgactgaagacacttcccgcgttcaggggcgtgctagacgcgaaattctctcaccactgcggtttgaaccatataaagctgtggctctcgcaagcgggggtgaagttatttttacgaaagatcaacatatcagagatgtggccgcaatagtcggcgagtccatggccgctttggtcactctgcccctagatcctccggtggtcgtgcctggacagccactggtgttttctgtggacggactgcttcagaagatcaccgtccgtattcacggggatattagctctttctggataaagaaccccgcgggcgtgtctcagggccaagaggaaggcggagggcctttagggcatacccgcaggtttggtcagttctggatggtcacgatggacgacccccctcagacaggaacctgggagatccaggttacagcggaggatacccctggcgtgcgagtacaagcacagaccagtttagacttcctgttccattttggaatacccatggaggacggaccacatccgggactatatcccttgacacagcctgttgccggtcttcagactcagctgctcgttgaagtgaccgggctcggctccagggcaaaccctggggatccccagccacatttttcccatgtgatcctgaggggggtcccagagggtgctgagctgggtcaggtgccgctcgagccagtgggacctcccgaaaggggtctccttgccgctagtttgtcaccgactcttctcagcacccctaggcccttttctctggagctgattggccaggacgccgccggccggcggcttcatagggcagccccgcagccatcgactgtagtcccagtgctgctggagctgagcggaccaagcgggtttttagcacccggatctaaagtccccttgagtcttcgtatcgcctctttctccggcccccaggatctggacctgcgaacgttcgtgaacccttccttttccctcacaagcaacctgtcccgtgcccatcttgaactaaacgagtccgcatggggaaggctgtggctggaagtgccagactcagctgctcccgactctgtggtaatggtgactgttacagccggcgggcgtgaggccaatcccgtgccccccacccacgctttcctgcggctcctcgtctctgcccctgctccccaggacaggcatacaactcctaccggttcttccgatcctatcctgaccactgctactccagcttttagcccctttacgctcgtgacccaaggcagggcgggcgccggcctggccgctggtagcccttggtgggggacagtgggaggagtgctcctgctgctgggcttggcaagctggtag

SEQ ID NO: 9670 - DNA, 708 bp, synthetic construct
  misc_feature 1..708: note = source = /note="Description of Artificial Sequence: Synthetic coding sequence"
  source 1..708: mol_type = other DNA
atgaagtacgtgttctacctgggcgtgctggccggcaccttcttctttgccgactcctctgtgcagaaagaggaccccgccccttatctggtgtatctcaagagccattttaatccatgcgtcggtgtcctcatcaagcccagttgggtgctggccccggcccactgttatctccctaatctcaaagtgatgctgggaaactttaaatcacgcgtccgcgatggcaccgagcaaaccatcaatcctattcagatcgtgagatactggaactactctcacagcgccccccaggacgatttgatgctgatcaaactcgctaaacccgcgatgctgaatcctaaggtgcaacctttgacgttggccaccacaaatgtgaggcctggcactgtgtgcctgctgtcagggctggactggagccaagagaacagcggacgacatcccgaccttcgccagaacctggaggctccggttatgtctgaccgcgaatgccagaagactgaacagggtaaaagtcacaggaacagcctctgcgtcaagttcgtaaaagttttttctaggattttcggcgaggtagctgtggctacagtaatatgcaaggataagctccagggaattgaagttggccacttcatgggaggggacgtgggcatttatacaaacgtgtataaatacgtgagctggatcgaaaacacagccaaggataagtag

SEQ ID NO: 9671 - DNA, 1386 bp, synthetic construct
  misc_feature 1..1386: note = source = /note="Description of Artificial Sequence: Synthetic coding sequence"
  source 1..1386: mol_type = other DNA
atgagcctggacatccagagcctggacatccagtgcgaggagctgagtgacgcgagatgggccgagctgctgcccctgctgcagcaatgccaggtcgtacgtctcgatgactgtggcctgactgaagctcggtgtaaggatatatcatccgcccttcgggtgaacccagctcttgccgagcttaacctgaggagcaatgagttgggcgacgtgggggtccactgcgtcttgcaggggctgcaaactccctcctgcaaaattcagaaactgagcctgcagaattgctgtctaacaggtgcgggctgtggggtgttatcctctactctgcgtacattacccaccctacaagagctgcacttatcagacaacctattgggtgacgctgggcttcagctgctatgtgaaggcctgctggacccccaatgtcggctcgaaaagttgcagctggagtactgcagcctgagcgcagccagctgcgaaccccttgcctctgtgctgagggcaaagccggattttaaggagctgacggtgagcaacaacgacatcaatgaagccggcgtaagagtgctgtgccaagggctcaaagattcaccatgccagctcgaagctctgaagctggaaagctgcggcgtgaccagtgataattgccgggacctgtgcggaattgttgctagcaaggcctctttacgagagctggcccttggatctaacaaactcggcgatgtgggtatggcggagctatgcccgggtctgttacacccctcttcaaggctgcgtaccctgtggatctgggaatgtggcatcactgctaagggctgtggcgacctgtgtagagtgctgcgagctaaggagtccctaaaggagctctctcttgctggcaacgaacttggggacgagggggctcgattgctctgcgagacactgctagaacccggttgtcagctcgagtcactttgggtgaagtcttgttccttcacagctgcatgttgttcacatttcagctccgtcctcgcccagaaccgcttcctgctggagctgcagattagcaataaccgccttgaagacgccggagtccgagaactatgccagggccttggacagccaggctcagtgctgcgagtgctatggctggctgactgcgacgtaagcgactcatcctgctcaagtctcgcagcgacgctgttggctaaccacagcttgcgcgaactcgatctatcaaataattgcctcggggacgccggcattttgcagctcgttgaaagtgtgagacagcctggatgtttgctggaacagctggtgctgtatgacatatactggagcgaagaaatggaagacagattgcaggcactggagaaagacaagccctctcttagagttatttcctag

SEQ ID NO: 9672 - DNA, 2676 bp, synthetic construct
  misc_feature 1..2676: note = source = /note="Description of Artificial Sequence: Synthetic coding sequence"
  source 1..2676: mol_type = other DNA
atgctgcccaccgaggtgccccagagccaccccggccccagcgccctgctgctcttacagctcctgcttccccctaccagcgccttctttcctaatatctggagcctcctggccgccccgggctccatcacgcaccaagatttgaccgaggaggccgctttaaacgtgactctgcaactatttctggagcaaccaccacccggcaggccacctctgagacttgaggattttttggggaggacgcttttagccgatgacctgtttgccgcttatttcggacccggttcatccagacggtttcgagccgcgctcggagaagtatcacgcgccaatgctgctcaagactttctgccaacaagcagaaatgaccctgatctgcattttgatgccgagcgtctcggccagggacgcgctcgcctggtcggagctctgcgtgaaactgttgtcgccgcgagagctctggaccatactcttgcgcggcagagacttggcgccgcgttacatgcactgcaggacttttactcccactccaattgggtcgagctcggggaacagcagccacacccccacttattgtggcctcgccaggaactgcaaaatctcgcgcaggtcgctgaccccacttgttctgattgtgaggagctctcgtgtcctcgcaattggctgggcttcactttgctgacttcaggctatttcggaacccaccccccaaagccaccagggaagtgcagtcatggcggacacttcgaccggagttcctcccagccccctcgaggtggtatcaataaggattcaacaagtccgggtttttcaccccatcatatgcttcacctccaggcagccaaacttgcattgctggcatccatccaggcattctccctcctcagatccagattaggcgacagagatttctcccgccttctcgatatcactcctgcctcctccctgtcattcgtcttggatacaacgggctccatgggagaggagatcaacgcggcaaagattcaagccaggcaccttgtggaacagcggagaggctcccctatggaaccagtgcactacgtgctggtccccttccacgacccgggtttcgggcccgtgttcactacgagcgacccagacagcttttggcaacagctgaatgaaatccacgctctgggcggcggggatgaaccagaaatgtgcctgtccgctcttcaattggccttgttacacacccctcccctcagcgacattttcgtcttcaccgacgcttcccctaaagatgcctttctgacaaatcaagtggagtccctgacccaagagcgacggtgccgtgttactttcctagtcacggaggacacatcccgagtccaaggacgcgcaaggagagagattctcagccctctccgctttgagccttataaggcagtggccctggcctccgggggggaagttatcttcacaaaggatcagcatatccgagacgtggccgcaatcgtgggggaaagtatggcagcactggtcactctgcccctggatccacccgttgtggtaccagggcaacctttggtcttttccgtggatggcctcttgcagaagatcacggtcagaattcacggcgacattagctcattctggatcaaaaatccagccggagttagccaaggacaggaggagggaggaggccccttggggcataccaggcgcttcggacagttctggatggtaacgatggatgaccctccccagacaggtacttgggagatacaggtgacagctgaggatactcctggcgttagggtgcaggcacagacaagtctggattttctttttcactttgggatccctatggaggacggcccacaccccggtctctatccactgacccagcccgtggctggtctccagacgcagctgttagttgaagtgactggattgggctccagggccaaccccggcgatcctcagccacatttctcgcatgtgatactccgtggagtgcccgaaggggcagagctgggccaggtgcctctcgagccagtcggacccccagaacgaggtctgcttgcagcctcactgtccccgacccttctgtccacaccaagaccctttagtctggagctcattgggcaggacgcagcaggaagaagactccatcgtgccgcccctcagcctagcacagtcgtgcctgttcttttggagctcagtggcccctccgggtttctcgcacctggttctaaagtccctttgtctctgagaattgcttccttttccggacctcaggatctggatcttaggacctttgtgaatcctagtttctcgctgacgtcgaatctgtctcgggctcacttagagctcaatgagagtgcttggggcagattgtggcttgaggttcccgactccgcagctcccgactctgtggtcatggtcacagtgaccgcggggggcagggaggccaatccagtccccccaacccacgcctttctgcggctcctcgtcagcgcccctgctccccaggaccggcatacaacacccacaggctcctctgatccaatccttaccaccgcaacccctgcgttcagccccttcaccctggtcactcagggccgcgccggagcaggcttagcagccggctccccttggtggggcaccgttggaggagtgttgctcttgctgggcttggcaagttggtag

SEQ ID NO: 9673 - DNA, 501 bp, synthetic construct
  misc_feature 1..501: note = source = /note="Description of Artificial Sequence: Synthetic coding sequence"
  source 1..501: mol_type = other DNA
atgggccccgaggccctgagcagcctgctgctgctgctgctggtggcatcaggagacgccgacatgaagggacactttgatccagctaagtgtcgttacgcgctgggcatgcaggacaggaccatcccggattccgacataagtgcttcctcctcttggagtgattcgacagctgccaggcactcaagacttgagagcagcgacggggacggcgcatggtgccccgcgggatctgtatttcccaaggaggaggagtatctccaggtggatctgcagcggctgcatctcgtggcactggtgggcactcaaggacgccatgccggtggactgggcaaggagttttcgcggagttaccgactgcggtactctagggatggccgccgctggatggggtggaaagatcggtgggggcaggaggtaatcagcggtaacgaggatccagaaggcgtcgtgcttaaggacctgggccccccaatggttgccagactggtccgcttttag

SEQ ID NO: 9674 - DNA, 420 bp, synthetic construct
  misc_feature 1..420: note = source = /note="Description of Artificial Sequence: Synthetic coding sequence"
  source 1..420: mol_type = other DNA
atgcaggccgcctgctggtacgtgctgttcctgctgcagcccaccgtataccttgtgacttgcgctaacttaacaaacggaggcaaatctgagctgctgaagagcggctcctcgaagagtaccctcaaacacatatggacagaaagttccaaggatctctctatctcccggctgctgtcccagaccttcagggggaaggagaacgacactgacctggatcttaggtacgatacccctgagccctactccgagcaagatctttgggattggctgaggaacagtaccgatctgcaggagccccggcctcgcgcaaaacggcgacccatcgttaaaaccggaaaattcaagaagatgttcggatggggagactttcacagcaatatcaagactgtcaaactcaaccttctgattactgggtag

SEQ ID NO: 9675 - DNA, 2412 bp, synthetic construct
  misc_feature 1..2412: note = source = /note="Description of Artificial Sequence: Synthetic coding sequence"
  source 1..2412: mol_type = other DNA
atggccgccgccggcctggtggccgtggccgccgccgccgagtactcaggcaccgtcgcgagcggagggaacctcccaggggtccattgtggccccagctctggtgccggtcccggcttcggccccggaagctggtctcgctcccttgaccgtgccctggaggaggctgccgtgactggagtgctgagcttgtcaggtcgtaaactccgggagtttcccaggggggctgcaaaccatgatttgaccgacactaccagggctgatttatcaagaaataggctctcagagatccccattgaggcttgccactttgtgagcttggaaaatctcaatctgtatcagaattgcatacgctatatcccagaagccattttgaacctccaggcacttaccttccttaacattagccgcaaccagctgtcaacactgccagtgcacctgtgtaaccttcctctgaaggtgcttattgcttcaaacaacaagctcgtgtcactgcctgaggagatcgggcaccttcgccacctcatggaactggatgtgagttgcaatgagattcagaccattccttcccaaattggcaatctggaagcgctacgtgatctcaatgtccggagaaaccacctcgttcaccttccagaagaacttgcagagcttcctctaatccgccttgacttttcatgtaacaagattacgacaatccccgtgtgttataggaacctaaggcatctgcagactatcaccctggacaacaaccccctgcaatctcctcctgcgcagatctgcataaaaggtaaggtgcacatcttcaaatacctgaacatacaagcctgtaaaatcgcaccagacttgcctgactacgaccgcagacccctgggcttcggatcctgtcatgaagaactgtattctagcagaccctacggggccctggactcaggatttaattcggtggactccggagacaagcgctggtctggaaatgagccaactgacgaatttagcgatttgcctttgcgggtcgctgaaataactaaggagcagcggcttcggagagaatcccagtaccaggaaaataggggaagcctagtcgtaactaacggcggggttgagcacgatctggaccagatagactatatcgacagctgcaccgcggaagaggaagaggctgaagtgcgccagcccaaagggcccgatcctgactctctctcctcccagtttatggcctacatcgagcagaggcgcatttcccatgagggaagccctgtgaagcctgtggccatcagagagttccagaagactgaggacatgcgcagatacctgcaccagaatagggtgcccgcggagccctcatccctgctgtctctctccgcaagccataaccagctatcccacaccgatctggagctgcatcaacggagggagcagcttgtagaacggacgaggcgcgaagcccagttggcagctttgcagtacgaggaggagaaaataaggacaaagcaaatacagagagatgctgtgctggatttcgtgaaacagaaagcctcacagtcacctcagaaacagcaccccctgttagatggagtggacggtgaatgcccattccctagcaggcggtcgcaacataccgacgactccgctctgtgtatgtctctgtccggccttaaccaggttgggtgcgcggcaacactacctcattctagtgcatttacccctctgaagtccgatgacagacccaatgctctcctctcttccccagccaccgagactgttcaccactcgcctgcgtactcctttcctgccgctatccagcgcaaccagccccagcggccagagtcgttcctatttagagccggagtccgggctgagacgaataagggccatgcatcaccactgccaccttccgcagcacccacgaccgattcgacagattcaatcaccgggcagaattccaggcagcgggaggaggagcttgagcttatcgaccagcttcggaaacacatagaatatcgattgaaggtaagcctgccctgcgatttaggcgcagctttaacagatggagtagtgttgtgccatctagccaatcatgtccgacctaggagcgtgccaagcattcatgtgccaagccccgcagttcctaagctgactatggccaaatgcagaaggaatgtggaaaatttcctggaagcctgtcggaaaattggcgtgccccaggacaacttgtgcagtcctagcgatatactccaactaaacctgtcagtgaaacgaaccgtagagacgctcctatctctgggcgcacactctgaggagtcaagctttgtgtgtttgagtctacagttactgggattcgttgcattttattgcactgtgatgttgaccctgtgcgtgctttactactggctgtttcctgcacgctag

SEQ ID NO: 9676 - DNA, 633 bp, synthetic construct
  misc_feature 1..633: note = source = /note="Description of Artificial Sequence: Synthetic coding sequence"
  source 1..633: mol_type = other DNA
atgtacaaggcccggccccccgccggcagcggcggccccggcgccgagccaccagcaatggccgcaccccgagggcgggctgcgccatggacaaccgctctcctgctgcttctggccagccaggttctctcccctggatcttgcgcggacgaggaggaagtacctgaagaatgggtcctacttcacgtggtccaaggtcagatcggcgccgggaattacagctatttaagacttaaccacgagggcaagatcgtcctgagaatgagaagcctcaagggcgacgcagacctctatgtgtccgctagcagcctgcatcccagcttcgatgactatgaactccagtctgcaacatgcggccccgatgcagtctcaataccagcgcacttccgccgccccgtgggtatcggagtgtacggacacccaagccacctagaaagcgaattcgagatgaaagtgtattacgatgggaccgtcgaacagcatccttttggcgaggcggcctaccccgctgacggtgctgatgctggccaaaagcatgctggggccccagaggacgcctctcaggaagaggagagcgtgttatggaccatcctcatcagtatcttaaagctcgttctggaaatcttgttctag

SEQ ID NO: 9677 - DNA, 486 bp, synthetic construct
  misc_feature 1..486: note = source = /note="Description of Artificial Sequence: Synthetic coding sequence"
  source 1..486: mol_type = other DNA
tgatgccccaccgagatcatcgccttcggcgaccggctggaggagttccgttccatcaatacagaggtcgtggcttgcagtgtggactcccaatttacacacctggcatggattaatacgccacggcgccagggcggcctcggtcccatccgaatccctcttctgtccgatctgacccaccagatatccaaagactacggggtgtacctggaagactcgggccacaccctacgcggtctgtttatcatcgacgacaaggggattttgcgccagattactctgaatgatcttcctgtgggtagatccgttgacgaaacgctgaggctagtccaggcttttcagtataccgacaaacacggcgaggtgtgtcccgctggctggaaaccgggttcagagacaatcaaaccagaagataccatgaaggcttggtggccacgagagagctacaatcctcggtcttcctggaaggcagaggtgtttcgatag

SEQ ID NO: 9678 - DNA, 2886 bp, synthetic construct
  misc_feature 1..2886: note = source = /note="Description of Artificial Sequence: Synthetic coding sequence"
  source 1..2886: mol_type = other DNA
atgctgctgctgctgctgctggcccccctgttcctgcggccccccggtgcagggggagcgcagactccgaacgcaaccagtgaaggatgtcagatcatccatccaccttgggaaggcggcatacggtatcgcggtctgactcgcgaccaggtcaaggccataaatttccttcctgtggattatgaaattgaatacgtgtgccgcggggagcgggaagtcgtggggcccaaagtccggaaatgtctcgccaatggcagctggaccgatatggatactccttcacggtgtgtgaggatttgctccaaatcgtacttgaccctggaaaacgggaaagtttttctcaccggcggcgacctacccgccctggacggggcccgcgttgattttaggtgcgatccggacttccatctggttggtagcagtcgaagtatctgtagccagggccagtggagcacgcctaaaccccactgccaggtgaacagaactccgcactctgagcggagggcagtttatattggcgccctgttccccatgtcgggtggctggcctgggggtcaagcctgtcaaccagccgtggagatggccttggaagacgtcaactcccgcagggacatcctgcctgactatgaactgaaactgatccatcatgacagtaagtgtgaccctggacaggcgacgaagtatctttacgagttactatacaatgatccaatcaagatcatattgatgcccggatgttcttcagtttcaactcttgtcgctgaagctgctcggatgtggaacctgatagtgcttagctatggctcctcgagccccgctctctctaacagacagaggtttcctaccttttttcggacccacccaagcgcaactctgcataatccgactcgggtgaagctctttgagaagtggggctggaagaaaattgctactatacaacaaacaactgaagtctttacatctaccctggatgatttggaggaacgtgtgaaggaagccggaatcgagatcacctttagacagagcttctttagcgatccggctgtgcctgtgaagaacctgaaaagacaagacgctcgcatcattgtggggctgttctatgagaccgaagccagaaaggtcttttgtgaagtttacaaggagagactgtttggtaagaagtatgtatggtttctcatcgggtggtatgctgacaactggttcaagatatatgaccccagtatcaactgcactgtcgacgagatgactgaggccgtggagggccacattaccaccgagattgtgatgctgaatcccgctaatacccgaagcatctctaatatgactagccaggagtttgtggagaagctgaccaagcggttgaagcggcatcccgaagaaaccggaggtttccaggaggcgccccttgcctatgacgcaatctgggctctggctctggctctcaataagaccagtggcggcgggggccgctccggtgtccgcctagaagactttaattacaacaaccagacaattaccgatcagatttacagagcaatgaatagctcaagttttgagggtgtttcagggcacgtggtattcgatgcctcgggaagcagaatggcctggacattaatcgagcagctgcaaggcggaagttacaaaaagatcggatattacgacagcaccaaagatgatctcagctggagtaaaaccgataaatggatcggtggatccccaccggcagaccagacgctggtcattaaaacatttcgttttcttagccaaaaactgttcatctcagtgagcgtgcttagcagtctcggtattgtgctcgccgtggtttgtctcagcttcaacatttataacagtcacgtgaggtacatccagaattctcagccgaacctcaataatctgacggcggtgggctgcagtctcgccttggccgctgtgtttcccctgggcttggatggctatcatattggaaggaaccaattcccattcgtttgtcaagcccgcctttggctgctaggccttgggttctcattgggctacgggtctatgttcacaaaaatatggtgggttcacaccgttttcacaaagaaggaagagaaaaaggagtggcggaagactctggaaccttggaagctgtacgccacagttggcttgctcgtcggtatggatgttctgactctggctatttggcagatcgtggatccactgcatagaacaatcgagacatttgcaaaagaagagccaaaagaggatattgatgtgtccatactcccccagctggaacattgtagttcccggaaaatgaacacctggctgggaattttttacggctacaaaggtttgcttctcctattgggtatctttctcgcgtacgagacgaaaagtgtttcaacagagaagataaacgatcaccgcgctgtcgggatggcaatttacaatgtggcagtgctttgcttgattaccgcccccgttacaatgatcctctctagtcagcaggatgcggcgtttgcgtttgcctcgttggcaatagtgttctccagctacattacattggtggtgttattcgttccgaaaatgagacggttaattacccgcggcgaatggcagagcgaagcccaggacaccatgaagacaggtagtagtaccaataacaatgaggaagagaaaagtagattgttagaaaaagagaatcgggagctggaaaagatcatcgctgaaaaggaggagcgagtgagcgaacttagacaccaacttcaaagcagacagcagcttagatcccgaaggcacccacctactccacctgagccgagtggtggcctacccagaggtcctccagagcctccggaccgtctgtcctgtgacggcagccgcgtccacttgctttataagtag

SEQ ID NO: 9679 - DNA, 2853 bp, synthetic construct
  misc_feature 1..2853: note = source = /note="Description of Artificial Sequence: Synthetic coding sequence"
  source 1..2853: mol_type = other DNA
atgacctggcggatgggcccccggttcaccatgctgctggccatgtggctggtatgtgggtctgagccccatccacacgcaactatcaggggcagtcatggaggccgcaaggtgccattggtctcccctgacagttctagacccgcgaggtttttacgacacaccggacgctcccggggtatcgagcgctccacactggaggagcctaatctgcagcccctgcaaaggcgacgtagtgtgccagtgctacgactcgcccggccaaccgagccacctgcccgcagtgacataaatggtgccgccgttaggccggagcagcggcccgccgcccgcgggtcgccacgggagatgattagggatgaggggagcagcgccagatctcggatgttgaggttcccctccggctcctcctccccaaacattctggcctcattcgctggcaagaacagggtctgggtgatttccgcacctcacgcgagcgagggatattaccggctaatgatgtccctccttaaagacgacgtgtactgtgaattagcagagcgtcacatccagcagatcgtattgtttcaccaagccggggaggagggggggaaagtgaggcggatcacgtcagaaggacagatcctcgaacagccactggacccctctttgatacccaagctgatgtcttttctgaagctggagaaaggcaagttcggaatggtcctgctcaagaagacacttcaggtcgaagaacggtatccatatcccgtcagacttgaagccatgtatgaagtcattgatcaaggaccaataagaaggatcgagaaaataagacaaaagggattcgttcagaagtgtaaggcctccggagtggagggccaggtggtcgctgagggtaacgacggcggaggaggggctggccgtcccagcctcggctctgagaaaaaaaaagaagatccccggagggcacaggtaccccccactagagagagccgagttaaagtgctgcgtaagctagcggccaccgcccccgctttaccacaacctccaagtacacccagggctacaacactccccccagctcccgcgactaccgttactcgatccacctcgagggccgtcacagtggcggccagacccatgacgaccacggctttcccgactacgcagcgtccttggacgccgtccccctcccacaggcccccgaccaccactgaggtcattaccgcacgccggccttctgtttctgaaaacttatatcctcctagcagaaaagatcagcaccgggagagaccccagaccacccggcgcccatctaaggccaccagcctagaatcctttactaacgctccccctacaacgatctcggaaccttcaaccagagcagctgggccaggtcgcttccgcgacaacaggatggatcggcgcgaacacggacacagagatcccaatgtggttcccggtccacccaagcccgctaaagagaaacctcccaaaaaaaaagcccaagataaaatcctgtctaatgagtatgaagagaagtacgacttgagccgccccaccgcatcacagctggaggacgagctgcaggtcggcaatgtgccgctgaaaaaggcaaaggagtccaaaaagcacgaaaagcttgaaaagccggagaaggaaaaaaagaaaaagatgaagaacgaaaatgcagacaagctgctgaaatcagaaaaacagatgaagaaatctgagaagaagagcaaacaggaaaaagagaaaagtaagaagaaaaagggaggcaagaccgagcaggacggatatcagaagcccaccaacaaacactttacccaatcccccaagaagtctgttgccgacctactgggttcgtttgaggggaaaaggcgtctcctgctgatcacagctccaaaagccgaaaataatatgtacgtgcaacagcgcgatgagtacctggaatcgttctgcaagatggctaccaggaaaatcagcgttattaccatctttggacccgtgaataattccacgatgaagattgaccactttcagctggacaacgagaagcccatgcgggttgttgacgatgaggacttggttgatcagagattaatttccgagttgaggaaggaatacggtatgacgtataatgacttttttatggtactcacagacgtggacctgcgggtaaaacagtactacgaggttcccatcactatgaagagtgtattcgatctgatagatacatttcagagcagaataaaagatatggaaaaacagaagaaagagggaattgtctgtaaagaagataagaagcagtccctcgaaaatttcctgagtaggttccggtggaggcgacgactgctagtcatttcggccccgaatgacgaagactgggcctatagtcagcaactgagtgctctcagtggccaggcttgcaatttcggcctacggcacatcacaatcctgaaacttttgggagtgggggaggaagtcggtggagtgctggaactcttccccatcaatggaagctccgtggtggagcgggaagatgtgcccgctcatttggtcaaggatatccgcaattatttccaggtctccccagagtacttttcgatgctgttggttggcaaggacggcaatgttaagtcgtggtatccctcccccatgtggtctatggtgatcgtctacgatctgatcgactctatgcagctcagacggcaggaaatggctattcagcagtccctgggaatgcggtgccccgaggatgagtatgccggatatgggtaccattcatatcatcaaggttaccaagatggttatcaggacgattacagacaccacgagagctaccatcacggttacccctactag

SEQ ID NO: 9680 - DNA, 351 bp, synthetic construct
  misc_feature 1..351: note = source = /note="Description of Artificial Sequence: Synthetic coding sequence"
  source 1..351: mol_type = other DNA
atggccgccggcagcgcccccatgcagctgcacctgcgggccaccatccggatgaaagatggcctctgcgtcccaagaaaatggatttatcatctgaccgaaggctctaccgacttgcgcacagaaggcaggcccgatatgaagacagaactattctcgagctcatgtcccggcgggattatgttgaacgaaaccggacagggataccagcggttcctactgtataatagaagccctcaccctcccgagaagtgcgttgaagagtttaagtctctgacgtcctgtctcgatagcaaagccttcctacttactccccggaatcaggaagcatgcgagctgagcaacaactag

SEQ ID NO: 9681 - DNA, 1251 bp, synthetic construct
  misc_feature 1..1251: note = source = /note="Description of Artificial Sequence: Synthetic coding sequence"
  source 1..1251: mol_type = other DNA
atgaagttccagggccccctggcctgcctgctgctggccctgtgcctgggcagcggggaggcaggacccttgcagagtggagaggagtctaccggtaccaacatcggagaggcattaggccacgggctaggcgacgctctctctgagggcgtcgggaaagcaattggaaaggaagcaggcggagcggcagggtccaaggtgagtgaagcgctcggtcagggcacacgggaggccgtgggtacaggagtacgccaggtccctggcttcggggtggccgacgccctcggcaatcgggtcggcgaggcagcccacgccctgggaaataccggccatgagatcggaagacaggccgaagatgtcattaggcacggcgccgatgccgtgcggggatcatggcagggcgtgcctggacacaatggagcatgggagacgtccggtggacatggaatatttggatctcaggggggactcggaggccaaggccaggggaatcctggcggtctgggtactccatgggtgcacggttaccccggcaacagcgcaggatccttcggcatgaatccacaaggcgccccctggggccagggcgggaatggaggccccccgaactttggtacaaacacacagggcgctgtggcccagcctggatatggaagcgtgagagcttctaaccagaacgaaggctgcactaacccacccccatccgggtccggtggcggatctagcaattctggcgggggctccgggtctcagtccggctcatccggaagtggttccaacggcgacaataacaacggtagctcctctggtggatcgtccagcggctccagcagtggcggctcctcaggtggctcatctggaggctcatccggcaacagcggaggaagtagaggtgattcaggtagtgaatcctcctggggctcttcaacgggatcgagcagcggcaatcacggggggagcggcgggggcaatgggcataagcctggctgtgaaaagccagggaatgaagctcgtgggtctggagaatcgggaattcagggtttcagaggacagggcgtgtccagtaatatgagggaaatctccaaggagggtaatcgcctgctcgggggaagcggtgataattacagaaattctgagacttctcctggaatgtttaacttcgataccttctggaagaacttcaaatcaaagctgggttttatcaattgggacgctatcaataaggaccagcggagcagccgcattccctag

SEQ ID NO: 9682 - DNA, 933 bp, synthetic construct
  misc_feature 1..933: note = source = /note="Description of Artificial Sequence: Synthetic coding sequence"
  source 1..933: mol_type = other DNA
atggtggacaaggacaccgagcgggacatcgagatgaagcggcagctgagacggctacgtgagttacatctatattccacctggaagaaatatcaagaggccatgaagacatcactgggagtaccgcagtgcgaaagagacgaagggtccctggggaagcctctatgtccccccgagattctcagcgagactctgcccggatctgtgaaaaagagagtttgcttcccgagtgaagaccacttagaggagttcattgctgagcacctgccggaagcctccaatcagtctcttttgacagtggcccacgccgatgccgggactcagacaaacggcgatcttgaagatctcgaagagcacggaccaggacagaccgttagcgaagaggcaaccgaggtgcataccatggagggggatccagacaccctggctgaattcttgatcagagacgtgttacaggaattatctagctacaacggcgaggaagaagatcccgaagaggtgaagacatctctcggcgtaccgcagagaggagacttagaagacctcgaggagcatgtcccgggtcaaactgtctccgaggaagctactggcgtacacatgatgcaggtggaccctgctacactggctaagagtgatctggaagacttggaagagcacgtccctgagcagaccgtttccgaagaagcaaccggagtgcacatgatgcaggttgaccccgctaccctggcaaagcagttggaggacagtactattacgggctcacaccaacaaatgagcgcgtcaccctcctctgcccctgcggaggaagccactgagaagacaaaggtagaggaagaagtcaaaacacggaaacctaaaaaaaaaaccaggaagcctagcaagaagtccagatggaatgtgctgaagtgctgggacatattcaatatattctag

SEQ ID NO: 9683 - DNA, 150 bp, synthetic construct
  misc_feature 1..150: note = source = /note="Description of Artificial Sequence: Synthetic coding sequence"
  source 1..150: mol_type = other DNA
atggccccccccagcgtgcccctggtgctgctgctggtgctgctgttgtcactggccgagaccccagcctccgcccccgcacacagatcatcgacctttccaaagtgggttaccaagacagaacgaggacgccaacctttgaggtcttag

SEQ ID NO: 9684 - DNA, 978 bp, synthetic construct
  misc_feature 1..978: note = source = /note="Description of Artificial Sequence: Synthetic coding sequence"
  source 1..978: mol_type = other DNA
atgcagggccgggtggccggcagctgcgcccccctgggcctgctgttagtctgtctgcatctccccggcctgttcgctcgctccattggggtcgtggaagagaaggtatcacagaacctgggcaccaacctcccacagctggggcagcccagttctacaggtccctctaactccgagcaccctcagccagccctagaccctcgctccaacgatttagcgcgagttccactgaagctttcagtgccggcctcagacggctttccgcccgctggaggaagcgccgttcagcggtggccaccttcctggggcctcccggccatggatagctggcctccagaagacccgtggcagatgatggctgcggccgcagaagatcggctaggagaagctctacctgaggagttatcttatctgtcttccgctgcagccctggctccaggttcaggccccctcccgggcgagtcttcgcccgatgctacaggcctgtctcccaaggcctccctgctgcatcaagattccgagtcaagacggttacctcgatccaatagtctgggagccgggggaaaaatcctgagtcagcgccccccttggtccctgatccatcgcgtcctcccggaccatccctggggtacactcaatccgtcagtgtcctggggagggggagggcccggaaccggatggggcaccagacccatgccacaccccgaagggatatgggggataaacaaccagcctcctggaacatcctggggaaacatcaatcggtaccccggtggaagctggggcaatattaacagataccccggcggcagctggggcaacatcaataggtatccaggcgggtcatggggtaacatccacttgtatccaggtataaacaatccatttccgcctggggtattgcgccctccagggtcgagctggaacattcctgctgggtttccaaaccccccatcgccaaggctgcagtggggctag

SEQ ID NO: 9685 - DNA, 390 bp, synthetic construct
  misc_feature 1..390: note = source = /note="Description of Artificial Sequence: Synthetic coding sequence"
  source 1..390: mol_type = other DNA
atggccgccggcagcgcccccatgcagctgcacctgcgggccaccattcggatgaaggacggactgtgcgtcccacgaaagtggatttatcatttgactgagggctctacagatctgcgtacagagggacgtccagacatgaagaccgagcttttctcatcttcctgccctgggggcattatgcttaacgagacgggacagggttaccagcgctttctcctgtacaaccggagcccacaccccccggaaaaatgtgtggaggaattcaaatctcttacgtcctgcctggatagcaaggccttccttctaactcctcggaatcagggaaagggattaaagagtcacaagactggcttgggcctcacaaagagctcaggggtgaccggttag

SEQ ID NO: 9686 - DNA, 1056 bp, synthetic construct
  misc_feature 1..1056: note = source = /note="Description of Artificial Sequence: Synthetic coding sequence"
  source 1..1056: mol_type = other DNA
atggccggcatccccggcctgctgttcctgctgttcttcctgctgtgcgccgtgggccaggtgtcaccatattctgccccctggaagccgacctggccggcctacagactcccagtggtgctgccccagtctacgctcaatctggcaaagcagtacctctcctatgagacgctgtacgccaatggcagcaggaccgagactcaagtcggaatttatatcctttcatccagcggtgatggggctcagcacagggattctggcagcagcggcaagagccgccgaaagcgccagatctacggctacgactcgcgcttcagcatctttggaaaagattttctgctcaattatcccttcagtacaagtgtcaaactctcaacaggctgcacagggacactggttgcggagaagcacgtgctgactgcagcccactgtattcacgatggtaagacttatgtcaaggggacacagaaactgagggtgggcttcctcaaacctaaatttaaagatggaggccgaggcgcaaacgattcaacatccgccatgcctgagcagatgaagttccagtggattagagttaaacgtactcacgtcccaaaagggtggatcaagggaaacgccaatgatatcggtatggattatgactacgcattactagaactgaaaaagccacacaaaagaaaatttatgaagattggagtttccccacctgctaagcagttacctggagggcggatccacttcagcgggtacgataacgacagaccaggaaatctggtgtaccgtttttgtgatgtcaaagacgagacctacgatctcctgtaccagcagtgcgacgcacaacccggggcctcaggaagcggagtctatgtgaggatgtggaaacgccaacagcaaaagtgggagcgcaagatcatcgggatcttctcagggcatcagtgggttgatatgaacggaagccctcaagactttaatgtcgccgtcaggattacccctttgaagtacgcgcagatttgttactggatcaagggcaactatctggactgccgagagggatag

SEQ ID NO: 9687 - DNA, 345 bp, synthetic construct
  misc_feature 1..345: note = source = /note="Description of Artificial Sequence: Synthetic coding sequence"
  source 1..345: mol_type = other DNA
atggagcggggcgccggcgccaagctgctgcccctgctgctgctgttgagagctacaggatttacctgcgcccaaacagacggccggaatggatatactgctgtaattgaggtgacatctggggggccctggggggactgggcgtggcctgagatgtgtcccgatggattttttgccagcggcttctcactgaaggtggagccaccccagggcatcccaggggacgatacggccctgaatggcattaggttgcattgcgcccgcggcaacgtgcttggcaacacgcatgttgtggagagccagtccggacgatggggagcgggagtggaagaccctttaggatag

SEQ ID NO: 9688 - DNA, 825 bp, synthetic construct
  misc_feature 1..825: note = source = /note="Description of Artificial Sequence: Synthetic coding sequence"
  source 1..825: mol_type = other DNA
atgtggcggtgccccctgggcctgctgctgctgctgcccctggccggtcacctagctctcggtgctcagcaggggagggggcggcgagaactggctcccggactgcacctgcggggtatccgcgatgctggggggagatactgccaagaacaggatctttgttgccgcgggagggctgacgactgcgccctcccttatctgggggcaatttgttattgcgaccttttctgcaaccgaaccgtctccgactgctgccccgacttttgggatttctgtctgggcgtcccacccccttttccaccaatccagggctgcatgcacggcggtcggatctatcccgtgctcggtacttattgggataattgtaatagatggccaccgctcgagtgttgggacttattgcctccagcgttacctggtcctgtctgggccgctctcggagccaaggaagagatggccggcaaggaccgaaccgtgtactgccctctcctaatgaaagccctcggtgcccgggttggcgaatgtcccgggtgtcagtcacctcagaggatgctacccgaaagctctagagtcctactgccccgctgtgccgagggcgagcaaccaggcgtgcagcgggggaaaggtcggatgcgcaaggcttttccagccttacagacaccacttgccctgccttcttctgcaccagcttcaccaggtgccgggaagccatcacatacgggttcttggctacccctgcgtctcttgaagcgtcagcactggcgatgggagccttggacggcctgtaaggaagctgtccagcacttagtgataactgagctgtag

SEQ ID NO: 9689 - DNA, 438 bp, synthetic construct
  misc_feature 1..438: note = source = /note="Description of Artificial Sequence: Synthetic coding sequence"
  source 1..438: mol_type = other DNA
atggcccagctgttcctgcccctgctggccgccctggtgctggcccaagctcctgctgccctggccgacgtgctggagggtgatagttctgaagatcgcgcctttagggtccgcattgccggggatgcacccctgcagggagtcctgggcggagccctgacgatcccatgccacgtgcattatctgcggccgcctccatctcgaagggcagtacttggcagccctagagttaagtggacttttctgtcccgcgggcgcgaggccgaagtgctcgtcgctcgtggggtgcgtgttaaggttaacgaggcttataggttccgagttgccctgccggcatatccagcctctctgacagatgtcagcttggcgctgtctgaactgcggcccaatgattccgggatatatcgctgtgaagtgcaacacggcatcgacgactag

SEQ ID NO: 9690 - DNA, 567 bp, synthetic construct
  misc_feature 1..567: note = source = /note="Description of Artificial Sequence: Synthetic coding sequence"
  source 1..567: mol_type = other DNA
atgttccaccagatctgggccgccctgctgtacttctacggcatcatcctaaattctatttaccagtgtcccgagcattcccagctgactaccttgggggttgacggcaaggagttccctgaagtccacctgggacaatggtacttcatcgctggagccgctcctactaaggaggaactagctacctttgatcctgtggataatattgttttcaatatggctgccggctctgcacctatgcaactccacctcagagctacgatcaggatgaaggatggcctctgtgtgccaaggaaatggatctaccacctgacagagggctccaccgacttgcggactgagggtaggcctgacatgaaaaccgagctgttttcatcttcttgtcccggaggcataatgttgaacgaaaccgggcagggctatcaacgatttctgctttacaacagatcaccccacccaccggagaaatgtgttgaagaatttaagtcgttgacttcctgcctggactccaaggcatttctcctcactccaaggaaccaggaggcatgcgagctcagcaataactag

SEQ ID NO: 9691 - DNA, 558 bp, synthetic construct
  misc_feature 1..558: note = source = /note="Description of Artificial Sequence: Synthetic coding sequence"
  source 1..558: mol_type = other DNA
atgggccccgccggctgcgccttcaccctgctgctgctgctgggcattagcgaccgcgattaccattctgctttgcaggaagccgaagtccccatcattgatcgtcaagcctgcgaacaattgtacaatcctatcggcattttcctgccagcactagaacccgtgatcaaagaagataagatctgcgccggcgatacccagaatatgaaagacagttgtaaaggggactccggtggccccttgagttgccatattgatggagtatggatccagaccggagttgtctcctgggggttggagtgtggaaaaagtttacccggcgtttacacaaatgtgatttattaccagaagtggattaacgcgactatttcgcgagcgaataatttggactttagcgattttctctttccgatagtacttctctccctcgcactcctccgcccctcttgcgccttcggtcctaatactatccatcgcgtgggcacggtggctgaagctgtagcctgtattcaaggctgggaggagaacgcctggagattttcacctaggggtagatag

SEQ ID NO: 9692 - DNA, 1653 bp, synthetic construct
  misc_feature 1..1653: note = source = /note="Description of Artificial Sequence: Synthetic coding sequence"
  source 1..1653: mol_type = other DNA
cccgcccccgccagccggaagctgctgccccggcggcacctgagcgagaagagccatcacatcagcattccatcgccagacattagtcacaaggggctgcgcagtaagaggacccagccctccgatcctgagacttgggagtcactgcctaggctggacagtcagcgccacggcggtcccgagttcagcttcgatctgttgccagaagccagggcaatccgtgttaccatctcttccgggcccgaggtgtcggtgcggctctgtcatcagtgggcgctggagtgtgaggaattgagcagtccttacgacgttcaaaagatcgtcagtggcggacacactgtggagctgccttacgagtttctgcttccttgtctgtgtattgaggcctcctacctgcaggaagatacggtgcgtaggaaaaaatgcccattccagagttggccggaggcatatggctcagatttctggaaaagtgtgcattttactgattacagtcagcatacccagatggtgatggccctcactctccggtgcccgcttaagttggaagcggctctgtgccagagacacgactggcataccttgtgcaaagatctacctaatgctaccgctcgggagagcgacggctggtatgtcctggagaaggtggacttgcatccacagttgtgtttcaaattctcctttggcaattcgtctcacgttgagtgccctcatcagactgggtccttgacttcctggaacgtgtctatggatactcaagcccagcagctcattttgcacttttcatcccgaatgcacgctacttttagtgctgcctggagccttcccggcttagggcaagacactcttgtgcctcctgtttatacggtgtcacaggcccggggtagttcaccagtgagcctggatctgattatccctttcctacgccccggctgctgcgtgctcgtgtggcggtctgatgtgcagtttgcctggaaacatttgttatgccccgatgtcagctatagacacttgggcttactgattctcgccctgctagccctcctaaccttactgggggtcgttctggcactcacgtgcaggcgaccacaatcagggcccggccccgcgagacccgttctcctgttgcatgcagctgattctgaagctcagagaaggcttgtgggagcactcgccgagttactgcgcgccgccttaggtggaggcagagacgtcatcgtcgacctgtgggaaggccggcacgtagcgcgagtgggtccactgccctggctctgggctgcacgaacccgtgttgcaagagagcaagggacagtgctgctactttggtcaggggccgatctgaggccagtgagcggccctgacccacgggcagccccattgcttgccctcctgcacgcggctccaaggccgctcctgctgctcgcctatttcagtcgcttgtgtgccaaaggagatattcctcctccccttagagccttgccccgttatcgcctcctcagagatttgcctagattgctcagagctttggacgcaaggcccttcgccgaggctacttcctggggccgcttgggcgcacggcagcggagacagtcaaggctggagttatgcagccggctggaacgcgaggcagctcgactagctgacttaggctag

SEQ ID NO: 9693 - DNA, 816 bp, synthetic construct
  misc_feature 1..816: note = source = /note="Description of Artificial Sequence: Synthetic coding sequence"
  source 1..816: mol_type = other DNA
atgggcatcgtgtgcgcccagtgcagcttcatcctgctgctgagcattataagggccaggccccctcccttcctcttctgtcccctgtcctcacagcggacagaatcaccttataagcctgtgcacctgggtttgggccccaccgacaaggtggctgcaatcgccatggcccggatcatcgacttggtcccgtgggacgatggctctactcacgtttacgcatctccggccatacttctgcctatggagaggcagaggaaccagcttgctggagtaaagcagcaactatatcaccccgctctgcccacactgcgccatatggaccgagacacagtcaaagcctgtctccctgatgaacattgccagagcaccacctattgtaggaaagacgagttcgacaacgcacatttcaccctgcttggtgtgcccaacaagccactgcagtgcctcgacattactgccacaggacaaaaactgcggaatagatatcacgaggggaaacttgcacccattgctccggggatcaatagggtagattggccatgctttactcgggctattgaggactggtcccattttgtgtcaagtgcaggggagttcaagttaccgtgccttagaaagcgggccgaaggactgtcgggatacgccgtcaggtatctgaagccggacgtgacccagacgtggcggtattgtctgtcccagaatccatcactggatcgctacggtcagaagccactgcctttcgactcgttgaacacgttccggtcgtttggaagttcctatagtagagtcaactatctgactccttggcactag

SEQ ID NO: 9694 - DNA, 1743 bp, synthetic construct
  misc_feature 1..1743: note = source = /note="Description of Artificial Sequence: Synthetic coding sequence"
  source 1..1743: mol_type = other DNA
atgcacctgagcgccgtgttcaacgccctgctggtgagcgtgctggccgcggtgctgtggaagcacgtcagactccgcgagcacgccgcaacactggaggaggaactcgcgctgtctagacaagcgacagagcccgctcctgcactcagaattgattaccctaaggcactccaaattttgatggaaggtgggacacatatggtgtgcacaggtaggactcataccgaccgcatatgccgattcaagtggctttgctattccaatgaagcagaggagtttatcttcttccacggcaacacctcagttatgcttccaaacctggggtctcgcaggttccagcccgccctgctcgatctgagcaccgtggaagatcataatacgcagtattttaattttgtggaactgcctgcagctgctctgcggttcatgccaaaacccgtattcgtcccggatgtcgcactgatcgctaacagatttaatcccgacaatctgatgcatgtctttcacgatgatcttctgccattattttacactttaaggcagtttccagggctcgcccatgaagccaggttattcttcatggaaggatggggggagggggctcatttcgatctgtataaactgcttagtccaaaacagccactactgcgggctcaactgaaaactttgggaaggctcttgtgcttctcacatgctttcgttggcctctctaagatcacaacctggtatcaatatggattcgttcagcctcagggcccaaaggccaacattctagtgagcgggaatgagatacgacagttcgctaggtttatgacagagaagttgaacgtttcgcatacaggcgtaccactgggggaggagtatatcttggtgttttcacggacgcagaatcggttgattctgaacgaagccgaactgctgctagcgttggcccaggaattccagatgaagaccgtgactgtatcgttagaagatcatacgtttgcagacgtcgtgaggctcgtgtctaatgccagcatgctcgtgagtatgcatggtgcgcagttagtgacaaccctcttcttgccaagaggtgcaacggtggttgaacttttcccatacgccgtcaatccagaccactatacaccctacaagaccttggcaatgctgcccggcatggacctccagtatgtcgcctggcgaaatatgatgccagaaaacaccgtaacccacccggaacggccctgggatcaagggggaatcacccatctggacagggcagaacaagcccggatcctgcaatcaagggaagtccctcggcacctatgttgccgaaatcccgaatggctgtttagaatctatcaagatactaaggtagacatcccgtccctgatccagaccataagaagggtcgttaaaggacgcccaggacccagaaaacaaaagtggacagttggcctgtatcctgggaaggtgagagaagcacggtgccaggcctccgtacacggcgctagcgaggcccggcttacagtctcatggcagattccctggaatctcaagtacctgaaagtacgtgaggtgaaatatgaggtttggctgcaagaacagggggagaacacatacgttccctacattttggcgctccagaaccacacctttaccgaaaacattaaaccatttaccacctacctggtgtgggttcgatgtatcttcaataagattctgctgggtccgtttgctgacgtcctggtgtgtaacacctag

SEQ ID NO: 9695 - DNA, 513 bp, synthetic construct
  misc_feature 1..513: note = source = /note="Description of Artificial Sequence: Synthetic coding sequence"
  source 1..513: mol_type = other DNA
atggagttcgtggacgtgaccgagagcaacgcccggtgggtgcaggattttcgcttgaaagcatatgctagccccgcaaagttggagagcatcgacggggcccgctaccacgccctcctaatcccttcctgtcccggagcccttaccgacctcgctagtagtggaagccttgcgcggattctccagcacttccattccgagagcaaacctatatgcgcagtcgggcacggagtcgccgccctgtgctgtgccactaacgaggatagatcgtgggtgtttgatagctactctctcacaggacccagtgtctgcgaactggtccgggccccggggtttgccagattgcccctggttgtagaggacttcgtgaaagattcgggagcatgtttctcagcctctgagcctgacgcggtacacgtggttttggaccggcatctcgtcacgggccaaaacgcaagctctacagtgccggctgtccaaaatctgctgttcttatgtggcagccgcaaatag

SEQ ID NO: 9696 - DNA, 1041 bp, synthetic construct
  misc_feature 1..1041: note = source = /note="Description of Artificial Sequence: Synthetic coding sequence"
  source 1..1041: mol_type = other DNA
atgcggctgctgttcctggccgtgctgcggccccacaccggcaacgcggtcaccgcccagcgcgttcgagctcatcttgaggcagcagggcacgtgtgcgttttaaaagatgcattcgacttcgagtctcgttccgagattgctaatcttatcctggctgagaactgtgaagcagccctggccttacacttatacagaggcggtagattgctgcaaggacacagaatccccttcggcgtaatcttcggaggcacagatgtcaatgaagacgccaaccaggcagagaagaacacggtgatgggacgcgtgctggaggaggccaggtttgccgtagcttttactgagtcaatgaaagagatggctcaggcacaatggccccatgcaaaggggaaggtgtacgtgcaaagccagggaatagctacgacgccaaacgccgctttcaactggaatacgtttctgcagagatccgagatcaatcaaagcgcagataatctccatatcttcctacttatctgtggcctgaggcaagtgaaagacccactgtacctcgtagatgccttttcagcttggcaccaggaggagcctaacgtccacctcgttatagtaggaccagaagtggaccctgtgtttaccagagaggtcaaggcaaaagtgaagcgggccgctggcgtcaggctcatcggagagatgccacaggaggatcttcacgccgtggtgaagaactgcttcgcagtggtgaatagttcagtcagtgagggcatgtctgctgctattctggaagctatggacctggaagtacccgtcttggctaggaatataccgggcaacgcagccgtggtgaaacacgaagtgacaggtctgcttttttccaatccgcaagaatttgtccatctcgccaagcggctggtgagtgaccctgcactggaaaaggagatcgtcgtcaacggccgtgagtacgtcaggatgtaccattcttggcaggtggagcgtgacacataccagcagctcattagaaaactggaggggtcgacagaggactag

SEQ ID NO: 9697 - DNA, 1482 bp, synthetic construct
  misc_feature 1..1482: note = source = /note="Description of Artificial Sequence: Synthetic coding sequence"
  source 1..1482: mol_type = other DNA
agcgaggccgtgtacctgaacgacagcacctacgacggccacaccgtggggggacttcagtatggaggcttaggacagctggccgacggcgtggttggtctggatgattttagaaagagccaggagctccgggtttggccaggatacgattatgtggggtggtcaaaccacagcttctccagtggctacgttgagatggaatttgaattcgatcggctgcgagcgtttcaggccatgcaggtgcattgcaataacatgcacacattgggtgctaggttacccgggggtgtggagtgccgattcaggcggggccccgccatggcatgggagggcgaacccatgcgccataacctcggcggaaacttaggcgatccacgagccagagcagtatcggtccctctgggtggtcgcgtcgcccgattcttacagtgccggtttcttttcgctggaccatggctgctgttttcagaaatcagctttattagcgatgtcgtgaataactcctcccctgctctgggaggtacgtttccccccgctccttggtggcctcctggccctcctccgacgaacttttcctcccttgaattagaacccagagggcaacagccagtggcaaaagctgaaggctcaccaaccgcaatccttataggttgcttagtcgccatcattctacttttattactgattattgctttgatgttatggcggctgcactggaggaggctgctctcaaaggtcttagaaagtcatcccagaacgcgctcaccaggactggtcggaatccgacctacccccctcccagtctcacccatggcgctgagatgctgttctccaatccagccaaccgctagtttttggccgctcacacctgtgccccttgaggccagagcccctcctcacccgccgggaccaaatcctcctaccccgaggggggtgacaggcggcaatacttatgctgtgcccgccctcccccctggcgctgttggcgacggacccccaagggtcgactttccccgcagtaggcttagattcaaagaaaagcttggagaaggtcagtttggagaagtccatttatgcgaggtggattctccccaggatctggtgtcccttgactttccgctcaacgtacgcaaaggccacccactgcttgtggctgtcaaaattcttcgccccgatgcaactaaaaatgcccggaatgatttcttgaaggaggttaaaattatgtcccgactgaaggacccaaatatcatcaggctcctgggcgtgtgcgtccaagacgaccctttgtgcatgattaccgactacatggaaaacggcgatcttaaccagtttttatcagcccaccagctggaagacaaagccgccgaaggggccccaggggatggccaggccgcccagggccctaccatcagctatccgatgctgctccacgtcgccgcgcagattgccagcggcatgagatacctggcaaccctgaattag

SEQ ID NO: 9698 - DNA, 354 bp, synthetic construct
  misc_feature 1..354: note = source = /note="Description of Artificial Sequence: Synthetic coding sequence"
  source 1..354: mol_type = other DNA
atgctgatcttctggaccatcaccctgttcctgctgggcgccgccaagggaaaggaggtgtgctatgaggacctgggctgctttagcgatacagaaccttggggagggaccgcaatcaggcctctgaagatcctgccttggagcccggaaaaaattgggacgaggttcctgttgtacacgaacgaaaaccccaacaacttccagattctcctgttatctgatccatccacaattgaagccagcaatttccagatggaccggaaaacccggtttataattcacggatttatcgacaagggcgacgagtcatgggtgaccgacatgtgcaaaccaggtgcctctccacgcgcctag

SEQ ID NO: 9699 - DNA, 1581 bp, synthetic construct
  misc_feature 1..1581: note = source = /note="Description of Artificial Sequence: Synthetic coding sequence"
  source 1..1581: mol_type = other DNA
atgcagggccccctgctgctgcccggcctgtgcttcctgctgagccttttcggcgcagtgacccaaaagacaaagaccagctgcgcaaagtgccccccaaacgcgtcatgcgtcaataatacacattgtacctgcaatcacggatatacctccggcagcgggcagaagctgttcactttcccattggaaacgtgcaacgctattgaaacccaggccatcaccgataattgttccgaggaaaggaagacttttaatttaaacgttcagatgaacagcatggacatcagatgctccgatataatacaaggagatacacaggggccgtctgcaattgccttcattagttactcaagcctcggcaacataattaacgcaacttttttcgaggaaatggacaagaaagatcaggtatacctgaacagtcaagtcgttagcgcagcaattggccctaagcgaaatgtgagcctctctaagagtgtcactttaacgttccagcatgtcaagatgaccccgtctacgaagaaagtgttttgtgtctattggaagagtacaggacaaggctctcagtggtcccgggatggatgtttcttgatccacgttaacaagtctcatacaatgtgcaactgctctcatctaagcagcttcgctgtactcatggccctgacgtctcaggaggaagaccctgtgttgactgtcatcacatacgtgggtttgtctgtttcgctcctctgcttgttgctggcggctttaaccttcctgttgtgcaaagccattagaaacacctctacctctctgcatctgcagcttagcctgtgtctgtttctcgcccacctgctcttcctggtcggcatcgatagaactgagcctaaggtgctgtgttcaatcatcgccggtgcactgcattacctatacctcgctgcctttacctggatgcttctcgaaggggtgcacctgttccttacagcccgtaatctgacggtcgtgaactatagttctataaatcgcctgatgaagtggattatgtttccagtgggctatggcgtgcccgctgtgactgtggcaatatcagctgcttcttggccacacctttatggtacagctgacagatgctggcttcacttggatcagggtttcatgtggtcctttctcgggcccgtgtgtgcaatattcagtgctaatctagttctgttcattcttgtgttctggattctaaagcgcaagttgtccagtcttaactctgaggtgagtaccatccagaatacaaggatgctcgccttcaaggccacagcacagctgtttatactgggttgcacatggtgtctgggattgctacaggtcggccccgcagcccaggtgatggcctatctttttaccatcataaattcgctccaggggttctttatcttcctcgtatactgtctgctgagtcaacaagtgcagaagcagtaccagaaatggtttagagagatagtgaagtcgaagtccgaatcagaaacatatacactttcatctaaaatgggaccagacagcaaaccctctgagggcgatgtattccccggccaggtgaagcgcaaatactag

SEQ ID NO: 9700 - DNA, 5832 bp, synthetic construct
  misc_feature 1..5832: note = source = /note="Description of Artificial Sequence: Synthetic coding sequence"
  source 1..5832: mol_type = other DNA
tgacccagcctggccggccggggcgccggccggatggcccccggcgccctccgaggtggctgcgagcagcgcgctcccggggggggggcaaggaccgctgcccttggcccatggccatggccctcccccggcccagcaccgtcccctggggcggccccaccccggagccgtaaaatgtcaggagcactcttatggcccctgctccctctgctgctactgttactgtccgctagggacggagtgcgcgctgctcagccccaggccccgggttatctgattgccgcgccatcagtattcagggcaggtgttgaggaagtgatctccgtcactatttttaattccccaagggaagtgacagttcaagcgcaactggtagcccagggggaacctgttgtacagagccaaggcgctatcctggacaagggaactatcaagctgaaagtaccgaccggcttacgagggcaggcactcttaaaggtatggggtcgcggatggcaggctgaggagggtcccctttttcacaaccagacatccgttacggtcgacgggcgcggtgcaagtgtttttatccaaaccgacaagcctgtgtaccgcccccagcatcgagtactgatttctatcttcacggtgagcccgaatctcaggcctgtgaacgagaagttggaagcctacatcctggaccctagggggagtcgaatgatagagtggaggcatttgaagcccttctgctgcggtattacaaatatgtctttccctctctcggaccaaccggttctcggggaatggttcattttcgtggagatgcagggtcacgcatataataagtcctttgaagtgcagaagtacgtgctgccaaagtttgaactgctcatcgacccaccgcgatacatccaggatctagacgcatgcgagactggcaccgtccgcgcacggtacaccttcggcaaacccgtggccggagccttaatgatcaatatgactgtaaacggagtgggctattatagccacgaggtggggagacctgtgctgagaaccaccaagattctgggatccagggatttcgatatctgtgtcagggacatgatccccgctgacgtgcctgagcattttagggggagggttagcatctgggcgatggtaacgagcgttgatggatcccagcaagtagccttcgacgactcgaccccagttcagcgccaactcgtggatatcagatacagcaaggataccagaaaacagtttaaaccgggactcgcctatgttggtaaagtagagctaagctacccagacgggtccccagccgagggtgtaaccgtgcaaataaaggcggagttgacacctaaggacaatatctatacatcagaagtggtgtcacaaaggggcctggtgggttttgaaatcccatcgatcccaacgagcgctcagcatgtatggctggaaacaaaagttatggcgctcaacggaaaacctgtgggagcccagtatctgcccagctacctcagtttaggttcctggtattctccttcccaatgctacctgcagctccagccaccctcccatcctctccaggtgggagaagaggcttacttttccgttaagtccacgtgcccctgcaactttacactatactacgaagtggctgctcggggaaatattgttttaagtggacagcagcccgcacacacgacgcaacaacgcagtaaacgggctgctccagcactggaaaagcctatccgcttgacccatttgtcagaaaccgagcccccgcccgcccctgaagccgaagtggacgtctgtgtgacttctcttcatctggctgttactccaagtatggtgcctctgggccggttgctggtgttttatgtaagagagaatggtgagggggtcgcagattctctgcagtttgcagttgagacatttttcgagaatcaggtcagtgtgacttactcagcgaatgagactcagcccggtgaggtagttgatctgcgcatacgggctgccaggggctcctgtgtctgcgtggctgctgtagacaaatctgtgtacttgcttcgcagcgggttccggttaacccccgcccaggtgtttcaggaactggaggactacgatgtatcggactcatttggcgtgagccgggaggatggtcctttctggtgggcaggtctcactgcccagaggaggaggagaagtagtgtgtttccgtggccctgggggatcacaaaggattcaggttttgctttcacggagactgggctcgtggtaatgaccgacagggtctcactgaaccatcgacaagacggagggctttacacagacgaggctgtgccagcctttcagccccatacaggctccctagtggcagtagctccttcccggcaccctccacggacagagaagcggaagcgtaccttctttcctgagacttggatttggcactgcctcaatatcagtgacccctcgggtgagggaaccctttcagtcaaagttcctgattccattacctcatgggtgggtgaagccgtggccctaagcacctcacaaggcttgggcattgcagagcccagcctcttaaagacatttaagccattttttgtagactttatgctgccagccttaattatacgtggcgaacaggtcaagattccactgtccgtttataattatatgggaacatgtgcggaagtgtatatgaagctttccgtgcctaagggtatacagttcgtcggacatccagggaagaggcacgtcactaagaagatgtgtgtagctccgggggaagcggaacccatttgggtcgttctgagtttcagcgacttgggcctgaataacatcaccgccaaagccctcgcctacggtgatacaaactgctgtcgagacggtaggtcttctaagcaccccgaggagaatcacgccgacagaagggtccctattggcgtcgatcatgtgaggagatctgtcatggtagaggccgaaggggtgccccgcgcatatacatatagcgcctttttctgcccatcggagcgcgtgcatatttctactccaaataaatacgagttccagtacgtccagagaccactccgactgactcgatttgacgtggctgtaagagcacataatgacgcccgcgtggcactgagtagcgggccacaagacaccgctgggatgattgagattgttctcgggggccatcagaacacccggtcttggatctctacttccaagatgggcgaacccgtcgcatctgctcataccgctaagatcctgtcgtgggacgagttcagaactttctggatcagttggcgtggcggactgatacaggtaggacatgggcccgaaccgtcaaacgaatcggttatcgttgcatggaccctgcctaggccccccgaggtgcagtttatcggcttttcaaccgggtgggggtctatgggggaatttagaatttggcgaaaaatggaggttgacgaaagttactcggaagctttcaccctcggggtgccccacggggctatcccaggttctgaacgggcaacagcttctataatcggagacgtgatgggtccaacactgaatcaccttaataaccttctgagactgcctttcggttgtggggagcagaacatgatccacttcgcacccaatgtgttcgtacttaagtatctacagaaaacccaacagctctctccagaagtggagagggagactacagactatctggtgcaaggatatcagcgccagctcacatacaagaggcaagacggctcttacagcgccttcggcgagcgggacgcctcgggttccatgtggctgacagcctttgtactgaaatccttcgcacaggctagaagctttatcttcgtggatccccgcgagctcgctgctgccaagagctggattatccagcagcaacaggccgatgggtcattcttagccgtgggtcgggtcctgaacaaggacatccagggaggtatccacgggactgtgcctctaaccgcttatgttgtggtagctttgctggaaactggcacagccagtgaggaagagcgtgggagcaccgacaaggctcgacatttcttagagagtgcggctcccctggccatggacccttactcatgtgctctaactacgtacgccctgaccttgttaaggtcccccgccgcccctgaggctctccgcaagctcaggagtttggccattatgagagacggtgtgacacattggtcgctctctaacagttgggacgttgacaaaggtacatttttgtccttcagcgatcgagtcagtcaaagcgtggtctcggccgaggtggagatgactgcgtacgctctcctaacctacacactcctgggtgatgtggccgcagctctgccggtagtaaaatggctgagccaacagaggaatgccctagggggcttttcctccacacaagatacatgcgtggcgctccaggccctggcagagtacgcgattctctcctacgctgggggtataaatttgacagtcagcctggcgtccactaatctggattaccaggagacatttgaactacaccggaccaaccagaaggtcctgcaaactgcagccattccttccctcccaactgggctgttcgtgtctgccaagggtgatggatgttgtctaatgcaaatcgacgtcacctacaatgttcccgacccagttgccaaacctgcatttcagctcctggtctcactgcaggagccagaagctcaggggcgcccaccacctatgcctgctagtgccgccgagggatccagaggggactggccacctgctgatgacgacgaccccgcggctgaccagcatcaccaggaatataaggtgatgctggaggtgtgcaccagatggctacacgccggctcctcaaatatggccgtgttggaggtacccttactgtctgggttccgagctgacatcgagtctcttgaacagctgctgctagataagcacatgggcatgaaacgctacgaagtggcagggaggagggtgcttttctactttgacgaaatccccagccgctgtttgacctgtgttagatttagagcattgcgtgaatgcgttgtcggccgcacctctgcgttgccagtgtctgtttatgactactacgagcctgcattcgaggccacacgcttctacaatgtgagcacacacagccccctcgctagagagctgtgcgcaggaccagcatgtaatgaggtcgagagagccccggctcgaggacctggctggttccccggagagagcggacccgctgtagctccggaggagggcgctgcaattgcccggtgcgggtgcgaccacgactgtggagcccaaggcaaccccgtatgcggttctgacggcgtggtctatgctagcgcttgtcggctgagagaagcagcatgcaggcaagccgcccctctggaacccgccccaccatcttgctgcgctcttgagcagagactcccagcatctagtagttctacctacggagacgatctggctagcgttgcaccaggacctttacagcaggacgtgaagctcaatggagcaggattggaggttgaggattccgatccagagccagaaggcgaggctgaagatcgagttaccgccgggccccggcctcctgtgtccagtggaaatctggagagctcaactcagtctgcatctccctttcaccgatggggtcagactcctgcacctcagcggcattctggaagggtggtgggggctcacaggcccggcttgctgtcaccagtatttgtctactccccagctttccaaagcggcggggaggagggtttgtggatgagcaacacctgtacgctgagatag

SEQ ID NO: 9701 - DNA, 456 bp, synthetic construct
  misc_feature 1..456: note = source = /note="Description of Artificial Sequence: Synthetic coding sequence"
  source 1..456: mol_type = other DNA
atggaggccaccggcaccgacgaggtggacaagctgaagaccaagttcattagcgcatggaataacatgaagtactcctgggtcttaaaaacaaaaacgtactttagtaggaattccccagtgctattgttgggcaagtgctatcacttcaagtatgaggacgaagataaaaccctccccgctgagtccggttgcaccattgaggatcatgtgattgcaggtaatgttgaggaattcagaaaagatttcattagccggatctggctcacttacagggaggagtttcctcagattgaagggtcagcacttaccactgactgcggctggggttgcaccttacgcacgggtcagatgctcctggcccagggactcatcctccactttctcgggagggcctggacatggccagacgcacttaatattgaaaactctgattctgaaagctggactagctag

SEQ ID NO: 9702 - DNA, 2616 bp, synthetic construct
  misc_feature 1..2616: note = source = /note="Description of Artificial Sequence: Synthetic coding sequence"
  source 1..2616: mol_type = other DNA
atgcggaagccccggcggaagagccggcagaacgccgagggccggaggtccccgtccccatacagcctgaagtgttcacctacgagggagacacttacttacgcacaggcacaacggatcgtggaggtggacatagacggtcggttgcaccgcatctctatttacgatcctctcaaaatcattaccgaggatgagctaactgctcaggacatcaccgaatgtaacagtaacaaagaaaattccgagcagccacagttccctgggaaatctaaaaagcccagttcaaagggcaaaaagaaagagagttgtagtaaacatgcgtcagggacatcattccacctccctcaaccaagcttcaggatggtggattctgggatccagcctgaagcaccccctctccccgcagcctattaccggtacatagagaaacctcccgaagatcttgacgccgaggtcgaatatgacatggacgaggaggatctggcctggctggacatggttaacgaaaaacgacgcgtggacgggcactctttggtgagtgccgacaccttcgagttgctggtagacaggttggaaaaagagtcctatcttgagagccgatcatcaggcgctcagcaatcccttatcgatgaggacgcattttgctgcgtctgcctggatgacgagtgtcacaattctaatgtgatcctcttctgcgacatttgtaacctagctgtacaccaagaatgttatggcgtgccttatatcccagagggacagtggctttgcaggtgctgcctacagtcgccaagccgccctgtggactgcattttatgtccgaataagggaggagcttttaaacaaacatcggatgggcactgggcccacgtcgtttgcgccatctggatccccgaagtgtgcttcgctaatacagtatttttggaacctatagagggaatcgataacattccccctgctaggtggaagcttacctgctatatttgtaagcagaaggggctcggagccgcgatacagtgccacaaggtcaactgctatactgcctttcacgtcacatgtgcccaacgggcgggactgtttatgaagatcgagccaatgcgcgaaaccagtcttaatgggaccatcttcacagttcggaaaacagcttactgcgaagcgcacagccctcccggagccgctacagcaagacggaagggggacagtcctagatctatctccgagacaggggacgaagaaggattgaaagagggagacggtgaagaagaggaggaggaagaagtggaagaggaagaacaggaagctcagggaggcgtgtcagggtctcttaaaggggtgccaaagaagagcaaaatgagcctgaagcaaaaaattaaaaaggagccagaagaggcgggccaagataccccttccactttacccatgctcgcagttcctcagatcccgagctacagactgaacaaaatctgtagcggccttagcttccagcggaagaatcagttcatgcagaggctgcataattactggctgctgaagcggcaggcccgcaacggggtgccattgatcagacgtctgcattctcatctccagtctcaaaggaacgccgagcaaagggaacaggatgaaaagacctctgccgtgaaagaagaactgaagtactggcagaaattaaggcacgatttggaacgggccagactgctgatcgagctcattagaaagagagagaagctaaaacgagaacaggtaaaggttcagcaggctgccatggagcttgaattgatgcccttcaatgtgctgctgaggacaacgcttgaccttctgcaggagaaagacccagcgcatatatttgctgaacccgtgaacctaagcgaggtgcccgattatctcgagtttatcagcaagccaatggacttttctacaatgaggaggaagctcgagagccatctgtacagaacactggaggaatttgaagaggacttcaatctgattgtgacaaattgcatgaagtataatgccaaggacaccatctttcaccgagccgcagtcaggctgagagacctgggtggcgctattctgagacatgcacgccgacaggctgagaacattggttacgaccccgagcgcggtacgcacctccctgagagtcccaagttggaggacttctacaggttctcttgggaggatggtcgatcacttctcctccctttcgaggacaggggggatttggaaccactggagctcgtgtgggctaagtgtcgcggatatccatcttacccagctctgattattgatcctaaaatgcccagagagggactgctgcacaacggggtccccatcccagtcccgccattggatgttttaaaattgggggagcaaaagcaggctgaggctggagagaagctgtttctagtcctgttctttgataacaaacgtacatggcaatggcttcctagagacaaggtcttgcctctaggggtggaggataccgttgataagctgaaaatgctcgagggtcgcaaaacctctattcgcaagtctgtacaggtagcatacgatcgcgccatgatccatctgagcagagtgcggggacctcattcatttgtcacctcaagttacctgtag

SEQ ID NO: 9703 - DNA, 2700 bp, synthetic construct
  misc_feature 1..2700: note = source = /note="Description of Artificial Sequence: Synthetic coding sequence"
  source 1..2700: mol_type = other DNA
atgctgctgctgctgctgctggcccccctgttcctgcggccccccggcgccggtggagctcagacccctaacgctacaagcgagggatgccagataatccatcctccctgggaaggcggcatccggtacagggggctgacacgggatcaagtgaaagccattaactttctgcctgtggactatgaaatcgaatatgtttgcagaggtgaaagggaggtggttggccctaaggtgcgcaagtgtctagccaatggttcgtggactgacatggacactccaagtcggtgcgtgaaccggacaccacactctgaaaggagagctgtgtatattggggcactcttccctatgtccggcggatggccaggcgggcaggcttgccagcccgcggtggagatggctctagaagacgtgaactctcgcagagacattttgcctgattacgaattgaaactgattcaccatgactcaaagtgcgatcctggtcaggcgactaaatatttgtatgaactgttatataatgatccgattaaaataattctgatgccagggtgctcatcagtgagtactctcgtcgcagaagccgcccgtatgtggaacctgatcgtgctttcctacggctcatcttcccctgccttgtcaaatcgtcagagattccctacattcttccgcacacacccgtcggccaccctgcacaacccaacacgcgtcaagctgttcgaaaagtggggatggaaaaagatagcaacaatacagcaaactactgaagtgtttacctctaccctggatgaccttgaggaaagagtcaaggaagccgggattgagatcacctttcggcaatcttttttcagtgaccctgccgtccctgtgaagaatctgaagcgccaggatgcgcgtataatagtgggcctcttttatgaaaccgaagcccggaaggtgttctgcgaggtgtataaagaaaggctgttcgggaagaaatatgtttggtttctgatcgggtggtatgctgacaattggtttaagatttacgaccccagcatcaactgcacagtggacgagatgacggaggctgtggaaggtcatataaccacagaaattgtgatgctgaatcccgctaatacacgctctatcagtaatatgacttcccaggagttcgtcgagaaactgacaaagcgcctcaaaagacatccagaagaaactggcggctttcaggaggctcccctagcctacgacgctatttgggccctcgcactcgctcttaataagacaagcggcggaggtgggcggtctggtgtgcgccttgaggacttcaattacaataatcagactatcaccgaccagatttacagagcaatgaacagctcatccttcgaaggcgtctcgggccacgtggtgttcgacgcctccggcagtaggatggcctggacattaatagaacagctccagggaggatcatacaagaaaattgggtattacgactctaccaaggacgatttatcatggagcaagactgataaatggattggagggtctccccccgccgaccagacactcgttatcaagactttcaggttcctttcccaaaagctctttatatcggtgagcgtgttgtcatctctgggcattgtgttggcagtcgtatgcttaagctttaatatctacaattcgcacgtgcggtacatccaaaattcccagccaaatctcaataatctgaccgcggtgggatgctcactagctttggcagccgtgttccccctgggactggatggctaccacatcgggaggaatcagtttccatttgtttgtcaagcccggctgtggctgctgggcctggggttttccctggggtacgggagcatgttcacaaagatttggtgggtgcatacggtgttcacgaagaaagaggaaaaaaaagaatggcggaaaaccctcgaaccatggaaattgtacgccacagtcggtctgctggtgggaatggacgtgctaactctcgctatttggcagatcgtggatcccttgcaccgtactatcgaaaccttcgccaaagaggagccaaaagaggacatagatgttagtatcctgccccagctggagcactgctcaagcaggaagatgaacacatggctcggaatattctacgggtataaaggtctgctgctactgcttggaattttcttggcttatgagacgaagtccgttagtacggaaaaaatcaacgaccatagagctgttggcatggcaatctacaatgtggctgtcttatgtttaatcactgcaccggtgactatgattttgtcttctcagcaagatgctgcattcgcattcgcctcactggccatagttttttcatcctatatcacgttagtggtactctttgtgcctaagatgaggagactcattacccggggcgaatggcagtctgaggctcaggacacaatgaagaccgggagttctaccaataataacgaggaggaaaagtctcggctcctggagaaggaaaatcgagaactagaaaagattatcgcagagaaggaggagcgcgtcagtgaattgcgacaccaacttcagagtcgccaacaacttcgaagccgtaggcaccctcctactccaccagagccgagtgggggtctaccgcggggtccacccgaaccacccgacaggctgagttgcgatggatccagagtccatctcctgtataagtag

SEQ ID NO: 9704 - DNA, 537 bp, synthetic construct
  misc_feature 1..537: note = source = /note="Description of Artificial Sequence: Synthetic coding sequence"
  source 1..537: mol_type = other DNA
atggagaccttccccctgctgctgctgagcctgggcctggtgctggctgaagccagtgaatccaccatgaagattatcaaggaggaatttactgacgaagagatgcagtatgatatggcgaaatccggccaggagaaacagaccattgagattctgatgaacccaattctcctggtcaagaatacttctctcagtatgtctaaagatgacatgtctagtacgttactgactttcagaagcttgcattacaacgacccgaaagggaacagcagcggaaacgacaaagagtgctgtaacgatatgaccgtttggcgaaaagtcagcgaagctaacggctcctgcaaatggtcaaacaactttatccgcagtagtactgaggtgatgcgtagggttcatcgcgccccatcatgtaaattcgtgcaaaaccccggaatctcatgctgcgagtctttggagctggagaatacagtgtgccagtttacaaccggcaagcaattcccgcgttgccaataccactccgtcaccagcctggaatag

SEQ ID NO: 9705 - DNA, 2184 bp, synthetic construct
  misc_feature 1..2184: note = source = /note="Description of Artificial Sequence: Synthetic coding sequence"
  source 1..2184: mol_type = other DNA
atgatcctgagcctgctgttcagcctgggcggccccctgggctggggattgctgggcgcttgggcccaggcctcaagtacgagcctgagcgacctacagtcatccagaactcctggggtctggaaagctgaagcagaagacacaggcaaggacccggtaggtcgtaattggtgtccctacccaatgagcaaattggtcacccttctggccctgtgcaaaaccgagaagtttctgatccatagccagcagccttgccctcaaggcgcccccgattgccagaaagtgaaggtgatgtatcgtatggcgcacaagccggtctatcaggtaaaacagaaggttcttacttctctggcttggcgatgctgccctggatatacgggacccaactgcgagcatcacggtcctatggctgtatggtgttggcccgaacccgatagtctgcaggctagattagggcagctccaacggaacctctcagagcttcatatgactacagcacgaagggaggaagaactgcagtatacattagaggatatgcgtgccactctcacccgacatgttgacgaaattaaagaactatatagtgaatcagatgaaacgttcgaccagataagtaaagtggagcgacaggttgaagagctccaggtgaaccacacagccttgcgcgagctgagagttattctcatggagaaatctctaataatggaagaaaataaagaggaagtggagaggcagctgcttgagcttaatctgacactacagcacctgcaaggcggacatgcagatctaatcaaatatgtgaaggattgcaactgtcaaaagctgtacctggatctggatgtgattcgagaaggacagagagacgccaccagggctctggaagaaacacaggtttcgctggacgagcgacggcagctggatgggtctagcctgcaggccttgcaaaacgccgtcgatgcagtgagcctggccgtagatgctcacaaggcggaaggcgagcgagcgagagcggccacctcccgacttaggtcacaggtgcaggccctggacgatgaggtgggtgcactcaaggccgcggccgcagaggcccgacacgaggttaggcagctgcactctgcctttgctgctctgctcgaggatgcacttagacacgaggctgtgttagccgctctgtttggggaggaggtcctcgaggagatgtccgagcagacacccggacccctgccactcagctacgagcagattcgagtggcacttcaggatgccgcctccggattgcaggagcaggcattaggatgggacgagctcgctgctagagtcacagctctggaacaggccagcgaacccccgaggcctgctgagcacctggagccatcacacgacgcgggtagggaggaggccgcaacaacagcactcgcaggcctggccagggagctgcagtccctctccaacgatgtaaaaaacgtgggaaggtgctgtgaggcagaagcaggagcaggggccgcctctttgaacgcgtctttgcacggactgcataatgctctatttgcaacacagaggagtctggagcagcaccagcggttgttccattcactgtttggcaacttccagggcttaatggaggcaaatgtgagcctcgaccttgggaagttgcagaccatgctttctaggaaggggaagaagcagcagaaagacttagaagccccacggaagcgcgataagaaagaagctgagccactcgtggatattagggtgaccgggccggtgcctggggccttgggcgccgctctgtgggaggccgggtctcctgtggcattttacgcatcattctccgaaggaacggccgcacttcagactgtgaaatttaataccacatatataaacatcgggtcctcctactttccggaacacgggtacttcagagctcccgaaagaggcgtgtatttgtttgcggtttccgtcgagtttgggcccggacccggtactggtcagctcgtgtttgggggccaccaccgaactcccgtgtgcacgaccggccagggcagcggcagcaccgctacagtatttgccatggcagaattgcagaaaggagagcgggtctggttcgaattgactcaaggatccataactaaacggagtctctcaggcaccgccttcggaggatttcttatgttcaaaacatag

SEQ ID NO: 9706 - DNA, 828 bp, synthetic construct
  misc_feature 1..828: note = source = /note="Description of Artificial Sequence: Synthetic coding sequence"
  source 1..828: mol_type = other DNA
atgggcagcgccccctgggcccccgtgctgctgctggccctgggcctgaggggcctgcaggctgggggcgagtggcgcagacctcccgcccacagcccggtcccggcaccccctctgcgctttgcctcccctcattccccccaagggcccggtcctcgcctccctggtgctctgcttccagctgcctcaggccccctccagctgagggctctgaggcagcaggaccttccttctgcacttcctggcgtgggccaggtgcttgggccaggccgtggcgcccatttactcttacattgggaacgaggcaggagagtgggattgcggcaacagctgggactaagaaggggcgccggggggcgggctggcgggtcaactggtttgcggggggcacctttgctcagagaagtagcagcagttcgttgcgccgtccatgcggcgcgcgcacacggggccgccgatggtggtgccggaccggggcgacttcgtagggccgcacccagagctacaactcgacctcgcggcccaggctgcccaagacaccggctgaggtggaaactctggggcgatgcacagtgtctgccggaagacgaggtctcacctccagggggcggcggagctggaggtcagagagctaggtctagctgtggtcggccacggagactccagccggtgttgcctggccgccatggcggctccctgcgccacggccctctgggggtcaggcatcttccagctgctgttagacgcgaagggcccgacccggctctccacgtgagacccgaatgtctgcatcgagctggacacgacggtctgccactcccacactag

SEQ ID NO: 9707 - DNA, 351 bp, synthetic construct
  misc_feature 1..351: note = source = /note="Description of Artificial Sequence: Synthetic coding sequence"
  source 1..351: mol_type = other DNA
atggccgccggcagcgcccccatgcagctgcacctgcgggccaccatccgaatgaaagacggactgtgtgtgccacggaagtggatctaccacctgaccgaagggagtacagacctaaggaccgaggggagaccagacatgaagaccgagctcttctctagttcttgcccgggggggattatgctgaatgaaaccggacagggttaccagaggtttctcctgtacaacagatcaccacatccacccgaaaaatgtgtagaagaattcaaatccctgactagttgcctcgatagcaaggcattcttgctaacaccacgcaaccaggaggcgtgcgagctcagtaataattag

SEQ ID NO: 9708 - DNA, 522 bp, synthetic construct
  misc_feature 1..522: note = source = /note="Description of Artificial Sequence: Synthetic coding sequence"
  source 1..522: mol_type = other DNA
atgcactggaagatgctgctgctgctgctgctgtactacaacgccgaagcctctatgtgtcacagatggagtcgggccgtgctgtttcccgccgcccacaggccaaaaagatcctcatctttgcctctcaaccccgtcttgcagacctcacttgaggaagtggaactcctttacgagttcctgttggccgagcttgagatttctcccgacttacagatatccatcaaggacgaagaattggcctctcttcggaaagcctccgacttccgcactgtgtgtaataacgtgattcccaaatcgatcccagacatcagaaggctgtccgcatccctgagttctcatccaggaatactgaagaaggaagatttcgaacgtactgtcctgactttggcatatacagcttataggacggctctcagtcatggacaccagaaagacatctgggcacaatccttagtctccctctttcaagccttgcggcacgatctgatgcgaagcagtcagccgggcgtacccccttag

SEQ ID NO: 9709 - DNA, 1482 bp, synthetic construct
  misc_feature 1..1482: note = source = /note="Description of Artificial Sequence: Synthetic coding sequence"
  source 1..1482: mol_type = other DNA
agcgaggccgtgtacctgaacgacagcacctacgacggccacaccgtcggagggctgcagtacgggggattagggcagttagcggatggggtagtcgggctggatgattttaggaaatctcaggaactgcgcgtatggcctggctatgactatgtggggtggtctaaccacagcttcagtagcggatatgtggagatggaattcgagtttgatagactgcgcgcttttcaggccatgcaagtgcactgtaataatatgcacactctgggggcgcggttgcccggcggggtggaatgccgattccgccgcggtcccgcaatggcttgggagggtgagccaatgagacataacctcggcggtaacttaggtgaccccagagccagagctgtcagtgtccccttgggcggccgcgtggcacggtttttgcagtgccgtttcttgtttgccggcccctggcttctctttagtgaaattagcttcatctctgacgtcgttaacaattcctcccctgccctcggggggacgtttccacccgctccatggtggccaccgggtccccctcctaccaacttttcctcactagagctggagccacgtggccagcaaccggttgccaaagcggaaggaagccctactgcaattttaatcggatgcctcgtggccatcatactcctgctgctgttgattattgcactgatgctctggcgactccattggcgcagactgctgagcaaggtcttggagtcacatcctaggacccgctctccgggcctcgtggggatccggccgaccctacttcccgtgtcaccaatggccctacgctgctgttccccaattcagcccacggcctcattttggccactgaccccggtccctcttgaagctagagcccccccacatcctccaggccccaatcctccgaccccacgcggggtcactggaggcaatacctatgccgtgcctgccctgcccccaggcgccgtcggcgacgggcctcctcgggtggactttcccaggagcaggctgaggtttaaggagaagctcggcgaaggccagtttggagaagtccatctgtgcgaagtagacagccctcaggatctcgttagtctcgactttccgctcaacgttaggaagggccaccccctgttggtagcggttaagatactgcggcccgacgctacgaaaaacgctagaaatgacttcctaaaagaagtgaaaattatgagccgcctgaaggacccgaatattattaggctgcttggggtctgcgtgcaggatgatccattatgcatgataacagactacatggaaaacggggacctaaatcagttcctgagcgcacaccaactcgaggataaggcggctgagggtgcaccaggagacggtcaagctgcccagggcccgacaatttcgtaccctatgttacttcacgtggcagcacaaatagccagtggaatgcggtaccttgccacactaaactag

SEQ ID NO: 9710 - DNA, 639 bp, synthetic construct
  misc_feature 1..639: note = source = /note="Description of Artificial Sequence: Synthetic coding sequence"
  source 1..639: mol_type = other DNA
atgggcctgcacctgcggccctaccgggtgggcctgctgcccgacggccttctgttcctgctgttgcttttgatgctgctggctgacccagccctgcccgctggccgtcacccccccgtggtcttgggagataacaaccgcatcccagtcataggtcctttaaagattcgggagcagcagcggtccgcagtgtctacttcgtggctgctgccgtataactatacatggagcccagagaaagttttcgtacagacccccacaattaattataccctgcgggattataggaagttctttcaggacatcgggttcgaggacggatggctgatgagacaagacacagaaggtctggtcgaggcaactatgccccccggagtgcaactgcattgcctgtacggcaccggggttccaacgcctgactccttctattatgagtcattcccagatcgtgatcccaaaatctgcttcggcgatggcgatggaaccgtcaatctgaaaagcgcactgcagtgtcaggcatggcagtcacggcaagaacatcaggtgctcctgcaggaacttcctggttcggaacatatcgaaatgctggccaacgctaccacattagcatacctcaaacgtgtcctgcttggaccgtag

SEQ ID NO: 9711 - DNA, 654 bp, synthetic construct
  misc_feature 1..654: note = source = /note="Description of Artificial Sequence: Synthetic coding sequence"
  source 1..654: mol_type = other DNA
atgagcgacctgctgctgctgggcctgatcggcggcctgaccctgcttctgctactgacactcttagctttcgccggttattcaggcctgttggctggggtggaggtctctgctggctccccccctattcgtaatgtgaccgtcgcctataaatttcacatgggattatatggcgagaccgggcgcctgttcaccgagagttgctcgatctctccaaagcttaggtctattgcggtttactatgacaatcctcacatggtacctccagataaatgccggtgcgctgtgggatcgattctgagcgagggggaagagagccccagtcccgagttaatcgacttgtatcaaaagtttggatttaaagtgttcagctttcccgccccctcccacgtggtgacagcgacattcccctatacaacgattctttcgatttggctggctacaagacgggtccaccccgccctggatacatacataaaagagagaaagctctgtgcttatccaagactggagatttaccaggaagaccaaatacatttcatgtgtccattagctaggcagggggacttctacgttccagaaatgaaggaaactgagtggaagtggagaggtctggttgaggcaattgatacccaggtagacggtactgggtag

SEQ ID NO: 9712 - DNA, 345 bp, synthetic construct
  misc_feature 1..345: note = source = /note="Description of Artificial Sequence: Synthetic coding sequence"
  source 1..345: mol_type = other DNA
atgaagaccttcacctggaccctgggcgtgctgttcttcctgctggtcgacactggccactgtaggggcggacaatttaagatcaagaagattaatcagcggagatatcccagagccacagatgggaaagaagaggccaaaaaatgcgcctacacttttctggtcccagagcagagaattaccggcccgatttgcgttaatacaaaggggcaggacgcatccacgataaaagacatgatcactcgtatggatcttgagaacctaaaggatgtgctttcccgacagaaacgggaaattgacgtgttgcagttggtcgtggatgtggacggcaatatagtcaactag

SEQ ID NO: 9713 - DNA, 870 bp, synthetic construct
  misc_feature 1..870: note = source = /note="Description of Artificial Sequence: Synthetic coding sequence"
  source 1..870: mol_type = other DNA
atgttcgtgctgctgtacgtgaccagcttcgccatctgcgccagcggccagcctagaggtaatcagctcaaaggagagaactattccccacgctatatttgcagtattccaggcctccctgggcctcctggccctccaggggccaatggcagtccaggcccgcacggcaggataggattgccgggtagggatggcagggatggacgtaagggggagaaaggggaaaagggaaccgcaggacttcggggcaaaaccgggccattgggtctggctggcgagaagggggatcaaggtgagactggaaaaaaggggcccattggtccagagggagagaaaggggaggtcgggcccattggtccccctggccccaaaggggaccgcggtgaacagggtgaccctggcctgccaggggtgtgcaggtgcggaagcatcgtactcaagtccgccttttcagtggggataacaactagctaccccgaggagagattgcccatcatttttaacaaggtcttgttcaatgagggtgagcattacaacccagccaccggcaaattcatttgtgcgtttcctggcatctactactttagctatgatattacgctggccaataaacacctggccattggtctggtgcataatggtcagtacaggatcaaaacatttgatgcaaacaccggcaaccacgacgtagcgagcgggtccacagtaatctacttacagccagaagacgaagtgtggctggagatcttcttcactgaccaaaatggtctgtttagcgatcccggatgggccgactctctcttctctggctttctgctgtacgtggatacagactacctcgactccatctcagaggatgatgagctgtag

SEQ ID NO: 9714 - DNA, 1002 bp, synthetic construct
  misc_feature 1..1002: note = source = /note="Description of Artificial Sequence: Synthetic coding sequence"
  source 1..1002: mol_type = other DNA
atggtgagcaagagccggtggaagctgctggccatgctggccctggtgctcgttgttatggtgtggtactcaatctctcgggaggatcgctacattgaactgttttattttcccataccagagaagaaggaaccatgcctgcaaggcgaggcagagagtaaggctagcaagctctttggaaactacagcagagatcagcccatctttcttagactggaggactacttttgggtcaagaccccttcagcgtatgaactgccttatggcacaaaaggctccgaagacctgcttcttcgggtgctggccattaccagctcttcaatcccgaagaatatccagtccctgcgctgccgtaggtgcgtagtggtgggcaacggacaccgtttaaggaacagttctctcggggacgccatcaataagtatgacgttgttatccggctgaacaacgctccagttgcaggctatgaaggtgatgtggggtccaaaacgactatgaggttgttttaccccgagagcgcccacttcgatcctaaggtggaaaacaacccggatacgctgcttgtactagttgcctttaaggcgatggacttccattggatcgagacaatcctgtctgataagaagagggtacgcaagggattctggaaacaaccccccctgatctgggacgtcaaccccaaacagattcgtatcctgaatccattttttatggagatcgctgccgataagctgctgtctttgccaatgcagcagcctcgaaagattaaacagaaacccaccacaggcctgctggccatcactctcgctctacacttgtgcgatctggtccatattgccgggtttggctatcctgacgcgtataacaaaaaacagacaatccactattacgagcagatcactctgaaaagtatggccgggagcggccataatgtaagccaggaggctcttgctattaaaaggatgttagagatgggcgctattaaaaatctgacaagcttttag

SEQ ID NO: 9715 - DNA, 531 bp, synthetic construct
  misc_feature 1..531: note = source = /note="Description of Artificial Sequence: Synthetic coding sequence"
  source 1..531: mol_type = other DNA
atgcggctgctgatcctgacctgcctggtggccgtggccctggccaggcccaaactgccattgcgctaccctgaacgcctgcagaatcctagcgagagctctgaacctatcccattggagtccagagaagagtatatgaacggcatgaacaggaggaacattcttcgagaaaagcagaccgatgagattaaagacacacgaaacgagagtacgcagaattgcgtggtggcagagcccgagaagatggagtcgtctatttcctcgtcttctgaagagcagttctgtcgtctcaacgagtacaatcagctgcagctccaagcagcccacgcccaggaacagatcagacgaatgaatgagaatagccacgtccaggttccgtttcagcagctcaaccagctggctgcatacccctacgccgtttggtattacccccagatcatgcagtatgtcccattcccacccttctccgatatttcgaaccctactgctcacgagaattacgaaaagaataacgtgatgctgcaatggtag

SEQ ID NO: 9716 - DNA, 279 bp, synthetic construct
  misc_feature 1..279: note = source = /note="Description of Artificial Sequence: Synthetic coding sequence"
  source 1..279: mol_type = other DNA
atgaagctgtgcgtgaccgtgctgagcctgctggtgctggtggccgcattctgttcactggcgctctcggccccaatggggtctgatcctcctacagcatgctgttttagttacaccgcaaggaagctgcccaggaattttgttgtcgactattacgaaactagcagcctatgctctcaacccgctgtggtattccaaaccaaacgggggaagcaggtgtgtgccgacccttctgagtcctgggtacaagagtatgtttatgacctggaactcaattag

SEQ ID NO: 9717 - DNA, 1656 bp, synthetic construct
  misc_feature 1..1656: note = source = /note="Description of Artificial Sequence: Synthetic coding sequence"
  source 1..1656: mol_type = other DNA
atgacctggcggatgggcccccggttcaccatgctgctggccatgtggctggtctgcggcagcgagccccacccccatgccaccatacgcgggagtcatggcgggaggaaggtgcctctggtgtcccccgatagctctcggcctgcgcgatttctacgacatactggcaggtctcgaggtattgaaaggtcaaccctggaggaacccaacctccaacctctacagagacgcaggagtgtgcctgtgcttcgcctggcccgaccaagcaggttccgggataaccgcatggacagacgcgaacacggtcatcgtgacccaaatgtggtgccgggccctcccaaacctgccaaagagaaaccaccaaagaagaaggctcaggacaaaatactgagcaatgaatatgaggaaaaatatgacctcagtcgcccgactgcctcgcagctggaagatgaacttcaagtgggaaacgttcctctgaagaaggcaaaggagtccaaaaaacacgaaaaactggaaaagcccgaaaaggagaagaaaaaaaagatgaagaatgagaacgctgataaactactcaagagtgagaagcaaatgaaaaaaagcgaaaagaagagcaagcaggagaaggaaaagagtaaaaaaaagaaaggggggaagacagaacaggacgggtatcagaagccgactaataaacattttacgcagtcgcctaaaaagtccgtggcggatctgcttggttcatttgaaggcaagcgaaggttgctcttaatcacagcccccaaagcggagaataatatgtacgttcagcagcgagacgaatatctggagtcattctgtaagatggctacacgtaagatttccgtcataactatttttggtccagtgaacaactctaccatgaagatcgatcattttcagctcgataatgaaaagcccatgagggtcgtcgacgacgaggacttggtggaccagcggcttatatccgaattaaggaaggaatacgggatgacctacaatgatttctttatggtcctcaccgacgtcgacctgagggttaagcagtactacgaagtgcccatcacaatgaagagtgtgttcgacttaatagatactttccagtctaggattaaggacatggagaaacagaaaaaggaaggcatcgtatgcaaagaggataaaaagcaatctttggaaaattttctgtctagattccggtggcgtagacggctactcgtgatctcggcgcctaatgacgaggactgggcctacagtcagcaactgtcggccctgtcagggcaggcttgcaactttggctctagcgtggtggagagagaggacgtgcccgcccaccttgtcaaagatattcgcaattactttcaggtttcacctgagtattttagcatgctattggttggaaaggacggaaacgtcaaaagctggtacccttcaccaatgtggtcgatggtgatagtgtatgatctcattgatagcatgcagctaaggcgacaggaaatggccatccagcagtctctcggcatgcgctgtcctgaggatgaatatgcagggtatggttaccactcttatcatcagggctatcaagatggctaccaggacgactacagacaccacgaaagctaccaccacggctacccatattag

SEQ ID NO: 9718 - DNA, 1245 bp, synthetic construct
  misc_feature 1..1245: note = source = /note="Description of Artificial Sequence: Synthetic coding sequence"
  source 1..1245: mol_type = other DNA
atgggcgtgagcaagctggacatcctgtaccggcggctgctgctgactaagctgtttatccgcggctgggggcggccagaggacttaaagcgactcttcgagttccggaagatgatcggaaaccgcgaacgctgtcaaaacctggtttctagcgactatcccgttcacatcgacaaaattgaagaacagtcagattgcaaaatattagacggccactttgtgagcccaatggcccactatgttcctgatattatgcctattgagagcgtcatcgcccgattccagttcatcgtgccaaaagagtggaactcaaagtacaggccagtctgcatacatttagcaggtacaggcgatcatcactattggagacggagaaccctaatggcacgaccgatgattaaagaagcgcgtatggcttctctgctgctcgagaacccttattacggctgcaggaaaccgaaggatcaagtccggagctcgctgaagaacgtaagcgacctgtttgtgatgggcggcgcccttgtgctcgaatccgcagccctcctgcactggcttgagcgagagggttacggccctctgggaatgactgggatatccatggggggtcacatggccagccttgccgtgagcaattggcccaagcctatgcccctgattccgtgtctcagttggagcacggcaagtggcgtctttaccactaccgatagctttaaaatggggcaggaattcgtcaagcattttacctcttccgccgacaagctcaccaatcttaatctggtgtcccggacactgaatttagacatttctaatcaggtggtatcccagaagcccgcagattgtcacaattcttcaaaaacctctgttagcgcgaccagcgaaggactcttgttacaggacacctcaaagatgaaaaggtttaaccaaacattgagtacaaacaagtcgggatacacctcacgaaatccccagagttaccatctgctaagtaaggaacagagtcgaaattcactccggaaggagtcactcatcttcatgaagggagtgatggacgagtgcacacacgtggccaatttctcagtacctgtggatcccagtttgattattgtggtgcaggccaaagaggatgcctacataccaaggactggcgtccgatctctgcaggagatatggcctggctgtgaaatccgctaccttgagggagggcacattagcgcatacctatttaagcagggacttttcagatag

SEQ ID NO: 9719 - DNA, 300 bp, synthetic construct
  misc_feature 1..300: note = source = /note="Description of Artificial Sequence: Synthetic coding sequence"
  source 1..300: mol_type = other DNA
atggagcggatcagcgccttcttcagcagcatctgggacaccatcctgacaaagcaccaagaggggatctacaatactatttgtctgggagtgttactgggacttccgttgctggttattatcactctcctgtttatatgttgccattgctgttggtcgccaccaggaaagagggggcaacagcctgagaaaaacaaaaaaaagaaaaaaaagaaaaaaaagaaagacgaggaggacctctggatcagcgctcagcctaagctcttgcagatggagaagcgcccatctctccctgtctag

SEQ ID NO: 9720 - DNA, 912 bp, synthetic construct
  misc_feature 1..912: note = source = /note="Description of Artificial Sequence: Synthetic coding sequence"
  source 1..912: mol_type = other DNA
atgagcgagccccagcccgacctggagcccccccagcacggcctgtacatgctcttccttctggtgctggtgttctttttgatgggcctcgttggattcatgatctgccacgtgctcaagaaaaaggggtaccgctgccgcacatcccggggttcagagccagatgatgctcagctacagccacctgaagatgatgatatgaatgaagataccgtggagcggatcgtgaggtgcattatacagaatgaggctaatgcagaagcacttaaggaaatgttgggggatagtgagggagaaggaactgtccaattatcaagcgtggacgcaacttcttcattgcaggatggcgccccttcgcatcaccatacagttcacctggggagcgctgcgccctgtctgcattgctcacgatcaaaaagacctcccctcgtgcggcaggggcgctctaaagagggaaagtctagaccacggaccggtgaaacaaccgtgtttagtgttgggcgcttcagagtgacacacatcgaaaagcggtacggcctgcatgaacacagggacgggagtcccacggacagatcctggggctctggcgggggtcaggaccccggaggggggcagggcagcggaggaggccagccaaaagctggcatgccagccatggaacgcttgccaccggaacggccccagccccaggtgctggcctctccccccgtgcagaacggcggactgagagatagcagccttaccccgagggcactcgaaggaaatccaagggcttcggccgagccgaccctacgcgcaggcggccgcggtccaagtcccggcctgccaacccaagaagctaatggccagccaagcaagcccgacactagcgatcaccaggtctctctccctcagggagccggctccatgtag

SEQ ID NO: 9721 - DNA, 444 bp, synthetic construct
  misc_feature 1..444: note = source = /note="Description of Artificial Sequence: Synthetic coding sequence"
  source 1..444: mol_type = other DNA
atgggccccgaggccctgagcagcctgctgctgctgctgctggtggcgagtggtgacgcagacatgaagggccattttgatccagcgaagtgccgatacgccctggggatgcaagaccggacaattcccgactcagacatatccgcctcctcttcttggtcggattcaacagctgctaggcacagccgactcgaatccagcgacggtgacggggcttggtgtcccgccggatctgtttttcctaaggaggaggagtaccttcaagttgaccttcagcggttgcatttggtggctcttgttgggacccagggacggcatgccgggggcctgggtaaagagtttagccggagctacagattgcggtattcacgggatggacggaggtggatgggctggaaagatcgatgggggcaggaggtcatttccgggaacgaggatccctag

SEQ ID NO: 9722 - DNA, 1173 bp, synthetic construct
  misc_feature 1..1173: note = source = /note="Description of Artificial Sequence: Synthetic coding sequence"
  source 1..1173: mol_type = other DNA
atgggcgccaccaccatggaccagaagagcctgtgggccggcgtggttgtactgctgttgctccaggggggctctgcttataagctcgtgtgttattttaccaactggtctcaggatagacaggagccgggaaaattcaccccagagaatattgacccttttttatgcagccatctgatatatagtttcgcttcgatagagaataacaaggttattattaaagacaaatcagaggttatgttgtaccagactataaacagccttaaaacgaagaacccaaaattaaagatccttctttctattggcggctacctctttggttccaagggcttccatccaatggtggatagctcaacgtctcgactggaattcatcaattcaattatcctctttctgaggaaccataactttgacggacttgatgtttcctggatctatccagaccagaaggagaacacgcactttactgtgctaatccatgagcttgctgaggcgtttcagaaggatttcaccaaatctacaaaagaacgtctgttgctgactgccggagtgagtgccggcagacagatgatcgataattcttatcaggtagagaaactcgccaaggatctcgactttattaacctgctcagctttgatttccacgggagttgggagaagccactcattacaggtcataacagtcccctctccaaagggtggcaggatagagggccttcaagctattataacgtagaatacgcagtggggtattggattcacaaagggatgccttcagaaaaggtggtaatgggtatccctacctatggccacagcttcactctggccagcgcagaaaccactgtcggagcgccggcttcaggtccaggggctgccggacctataaccgaatcatccggttttctcgcctattatgagatttgtcagttcttgaaaggagccaaaatcacccgactgcaggaccagcaggtcccatacgctgttaaaggcaaccagtgggtgggctacgacgacgtgaaatctatggaaaccaaggttcaatttctgaagaacctcaaccttggaggcgccatgatctggagcattgatatggacgatttcacgggaaagtcttgtaatcaaggtccctaccccctggttcaggcggtgaagagaagcctgggatcattgtag

SEQ ID NO: 9723 - DNA, 297 bp, synthetic construct
  misc_feature 1..297: note = source = /note="Description of Artificial Sequence: Synthetic coding sequence"
  source 1..297: mol_type = other DNA
atgaacaagcacttcctgttcctgttcctgctgtactgcctgatcgtggctgtgacatctctgcaatgtattacatgtcacctcaggaccaggaccgatcgatgcaggaggggatttggcgtgtgcacagcccagaagggggaagcctgcatgctgctgaggatctaccagcgtaacacactgcagatctcctatatggtctgccagaagttctgtcgggacatgacatttgatcttcgcaaccggacctacgtacatacttgctgtaactacaactactgcaactttaaactgtag

SEQ ID NO: 9724 - DNA, 600 bp, synthetic construct
  misc_feature 1..600: note = source = /note="Description of Artificial Sequence: Synthetic coding sequence"
  source 1..600: mol_type = other DNA
atggcctggggcggcgtgcacacctgctgcttccacctgtgctgctgctgttcctggcctcagggcgccgtaccagaggagttacacaagcatccgggtcagaccttgcttttgcagtgtcagtattctcctaagcgcggaccatatcagcctaagtcatggtgtcaacagacgtcaccaagccggtgtacattgctggtgacctcctccaagccgtggaccgcggtccagaaaagtcactatacaatctgggataaaccaaatgcaggtttctttaatataacgatgatccagcttacccaaaacgatagtggcttctattggtgcggtatctacaacgccagtgagaatatcataaccgtcctgcgcaatatttccctggtggtcagcccagccccaacaactagcccgatgtggactttgccttggctccccacatctactgcctgggaaccccagatccaggagattaagttcagggcgcctaccgacagtacattatggaagtcacgtgcacccgcttgcctcggctccggggggccacgcttcttggtgctcgtgctgtgcggccttctgctcgctaagggccttatgttgtag

SEQ ID NO: 9725 - DNA, 2025 bp, synthetic construct
  misc_feature 1..2025: note = source = /note="Description of Artificial Sequence: Synthetic coding sequence"
  source 1..2025: mol_type = other DNA
atgaccaccgacgacaccgaggtgcccgccatgaccctggcccccggacatgccgccttagagactcagactttgtctgccgaaaccagcagtagagccagcacgcccgcaggtcccattcctgaggccgaaactcgaggggccaagaggatcagcccagcacgcgagaccagatcctttacaaagactagtcccaattttatggtgctgatcgctaccagcgtagaaaccagtgcggcatccggatctcctgaaggcgctggaatgacaactgtgcagactattactggtagcgaccctcgggaagcgatatttgataccctgtgtaccgacgatagctccgaagaagcaaaaacactaaccatggatatcctgaccctggcacatacatctacagaagccaagggactgtcaagcgaaagcagcgcatctagtgattccccccaccccgtcatcacaccaagccgtgcttctgagagctcagctagctcagacgggccacacccagttatcaccccctctcgcgctagtgagagttctgcatcttccgacggtccgcatccagtcatcaccccctcaagagcctctgaaagttctgcttcctcggacggaccacacccagtgattacgcccagtagggccagtgagagcagcgcttccagtgacggcccgcaccctgtgattaccccctcacgagctagcgagtccagcgcttcatctgacggacctcaccccgtaattacaccatctcgcgctagcgaatcctctgcgtcctcagatggtcctcacccggttattacaccctctagagcctctgagtcctccgcaagttctgatgggcctcaccccgtaattaccccctcacgcgcctctgagtccagtgccagctcggacggaccacatcctgtgatcacaccaagcagagccagcgagagcagtgccagttccgatgggctacaccccgtcattactcccagccgggctagtgaatcatccgcaagcagtgatggccctcatccagtcatcaccccatcgcgtgcctctgaaagttccgcctctagcgatggcccccacccggttataacaccatcttggagccccggttctgatgtaaccctgcttgcggaggcactggtgaccgtgaccaacatagaagtgatcaattgctccataactgaaattgagactacaacgtcttctatccctggcgcctcggacacagatctgatcccaacagagggggttaaggcgagttctacgagtgaccccccagctcttcccgactctacagaggcgaagcctcatattactgaagtcaccgcctcagccgagaccctatccaccgccggaacaacagagagcgccgcccctgatgcaaccgtgggtaccccactccccacgaatagcgcaactgagcgagaggtaacagctccaggggccaccactctgagcggcgcactggtgaccgtgtccagaaacccattggaggagacaagtgcactctccgtggaaacaccttcctatgtcaaagtgtctggagccgcaccagtgtctatcgaggccggctctgcagtcggcaagacaactagcttcgccggatcgtccgcctccagctacagcccaagcgaggccgcactgaagaattttactcccagtgaaaccccgaccatggacatcgcgacaaaagggccattccctacaagccgggatcctctgccgtccgtgccaccaactactacaaatagttcccggggaacaaacagcacacttgcaaaaatcacaacatcggccaaaaccacaatgaaaccccccaccgccactccgaccacagcccgcacccgacccaccactgatgtgtcagctggtgagaacggcggctttttactccttagactttccgtggcttctcccgaagacctgaccgatccaagggtagctgaacgccttatgcaacagttacacagggaactgcacgctcacgcaccccatttccaggtgtctctgctgagagtgcgaagaggatag

SEQ ID NO: 9726 - DNA, 738 bp, synthetic construct
  misc_feature 1..738: note = source = /note="Description of Artificial Sequence: Synthetic coding sequence"
  source 1..738: mol_type = other DNA
atgcaggccgcctggctgctgggcgccctggtggtgccccagctgcttgggtttggtcatggagcaaggggagcagagcgtgagtgggaaggtggttggggtggagctcaggaagaggagcgtgaaagagaggccctgatgttgaaacatctgcaggaagccctgggactgccagcaggccgtggtgacgagaaccctgccgggacggtggaaggaaaagaagattgggagatggaggaagaccagggagaagaggaagaggaggaggctacgcccaccccttcatctggcccaagcccgtcccctacgcctgaggatattgttacctatatcctaggccggctagctggcctcgacgcgggcttgcaccagctgcatgtcagactgcatgctctggacactagagttgtagagctgacacaaggcctccggcagctgcgaaacgcggcaggggacaccagggatgcggtgcaagctctccaagaagcccagggccgagctgagagagaacacgggcgcctagaaggatgtctgaaggggctgagacttggtcataaatgtttcctgctctctagggatttcgaagcccagcccagcgcctcgccacacccgctgagccctgatcagcctaatggggggacgctcgagaactgcgtggctcaagcttccgatgatggatcctggtgggatcatgattgccagcgtcggctgtattacgtgtgtgagttcccgttttag

SEQ ID NO: 9727 - DNA, 279 bp, synthetic construct
  misc_feature 1..279: note = source = /note="Description of Artificial Sequence: Synthetic coding sequence"
  source 1..279: mol_type = other DNA
atgatctggcggagccgggccggcgccgagctgttcagcctgatggctctgtgggagtggattgccttgagtctccactgctgggttctcgccgtggcggccgtcagcgatcagcacgcgaccagtccttttgattggctcctctctgataaaggtccattccatcggagccaggaatatactgattttgttgatcgctcacgccaaggtttctccacacgatataaaatttatcgcaatatggggcatatttcttgctaccttctgctttgggaatag

SEQ ID NO: 9728 - DNA, 177 bp, synthetic construct
  misc_feature 1..177: note = source = /note="Description of Artificial Sequence: Synthetic coding sequence"
  source 1..177: mol_type = other DNA
atggccgacatgcagaacctggtggagcggctggagcgggccgtgggaaggctggaggcagtgagccacacaagcgacatgcaccggggctacgcggactccccctctaaagcaggggccgccccttatgtgcaggcatttgattcactgctcgcagggcccgtggccgagtactag

SEQ ID NO: 9729 - DNA, 732 bp, synthetic construct
  misc_feature 1..732: note = source = /note="Description of Artificial Sequence: Synthetic coding sequence"
  source 1..732: mol_type = other DNA
atgggccccgaggccctgagcagcctgctgctgctgctgctggtggcctccggcgacgccgacatgaagggccactttgacccggccaagtgtagatacgctctcggcatgcaggaccgtacaattcccgattctgatatatccgcttccagctcttggagtgactctacagcagctcggcactctcggttggagagcagcgatggggatggggcctggtgccccgcaggctctgtgtttcctaaggaagaggagtatctgcaagtagacttgcaaagactccatctagtcgcattagtgggaacacaaggcaggcacgccggcggcctcggaaaggaattctcacgctcttacagactgagatactctagagacgggcgaaggtggatgggttggaaagacaggtgggggcaggaagtaattagtggaaacgaagacccggagggcgtagtgctgaaagacttgggcccacctatggtcgcacgcttagtgagattctatccccgcgcagacagggttatgtctgtttgcctgcgtgtggaattgtatgggtgtctgtggagggactgctcaatgggagtttgggcatcgtggcagatggtgtggtggggatggatgacgttgggacgcgtgcgatcttgcggttccggccaggctatgactatgtgggatggcgcgaccaccgcctctcccgtcgcgatgtggcgatggtcactgtccctcacggggtag

SEQ ID NO: 9730 - DNA, 2535 bp, synthetic construct
  misc_feature 1..2535: note = source = /note="Description of Artificial Sequence: Synthetic coding sequence"
  source 1..2535: mol_type = other DNA
atgggccccggcgcccccttcgcccgggtgggctggcccctgcccctacttgttgtgatggccgctggcgtggcccccgtgtgggcgtctcactctccccatctccctcgtccgcactcgcgcgtgcccccgcacccctcttcagagagacgtgctgtctatatcggggccctgttccccatgagtgggggctggccaggcggccaggcgtgtcagccagcggtggagatggcccttgaggacgtcaacagccggcgagatattctaccagactatgagctcaaacttattcaccatgatagtaaatgcgatcctggacaagcaaccaaatacttgtacgaactgctctataacgatcctatcaagatcatcctcatgcctggttgcagttcagttagcaccctcgtggctgaggctgccaggatgtggaatttaatagtgctctcatatggtagcagttcaccagcgctcagtaatcgccaacggtttcctaccttctttcgcactcacccttcagcaaccctccacaatccgacgcgtgtgaagctctttgaaaagtggggatggaagaaaatcgccaccatacaacagacaacagaggtatttacgtctactctagacgatctggaggaacgcgtgaaagaggctgggatcgagattaccttccgacagagctttttctcagatccagccgtgcccgtgaagaatttaaaaaggcaagatgctcgcatcatcgtgggactattctatgagacggaggccaggaaagtcttctgcgaagtatacaaagagcggctttttgggaaaaagtacgtctggttcttaatcggctggtacgctgataattggtttaagatttacgacccctcaatcaactgcaccgtggatgagatgaccgaggctgtggaaggccacatcactacagaaattgtgatgctaaatccggccaacacacggagtatctcaaatatgacaagccaagagttcgttgagaaacttactaaacggttaaaaaggcatccagaggaaacaggaggctttcaggaagctccactggcgtatgacgccatctgggcacttgctctggccttgaataagactagcggaggcggcggcagaagtggggtgaggctggaggatttcaactacaataatcaaactattacagaccaaatttatcgggcaatgaatagcagtagctttgagggcgtaagtggacacgttgtgtttgacgctagcggttcacggatggcttggaccctgattgagcagctccaggggggctcctataaaaagataggctactatgattctaccaaagatgacctgtcttggtctaagacagataagtggattgggggctccccccctgccgaccagacccttgtgattaaaacctttcggtttctgtcacagaagctgttcattagtgtgagtgtcctgtccagtctcggcattgtcctcgccgtggtctgtctgtccttcaatatttataattctcacgtgcggtacatccagaattcccagcccaacctcaataatttgaccgcagtgggttgtagtttagctctggcggctgtcttccccctcggacttgatggatatcacattggaagaaaccagttcccattcgtgtgtcaagcacgcctctggctgctcggcctgggctttagcctcggttatggctccatgttcaccaagatctggtgggttcataccgtgtttaccaaaaaagaggaaaaaaaagaatggagaaagactctggagccctggaagttgtatgccaccgtcggattgctcgttgggatggatgtactgacgttggcaatatggcaaattgtcgacccgttgcaccggactatcgagaccttcgccaaagaagagcccaaagaggacatcgatgtcagcattctcccacagctggagcattgttcctccaggaaaatgaacacatggctgggtattttctacgggtataaagggctgctgttattgttggggatctttttggcatacgagaccaaatctgtgagcacggaaaagattaatgaccatagggcagtcggaatggctatttacaatgtggctgtcctgtgcttgatcaccgccccagtgaccatgatcctttcttcacagcaggatgccgcctttgcctttgcgtccctggcaattgtgttcagctcgtatataacgctggtcgttctctttgtacctaagatgaggcgtctcatcacccgcggagaatggcagtcagaagcacaagacacgatgaaaactggttccagcacaaacaacaacgaggaagagaaaagtagacttctcgagaaggagaatcgtgaactggagaagatcatagccgaaaaggaagagagagtgtccgaactgagacaccagctacagagccggcagcagctccgttcccgccggcatccccctactcctcccgagccgagtggaggactcccgagaggaccccctgagccgcccgatagactatcttgcgacgggagccgcgtgcacctcttatacaagtag

SEQ ID NO: 9731 - DNA, 921 bp, synthetic construct
  misc_feature 1..921: note = source = /note="Description of Artificial Sequence: Synthetic coding sequence"
  source 1..921: mol_type = other DNA
cggcggacctgcgccggccccggccgggccggcggcgcccggagcgcttcctggatgtcaagactgcgcgccttgctaggtctggggttactggtggccggaagtagagttccacgaatcaaatcccagactatagcttgccgctccggtcccacttggtgggggccccagcgcctgaatagcggagggcgatgggattctgaggtgatggcaagtactgtggtaaaatatctaagccaggaagaagcacaggcagtcgaccaagaactatttaatgaataccagttctccgtcgaccagctgatggagctagctggcctgtcatgtgcaacagccatcgccaaggcctatcctcctactagcatgtccagaagccccccaaccgtcctagtgatatgcggaccaggaaataacgggggcgatggactggtttgcgcaagacatctgaaattattcggttacgaaccaaccatttactatccaaagcgtccaaacaagcctctgttcacagcactggttacacagtgtcagaagatggatatccctttcctcggagaaatgccagccgagcccatgacaattgatgagctgtatgaacttgtagtggacgcaatcttcggattcagctttaagggggacgtgagggaaccctttcatagcattctctcagtccttaaaggcctgaccgtgccaatcgcttccatcgatataccttccggatgggacgttgagaagggcaacgctgggggaatccagccggacctcctcataagccttactgcccctaaaaaaagtgcgactcagtttacagggcgttatcattatctcggaggcaggttcgtgccccccgccttagagaaaaaataccagctcaatctgcccccctatccagacactgagtgcgtgtaccgactccaatag
